United States Patent Application Publication US 2014/0057251 A1 - sequence listing, part 47

SEQ ID NO: 56070 - DNA, 964 bp, Cannabis sativa
aattaattaatccaaaaaaacaaattcagtggagctcatcttttataggcatttttcattgtgttattacacagtaattaatgaaaccattgtcttaaccagataatagtattttctttgtgccgacaacactttgtctctccaattactttaaataataaatctaaaataaattatttaataccatataaataattactaatttttcaattcaaaatagattttctgaacatcattatttagtgttatccatactcttgacaatgtttcaaggtggcaatttggggaccatagacatataatactaaactctaataaattagattatttgttaaatctcattgaccaaaataattatatttattaattccatatttactccactataaatatagaattgaactcatagtagttattgaattatatttagtgagtttaattgtagtgtccattgatataatcaatacaattaattgaaggccctccttgtgtcggtccataattagttttggtcaaattatcgttttatcatttcaattatttctttatccttagtaccattaattcacttatgaaagtataatttagatccaatctaaatttgtgcacaacttttcagttctaaaattaacacttaaagggaactaacattcgatctgttaggaaagtcaggattctatgattgtaaatcaagtttccagtcatccatattattagttttccaaaacaaaagttgtaagaattatcctcccgaaaaaactttaaacagtgaattgaagaaactcataatataaacaagagttcatgattactaagaattcaaaccgatctactatctgatcattattgtgatatgaattatatttttatagtaaaagacatgtttgataaatacaacttaattacatattggtccatgacatatataatctctattatatgtaacaccttcacttagatgtct

SEQ ID NO: 56071 - DNA, 1711 bp, Cannabis sativa
attgagtataggctgacattatggtcgatagtattgtcgtatgaacgttctagactcagtaccatgtgggacatgagcattagggttatgatcgggtgtatgggcgccaggttataactcgggatattagtatgttatatgttatgcttttcttactatgtctgtcaactcatagtgttgtttccatgtgtaggtaagggtatggctaaagctgaggagctgtgagagcgagttggtgaagattttacatgtcggggtggttaggcctggagcgtaccatcttagaggacatcaaggctttcgctgacagtcgttaggcgacaaaacttttatgttaaactagcaaacttttgtaaatgtattttgtaacgggatcccgggattttatatatgtaataccttaagtttttaattcaataagtaaattttaattattcacgattttccataaccttgttaattagcaacgagctgcacagtacatttaaattcacgttaacatgcgtaattagtgagggtgttacaaactagtcgtccaatccaaggccgcaagtcactactgtcggccaaaaggtagagggccagatcctaccagtccgtcctttaagaggaatcacacattccaacaacttcaccattacttattggccaaacaagtcagacactaaggccaccctgtatttccgtgtttaataagttgggtaccgcacatgacctcatgaccgatctaaatcacagaaggagcctggacaaatattatgttccactgactattcaaccaagtatctgtacctaagatctagttcaaagagatcccaatgtgacacaagccggtcaacaaacaaaaaaagttcatccacttgtgcaagcataaatagatcaacttaaaatactgtagaaggactgaccagcccaaaacatactgatctcgaacacgaccatgcatgctaatcacctttctccactgaaattgaagttcttaagttacccccatagtttaaaatgccaatctagacaatgtatacgggaaaagaagatcctttgtcttaaaatattttgagatgtagatggacctgcagggggtaagaggtgacgtacgatgtagaatctttcccgccacactcacagaggtcacccaacaatggtatttcaaactacctccagaaaggtttaactcatggaatgccttctcatcagagttccatgcacaattttcctcctcccgtcaacttccctcacacttggaagacttggtagtagtaaagtaaatgccaagagaacccctcagagcttatattagcatgtttatgaccgagggcacaaaggttaaggggctgactgaagaaggaatactagctgcaatactcagggcattgagcctctcagagagttatggaaagatattaaaaggctaactgtgggattaatggctgaatttcttgatcgagtagatggattcattaagctcgaagaagctattcagtgtgtggatactatcagacaaaagaaaaatcaacaatgtgccatatcagcagggatgtccataaaaaatccacaatatcccagtaattcgaattcagatgggaagaggtctaacaatagcaataggcaaggtaatgggaaagaaaggaaaattcactagcaatgccaagtagcaccccagagaaaattcctctaaatttactactttctcagtcctaacagacgacat

SEQ ID NO: 56072 - DNA, 1071 bp, Cannabis sativa
taattatgaaaggagtagtctatttattttaaatataataatttatttccacacattattaatgtgagactaactctaataagtagctatagaatttaacaagtactattaatgatggaagtaattgaaatataactttgaagtatttaacctatttatgtgacgaatacccttttttattactattactacttatataaataaataaataaatagataaaccattattattattattattattgagaagaccggcacattcccggaagctgcgtggcaaaagaaggatgtcataattaaaaacaaaaacaaaaattaaggatgtcctacaaagttaatatgaactcgatttctggtgggatggagtaagtacaacttttatgaagcctcttacgaagaaagtccaatcaataacctctttactataaattaaacacacaacttccataaaccttaaccatttcattcaatttcaacgacacaaaaactctgttcctttcctctctctgcctcccaacatctcttaaacatttcatctcactctaactattattattaatatcgtcatcatcatcatgaaggtacatactcatcatcattataattcaagtttcataattcaactctttcaatcatatataccatgtttctcatcttattcattgattaatgtttgcagcaaaaggtggtaatcaaggtttctctaaacgaacagaagtgtcgcaccaaagccattaagactgctgttggaattgatggtaacaaccacttcaaattcaaatacatgtttttttttttctttttttccaagaataagaaactaaagtgaattagatgaattcttttatatgatacaggagtcatacaagcaacacttcagcaagagaagaatctaatagaggtaacaggagaggacatcgacgtggtcttgctcaccactctgctcagaaagaccatgaaatacgcagaagtagtaagcgtgactgtcatcgataaggccgcagaggagaagaagaagaaggaagaagaggaaaagaagaagaaggaagaggaagaaaagaagaagaagga

SEQ ID NO: 56073 - DNA, 811 bp, Cannabis sativa
gggttttgctaatcctttctcataattctgggtatcacagttgaactcaacaagtagtatcagagcttggcagagactattcaaaaggtgacaatcttgaagaacatttcaagatcatggtgaaagtttgtcatcattggaataacgaagttcaacattaaaaatttattgttaagaataattttgggctatggtgagtaagatgcggccattgttggttcagcaagaaatccaagctgcattgctaggagaaaataaattaccagcaactttaactgagatggaaaagacagagatcttggataaaactcatagtgctatcattttgagtttgggggataaggtgttgtgaggggtctcaaaggagaaaagtgcagcaggtctttggaagaagttagagagcttgtatatgaccaaatcattggccagccgattgttcttgaagcagaaattatattcattcaagttgacacaaggaagaatgattgaagatcatctagatgaattcaataagatagtttttgatctagagaacatcgatatcaagatagagaacgaagacgaagaaatcattatcttgaattcactatcaatattgagacatatgagcatttttgtggacactataatgtatgtgttgggattttacagtcttatccctacacaaagtcaactcacacacacaaacacaaggtcaatcttgacctgtaccaattcagcaagtgaacacaagctgtccacgtatcacacaccaacttttgacaaagtgcattcaattaaaacattaaactttaccaaaaaccaaacaata

SEQ ID NO: 56074 - DNA, 992 bp, Cannabis sativa
ttctttgagagagaaagagaccatcttgtgcataagcaacttcaaaatcgagaaagtacttctgttttccaagtgctttcagcttgaatttctggtgtaaagaactttgtaaatcgtggagaatattgatgtttggtccagtaattacaatgtcatccacgtatacaaggagggcaatgaaagtgtcctcagttcctctagtgaagagcgtataatctgcttgtgattgcttgaatccctcttccattagagcatccgataacttcttataccattgcctagatgattgcttgagcccgtatatcgacttatgcagcttgcacaccaagttactttctgtattaagattagaagggagagttagaccttgtggtaaacacatgtagacctcttcattgaggtctccattgagaaaggcgttattaacgtctagttgaagaatatgcatgttcttgatagtagaaatggctaaaagtaatttaagagtaaccattttagcaacgggagagaaagtgtcaaagaaatctactccttcttgttgcgtatacccttgtgcaacaagtctagctttcaaccgttcaacactaccgtcgctattatatttaatcttatgaacccatcgacatcctataactcttttatttgctggtaatggaacgatggtccaagctttgttatctgtaagagccttaagttcacattgcattgcatttagccaaccaacaatttgaatggcctcaaagtatgacttcggttctttgacagaagaaactgcaagaataaatgccttgtatgtgtcagataaatttgagtaagatatgaatttatcaatagggtgtggagttgaagaggagtcatgtatgagtgaatagcactcaaagtcccttaaatgagatggaggtctagtttgcctttgagatcttcttggaatttcctgggagttatttcctgctgctgcactatttcttgctgctgcattatttcttgctgca

SEQ ID NO: 56075 - DNA, 1185 bp, Cannabis sativa
gatgctttctatggagttgatatttatacgaatggacttgtttctttcgaaattaagtatgattcgtcttataaaccgagtttaaagttggttggtgggattcaaacaaacaagcgtaacaatgatcatgatgttgtttttgataagaaatatttggtggaatcatataaaggagatcttttgcaagttcaaaggtatgtttacatggagacatttcgtgtaacaacatgttttgatatttttaagtggagttttgatcgatcaaattgggaagaaataagtgatttaggtgatgaagctttgtttgtaggtgataattcttcagtatcagttgatacatcattaagttctacaaaatgtcagagtaactgcatatattttaccaacgattatagtattcattcaaatattaataacccttcagatatgggagtgtacaatcttgtaactcgaagtgtgagacgtttcaacattgatactaatctctttactagaatgggtggaagagcacccatttggattgtacctaacatatctataaaaaattataagtaaggtctctctacttggtgttatgtttttttttttcttttcttctttttttattctttttgttaattggtttccaaagatttgaattctatgaaacattgtattaagattgtttgaaatatttttatttcatgttgattaaaattaatttgattgttttattatatcgttatatattaatttgattgttttattatatcgttatatattaatttggatagttaaaaaaaaaaaaaagaaccattatttagaaaattctttattactagataaattatggtcgtagagataataaaagcaaattatatttattaatgtgttagtttatattgaatatttactatatatgaaatcttagaatatgtatgtttaataaataatttgattagtttttaaaatgagatatttgtggcgaaatcatattaatatttgtaattgatggtaaaaatactttattttataattttgttgcatgtgtcaattaagtcttttttaatttaaaaagacgtggtgacatattttttaacttatttaatatgcgatgtaacaaaattgtaaaataaagtatttttgctactattttttttttattatattatatatgtaaccgttttaaatattaaggagattttg

SEQ ID NO: 56076 - DNA, 1540 bp, Cannabis sativa
cattttatcttgttagatatttattttatttttttaaataacataaattttgaatacttagttgatttttttttttttttgaaaaagatatttagtgttgttacaactctaattttttaaattttagggtttactttttttatttaaattcaaactaaatcctataaccaattatcctaacttgttacatgtctgtttatttatttaaaaaaattttgataaacatattatttatttgatttaaatggatatgattagcttgttgatggatccaatgatccaaatagttaattgtcaagatcaaataaataccttgtaactaataattttataatcctctttcatctttattataaacttagtaatatgataggacccatccaaatcagtatatatatgggtctatatgtttacttttgggcttagatgcatatagaagcccatttaattttttttaaaaaaaaaaattaaatggactaaattgctaaaataaagagaccactttgatagttttatttaggctcaattagtgttgggcttattcaattaataacaattatttatttaaaggttaaattcctctcttttgaaccttgtgtgagagttagggaaccatagtagtgggtacgacatattgaacctagctgtctctcacatgaactactccaactctgaaggttcatttgccttatttaaataattacactaggctaattatattagtttaatctaattcaaattgattagcaagataattaatttttgaaatatatgaaattaattcttcattagattatttcataattaatttaagaaaaacacacttagtttaatgaaataaattcaagataattaatttttagaaaaaatttatgtattttttttatatttaattaaatataaaaattaataataaagttgatttaatctagatacttaattaatttgattttttgtagaaaaatatatttaagttaaaaattaattttataccaacttaaactaaaatatctttttaaaatataaattaataattaagttgatatatttaagatacttatttaattaattttattttaataaatttaacgaattaagaaaactactttcaagttgaaaatttaattattttagaacaactaaacttagaatgttttcaagatatttattttattatattttaattaataatgtcgaaatataatttatttttacattagaatttcaaaagtttattttaaaattaaattaaagttgaaaattaattttagatcaatttaaattaagtgatttcattaataattaattaaaaatatttttttaataatgagctttagtataagacattcgatctccactgttagttctacatggttattgttttttgatgagattcatcctgaatagatgttgattcattataaaatttaacaccgtagaattttgaaagataaatattattataaattttttattcttagtaacgattactcaattagtgactgctcagaataagatttataaaatatgaaacaatggt

SEQ ID NO: 56077 - DNA, 645 bp, Cannabis sativa
tatagtaaatttcgagtttctcttgttcttcttctttaattttcaaatggtataagttttgactaattgctcacactttttaaggtaatactcaggttagtgaagactgtgtagtcttttctcagctgaaggagaattgaggttcagttcttgatcatactctacaacagaaaggataaaaagttagagatctgaacaaaatgagttagttaattctgttgcaaccaatgtaaagatctctatatccctttatgtaatttatattattattttaataattctatatatttaagatgttagattagtaataatgaacatactcgaataataaattaagatcctagtgaaatattttcagcaaatcatactataggtacaaacgtttgaatttttaatatacacattggatacaattagtagacttatagtaactgagtgtatgggtactcagtaacaagttaaatatgtatgttgtatttatatgtatgtttgtcttaccgagtctatcgacttacatatatatatatatattgttatgtgtaggtaaggaaaaaacaaaaatgaaacagtagtgagttaagagcttagtgaagattgtactatctgactgtctagacttggagggttgcatctctcaagacaact

SEQ ID NO: 56078 - DNA, 2823 bp, Cannabis sativa
tggagcatgtcttgttaacttaaaatcattaagatgaccaacttcttcttcatgttggagtaatctggacaaggcctcagaatagattagaaacaagtatggcgatagtggacaaccttgacagagcccttttgatggaaggagggatctcgtgacctcaccatttaagataaaggagaacctattagcacgcaagcagctcataattagccttatccaatcactagcaaaccccatcttacccatgaccctctcaatgaaactccattcaacccggtcaaatgctttactcatgtcaagtttcaacgaagcaacacctttacgtcccaatgttttgttcttaatagcattgaccaactcaaaagctactagaacattgtctgtaattaaacgattaggcaagaaagcactttgtgattccgaaatgacataaggaaggacatgtttaaagcggttaacaagcaccttggtgacaagcttggagataacattacaaagactgatgggacaaaagtcttgcaatcgttgtggtttcttgatcatgggaattagtgtaataagtgttttgttaagacttgtaggatctgctccatcatttaaaacacttaaaacagctgctgtaactaagtgaccaaccacatcccaattatgttgataaaacattggagacattccatcgatacccaggctcttatctggtgccattgagtgcagagcagcctcaacttcagtagcttcaaagggtgttagaagggtggcattcatctcggctataactgttgaagggatggtgtttaaagtggtaacaagggcaacttcatccaatgtagaagcagtaaaaatttcagcaaagtagtcatggatggcagctgcaagttcagatttagaagagacccgattaccattctcatcaagcaaaaatttaattgtgttattcgacttccttgctgaggctttagcatggaaaaacttagtgttccggtctcctacttgtaaccaatcaacgcgggagcgctgctgccaataaatctcctcttgctccaacaattcatccaacaaagactcagaatttttcaaagaattcatagctgctggtgttcgatggggactgttattgagagtttcgacttgcagttgtgcatctgttattcttctcttcatgttaccatatttttcaaaatgccacttctgtagattaacaacacattcatccaaattaccaaggacagcagagatcgggttagaagttgatgaagatttccaactagcagcaatgatatctttacattggtcatccgagagccaaagtttttcaaagcgaaactgactgcgtcgctggttgtgctgtaatcgagaattaataggagcaaaagaagcggatatagccctgtggtctgaactaaagtaatcgagatgaaggacccctggagcttgaaagtgattctcccagtgatggttcacaaaacaccagtccaaacgcgatttaatagtgctcacaccagaacgattcttaatccatgtaaaagggtccccttcaaacagcatctcatgtagcttacaatggtcaagagtcttacggaaagcttccatatgttgttcatttctgagacagccacccgatttattctcattagagagaatctcattgaaatcaccaatgactaaccaagggagagatggagaaacatcagcaagtcgttgcaaaagcatccaggaatctggtttattttgggcatccagagcaccatagaaagctgtgagatggaaggtagcctcattatccgccttgacatagcaatcgaaaaaagtttttccaaagtttagcaaagtaacatcaatattctggtgccacagcagtagcagcccaccactaaggccagaccgtggtgattccaatccatgagcaaaatttaaagtttgaggaaagcgagaaacagaattctgtgggagttttgtttccataagaaacaaaatatggggcgattattgtttgacaagcaatcgtaagtgcctgaatgcagacgggttccccaaaccccgcgcattccaactcaagattttcataatgaatcgcgggattgcaaagcaatctccacggaatcatcaatgaagccatccgaatccatatcatcatacgaaacattttgacttgagttttcacccacaagaaaagaggaagcattgtggttacggcatcttttaagaaattgcctcatagagagagtgtcattttgtctcttggccacgggtgtagtcgggtaattttctttattcgaagcagcgataacaatagaagaggtggatactgacggtggaattgcagtgtgaacagcagagaaggaggcagatttaaatggtgatggtgttaaagttggtggataagtggcaatgggaaggaaaggccttgaagcagatccaatgtcaggtgtaaatattccaggcaaattggtgacaaagaggctgttatcagttttcatatcaaagtgagttgatgaagttggtgggggaacagttggtgaagaagtaacaaagtgttggtggtgttgcatatcagatgcaggtcgatgttgggaagtaattggggaagtaattgggattggtggggacttgttagagtgtaggatagtggaaggtggaggcaatgtggtgtttagtgtagatagagggatagttgaatgagaagaaatggtagtggggtgactaagtggtgtttggggaatgattggggcagagagcgattctgcagcagtaagatatgggggctgaggggggccaatgttgttcaaacgggggattgtggatgtgagagtggtacgggcaaga

SEQ ID NO: 56079 - DNA, 1697 bp, Cannabis sativa
atttgctggcaggttaaacacttagatacgtactctaccacatctctcttcatcccataccaccaaaaatagggttttagatcctgatacattttgatggttcctgaatgcaacgaataaggtgtagtgtgagctttatcgagaatctctttcttaagctcaccattattaggaacacaaactcgagctttatatagtaacattctgttattcgagattgaaaagtccttaggtcgactggccaatatctcatcttgtattttgactagcttaggatcttccaactgcacccttttgattctttctaacaaatctaattgaagtgtcagattgtgtaacttttcaactacaaactcaatttcaacattaaccatttctgtggctacttgacgagctatcatcatcgtggtgaaaacctgaccgaacatcttctacttaaagcatcttccacaacattggctttcctagggtgatataaaatcttacagttgtaatctttgaccaataccagccactgtctctacctcatatttaaatctttttgggtgaagaagtacttgagactcttatgatctgtgtaaatcttgcatttttcaccataaaggtaatgtcgccatatttttagagaaaatactacaacaacaagctctaaatcatgcgttcaatagcgctgctcataatccatcagttggcgggaggcataggctataactttgtcaacttgcatcagaacacatcccagaccctttctggatgcatcacaataaacaacaaacttttctcgatttgttggcaaagctagcactaggctgttatcaatcgctttttcaactcctaaaaacttgcctcacatttatctgaccatatgaatcgttgattcttcttagttaactcggttagtggcatagaaatcttagagaatcctttgataaaaaattgataataccctgccaaatcgagaaaactttgcacttctgtcacagattttggcctcggccaatttttcattgattcaatctttcccgggtcaagcataattctgtcttttccgacaatattccctataatcacactttttgaattttgcatacaacttatgatctctaagtcagtgtcataccatttggagatgttgctcatgctcttcttctaactgagagtacacaaggatgtcatcgataaatactataatacagttatcaaggaaatccttgaatactctgttcataagatccatcaaggccattggagcatttgtcaattcgaatgacattaccaaaaactcatagtgcccatctctagttcgaaatgtagtctttggtatatcttctttccgaattttgagttgatgataaccggatcgtaggtcaatttttaaaaacacagtcttcccctaaagctgatcaaacaaatcatcaattctgggccatgggtatttattcttgatcatcagcttgttcaattcctgataatcaatacacattctaagggaaccgtccttctttttcacaaatagaaccgaagctccccatggcgatacactaggtcgagtaaaccctaaatcaagcatcccctgaagttctatatttagctccttgagttccgttggaaccattctatatggtgcttttataagttctactccaggtgccaaattaatcacacaatctatttctctttgtggcggtaatcctgac

SEQ ID NO: 56080 - DNA, 725 bp, Cannabis sativa
aatacaaaatcttcatataagcacatgaaacatcaaacccacaataaagtcgtatgtttcaaaatacaccctgtgctcagatgtccactcttcttacctctgttgttaagaataccttcttgctacttcaggaacctcaataaatttttttgttgagaacaagatcctacgcattcaatgatacaaaaatactcaaaatatgaatttgtagactcatacaaaaacttacgtaaaatacgcaacacataagccagttttacttgcatgaaacacaaaatagaatcatttatcactttgattcacaccaacactttgcatatattcatatgaacatttttaacgtaaaacatgaattcatacaaatactttttacgtgaaaattttagtaaaatactatttattaacaaaatatatatatatgtaatccaaaatgagaagataacatatttcttaatcatttatatagattataaaacatatttaatctgcttagaaacacgtgtaatttattatccatatttatgtacaaatttacacttcagattgtataaaataccaattaattaaataaaaaaataacaaaatgtctcgacctagtcttaaattaattccatagactaaaattatgttgtaacatcatattgacagttcccaaagagtgaacataatttttttttatatttattctaattaaaaactaattaattagtcaattaatcacaaat

SEQ ID NO: 56081 - DNA, 822 bp, Cannabis sativa
catgataagctaagggagagaaatacatgacaaaccaatcctggagaggattctccaagtatgggcacgattcacaggattaggagcaccataaacaacagtaaaattaaaactagaaaaaacagcagacgagataaaatagtggatatgattagtagaaaaattacttattattacatccagctctgaatttcaaaaaagtaaaagtcccccacctaaaccaacacgggggacctcaaaacctaacttaagtctaaacagatcagcagagttcttacaaagtctagtttccataacaaaaagcaaacatggcttatacattttgaccagcagggagaggttttagaatgctcgatcactccccaatcctcaagcattccaactgttgagattcatgtctcctagcaggcatgtgtatccataggacctgcctcttcactggacgccacttccaccaccttttggcatggttgtggcctatgtctcttcagcatttccctcaactctttctaactgttgccagttgtctcttgaaaccagatgagccagctgattggtttttccttggaggtgcacgacggggggaccatcactgcttccaatggcgaatgacagggaagtggggagacctacaaagtgggtagttggttgtggctcaatcgggtggtgtggaggagagatcatcaaaggagcattgagttggctggaggaggtagaagtggagctacgtgatccaggggttgagggttgttgtggggaagcagagcaggataaagctccaccattagcaactgacatgagtgcagcaaaagtggggccagg

SEQ ID NO: 56082 - DNA, 1000 bp, Cannabis sativa
aaatatccactaaatatttctccacccatatcagctcacaagatggttaactacttaccttaatggtttttcatcattgctagaaattcatgaagtttcttaaacatttctaatttttttgcataaggtaaaatctagagcgattgtatgagaatttaacgataactcacatccacccttgaatgtacatccatatgtcaaatatagattatcctactttcaagtggatattggtatatttactctttacagagaatcatcttgtcaaaacactacgaacaagatgcaagtgccatagatataatattgtggttatggtcctttgctgacttaggtttagttacaataaagagttcttagaatagtccaagtggatcttggtcacagaatacaaaactcacaatccctacattaacatacagctcgaatccattgacagaaactggaaattaacaacttgtaaaagttatactgtaatgtttaatgcattcttggaactgaaatttgaaatttcaatttagaatctaaaatttaaagtcaaagacttgaatttatactaaatatacatgagtaattattctagcttgtatcaacactactaatctaactctaagtttaggttgccttaagtaagcatatacatgtaggagatatctaagatcgaggatttatattatttcaggatagaattttgggaatgtagtcatttgcgccattcaatttcatagaaaaaaaatgaatgacatcataagcaaatgatttataatcatttctcatccaatgatatactatttaagtaaattctaaataaaaaaataagaggaaaataaaggataattttgattaaaataagaacccaacgctatcccgtttaggcaagagtcaaagatattcttattttacaaatttattcattgtttcatattgtaaacactaatctaagttgtcatctttggatgtacaactagatgttgcctttataaatacttatctatcgaga

SEQ ID NO: 56083 - DNA, 755 bp, Cannabis sativa
tttttcttttattttaatttttttccttatagtcaatgttactcatgtcacacgttcaactaatatggctgcctattatttggctcgacatgctctaaagttgaataaagcttgctcttagttggagaatttccctccactaatttactctactattgtaaatgacttacatttttaatttgtgatagcttattattttctctctcaaaaaaaaaaaaaatatgtataaatcgtacatattatacacgtaacctcaacttaatattatttttttaaaaaataatatacaatttaatataatattataaattattatatggtctaaaagaaccctaaaagattaatatggattgaaaccttttgtacattcacatgtggtgtggttgttaattagtgttaatttattatttttaattctgtctaattgaaattccaaagagaggtacatgtaatttggagtcccctcctagtttctttctttgatactttccatctttgcaaaagttattaattcagaccgttatattctaattcttctaaaaagttcatatacaatcatgaataaatgaaaaaagaaaatggctttatctgtcttcttataaataggtcgaattaaatatcatttcatccctttacgaaatctaaaattatagacgatttcttatatatttcaatgaattattaataattaatagaagaattgcttcatacactacttgtcattatatatctatttcatttggtgaaaagcacac

SEQ ID NO: 56084 - DNA, 874 bp, Cannabis sativa
aaacaagtaaaggcttactgaaccgtgagtcgagcttatctctgacgatgattgtacatgtcttaacgatcttcgataaacaaacttggtagctcttataccaaaattgtaacgtgatgatacttaggaacgctacagtaattttctacttaatgtgccacctttgctaatcaaagagttttcctcgaaaatcgtgccaaattaaaattttgatttaaactattaaaatttatgaacatatatatatttacataagccgagatcccgtgtttaaacttttataatcattatcaaaatatttttacaaacatgttgcacaatgactataaaatacagcccaacttgtcccgagaccgaaccctccaggtcgcaccgtattgacatgtacaatcatcacccgagctaggaactctctcttgttcagattttgcattttctttacctacacatggaaataatatatgtgagtcaacagactcagtaagaaaagcaaataacatataatatattattgacttgtatttaggcacccatacacctatccataaggcttatcaaataagaaagagcgttctttaccaaggtacgacaactgtaccacatgcactacataccgctactgtatgagtgttggtaggatttactctgtacctcaagtacccctaagtgttctaccacatacactctatattcgtactagtgttggtaacaccgtactatactctttagacatcatacattgtaccaatgcactcagtattactactgtactagtgttggtagtgcacgaatcacaaataacatgctgttggggattattttaccaggatttagatttactaccatgtatgttatttagcatcctaaatatgaa

SEQ ID NO: 56085 - DNA, 1143 bp, Cannabis sativa
aaaatagaaaaataccataatttacctaaaattaaaatttatccatatttatctaaacatttaataaaaatccatactacaggtaatttccacaaaaaaaaacaaaataactatactcttctctttgtcttgtaccaaaagaaaagaagcaaagaaaaagaaggaccaatcatcactacagcctccaacgaaactagatgatttttcctcttcttttctttttttcttttcaaacaagaaataaagattaaagaaaaattagaaaatctaatctagaaaaaatatttgtattcaaatacattaaggtatgttaaaatttatattattttttgtgcatttttttctttagatggtatataacctgttgaatgattgattattagtatattatatattattaatattattatgttatttatatatatactttacagcttattagtttaaaaagtatttagagttagttaattagtattagatttttttttgggcaaatatatatatgtaatatgtattatagatattaatataatgatgtatgtaactgaaaaattaatatttattttgtttattccagtacaccacaccacagtataaaaaaaaataggaaaaaaaattatatttatttatatattttatattatataaatggttgaggttgaatcctcttttctttccagtgaatggtttgaatgataccatttaatttatttggtatcttgatttaaaaattgttttttaaattatttttaatcttttctaaatttatatgattaatatgatttgcataattataattcttttaattgtgtataaatttattcattcagttacaatattttttatttattaagtcatataatttttttaatgttataggtaatgactactaaaagaaaatacaaatctagagctctaaggaggaaagagaaatcaaaaaaggaagttttgctcaaaaaacaggttgattccctcagcgtattttggtaacaataaagtagaaacatctattacgaatgcaattaaggatggacttgattgtgaaaataatgtgaatgaagttgaagatcaagtggtaaatgacaaagaagaagaaagtcaaaatgttaatgagaatgtgaatgagaaaagtttagatgataa

SEQ ID NO: 56086 - DNA, 1007 bp, Cannabis sativa
tattgtattagtattatttaattatattaatacttgtttggtattaacttgtattaatagattgtgttgtattgtattgcattagtattatttaatctgggtcgggggtctgggtctggattcgggtctgggtctgagtcggggcccgagtcagggtcctgggtccgggtctggggtgcgggtcgggattcgggattgggtccgagtccgggtcctgggtccgggtctcgggtcccccaagtccgggtgcgggtgcgggtgaggattggatccacgtgtcaaatttataggagactgatatagagtttctaggcaaaaataaagtgcactataacacgcccctagtttcacgatcgatagttgtcattagggaaactatcagagagaggcgggcaagttattgtcacgagatagtgatttttggatgtcttgtcaagggtttcaaaaagatagttgtaattattattttatttctctgagatgccacgtcatcaagacccttcggtgtatgtgcaggtgtatcctttggagaccttaggcattcgcttgccacgtgtctacaccccgataaaaataaagagtgtgagtatttaaccccctcaaatataaatcgattctcatcattcttccctctcattttctaacttcactttctcacttagaaattcaaacttaagaaattctgaagtttcgaattcttgtttgctgaagacgatttcaaaagcttgaggattttcaagagtggtcttcgaaataattacatagacggttagtttcttctatataactactgtaattattttctctaatttcttgaatgccttcttggtttttacaccactaagaattctatttaaaaaagaaaaaatttaattttatttattattaatatatacatattatttattctgtactattgttacatttaagaaaaaaaaatatttttaggatttaaaaaccctaaacaacatatataggatttaaaaatattattgaaagaaaaaatt

SEQ ID NO: 56087 - DNA, 511 bp, Cannabis sativa
caaacaaactactgtttctcaatctccaacaacacattagacttccataactgataatagtaaaaaaaacaactatatttcatcttctaaatccaacaaccagcagcaacagtgcaacattatgaaataaaaaaaaataaccatgttccatctccaaatccaacaaccagcaacaaaaaaaaaaccatgttccatcttccaaatcctgaaaaaaaaaaccagttaatgtttaaatccatgagaatactgatatataaaaatatatatcactgatatttttcagttagctattaacatgaaagaagactattaatcaaagtcctaaaattagatctaaaatctgactttaatttttgatgggtacttgcaatatattaaggatttctgcctacaataaattgtaaaaagtagcaaaaagataagaagtaaacaaatttcaaaggaacttctattgagatttttaaagctgcagatagttatcacaaggaaaaaagaaaaccataactttaat

SEQ ID NO: 56088 - DNA, 996 bp, Cannabis sativa
aaatttaaaaatttaaatattttcactgctaataaaatatagtgagcaggcccagaactaaaattaagagggtacatttttttaatgtgaggcgggagcaaaaaataaactaaatatcaaaagtaaagatgtttttattagaatttaaacccttgcaacctctataacatgtataagataacttaactaacataccaaagctattattatgttatatttattacctttgatttcaaatatatgttgtaattaactaaaataatacatatacattatttcttccagagagcgactgccccctattgtggacattgtctcacatagaataattggtggagtactattgagccatatataagaacatgggctacttgatccacttattaccaattggttttaagatggaatcccatgattatcaacatggtatcatagctatatctcttgcgggtaaagtgatcctatccgatctgcacctatacaaatagtgaatgtccactctgatacggttcaatattgatgagcaaaaaataatcattatcttgagggagaatattgtagacattgtctcacatagaataaatggtagagtattaagtcatatataagaacatgaactactccactcactactaattaattttaagatgaaacctcatgattctcaacacctctttgtcgcctttatgtgagtctgcctacaacagttgtcaaaaattataaccgaaagtactttagcagcaaaaaaagaagcattagtttataagtgttagattttagagataagatgaatgaggtttcatctcaaaaccaattgataatggaaggagtagctcattcattttatataccacaatttatttccacacattaacaatgtgggactaactctaataataagtgttattataaagttaaaaatttaaatattttcaccgtaaattactctatgtttatatataagaatgaaatgaagaatagtagatgaggtgagtg

SEQ ID NO: 56089 - DNA, 825 bp, Cannabis sativa
agagatcactgagagatttgcaaaagatacttagatgtctacaccaaccatttcaattgttagcttctaagaggcatatggaaggaatctacatgaaatcaattaaattatattccaacaccattatttaagaatgttatgcatctattattttttatacatctttcaatatcaaaagtttcaccttaacgttaacacttaataaataaatatatcgatttagccatttttgacctcttattcatcttccaaagcagcagaataatcaatataattggagtgtataattcttaaattaagagaaatggatctcactttatatacaaagacaaataaacaataattgagtttgaaatatattagagaattaaaagaaaaaagaaaaaatatagagagagatggagggtgaagagaagaaatataagcacgtgggattgttggacctcaacaaaatgactcacttattccattagaaagttgaaatgggaacaaattaattgggaaaaaaaaaagataatggcaaaagagtaagagttgtagtttttttagtatattaatattattttttatgaattttaagtatttttttagataataattagtttattgaataattaatgagtaatattttaatttttatctattttaatgttttaatatatttaaatttttattataaacgttattttttaattaggggattccccgtcccgtcctcgttcctattaagggattattcgccatccccgatgaggaataagttgggatagagattaaaatccttaacgagaatggaaatgggagagcactccctgccaattctcc

SEQ ID NO: 56090 - DNA, 708 bp, Cannabis sativa
tccacgcttattttactagtaatcccgattaggggattagggtttcataagtttatttggtagcgtgcctaattatttagggcgttacactaactctaaccaccgtctggcgtcatattcaaatcttcagtgcaaacatcactgtagtgagtttaaaatcatatgatgagtaacatcgctcatactcttctaattgacgagaagtataagcaatgaccttgttggcttacatcggaacacactccaaactctatttggatgtatcattaaataccacaaactttttcctgatctgatgataaagttaacactggagttgtaattagccgctacttcaacttttgaggactgatttcacactaatcaatccacataatcgactgactttttttttttaattctattaaaagtgtggagatcttgaaaaatccttttacaaagcaacgataatacttatctgaaccaaggaagtttttgacttccataactgtctatgttcttcaccaaaccctaactcattcaatccttctcggatataccataatcccgccttattattcattaatgaattagtgttattaatgaattatatgaagcttaatagccagaataggatcaatctatatatttatataattctattgttagggatggtgatgtggcatcttctatgagttttcttttcaattctttgctctctaatttttt

SEQ ID NO: 56091 - DNA, 811 bp, Cannabis sativa
gtgctcaataacatagtgacggataatttgtacacaataataaattaaaaaaattaagaaaattagtttaatattctaatatttaatgataagcttattgtagagagtaagaattgagaccaaaaaataaaaaaaattgataatgactaacaatttatacggactagtgatgataattaaaactttactttggcttaaatttattcattaaatactattttagatattgtattttgcgaaaattatcaattgtcatctgtttgttaaatgataaaatagatcttataattttcaaaatatagtaaaaataggacctgagcttaatttttgataattttattttttaatataccaacttaaatacaatttataacacggacagatatagaaaatgtaactacttttaccataatatctatatatcaaattattattaaattgtattttgataaaaaattagttcagtgtcatatttatattattttgaaaaatacatgatttattttgttatttaataaaatagatagttcaattaataatttttgtaaactacagagtccaaaataatatttatccttcaaaaaaaatatattattttcatgataagttattctctaaaatcgaacctatttctacttagttagatttgatataaatttgaatatgatagttttgtcattttctttaattgatttttttttgtccatttataaattataagttaggcaaaagaataatgatatgataatattataatattataaataatatttagaaatttatgcgctatattgttttattcttttttttt

SEQ ID NO: 56092 - DNA, 988 bp, Cannabis sativa
tgggcaatcttctactttgtcaaatttggtgtaatttatgagaaaaattccaactaagatgaaattgggttttatttatttgagaatagtttcaagactagacttttatgtataggaaacatatttgtctctgttagaagattgtcacaaaatagttacaagactttgttacacaacattttgtttttcttaattactttaataaatttaatcatatgttagaaagtagagattcaattcattagcagcctagattgatttgtttatgtcattgagtgtttccctttgaatttgtttgattatattttccctttttttcaaagaaaaaaccttacacccttactttcatgcctaaatttggtagtgaactcaaagccagttgggctcaaagtgaggtcaagtttggaaaatgagagcaatggcactgaggattctggtaactcatcatcaaaacctcttaaggtaagggcttcattcattttggtatctaactaattacaaaaatactgaagtgttcgttcatatctcgtgttgctgctcgtcctaatgtgctcaaccaattatttattgttttttacttgtgaatatggtcttagtagttagcatagagaaatgttgtgctcattatgggcaattttcatcacattgaacatgttgaacacacttaagctgtgtttggaggttgaatttttgggttgtattttccatacttttttcttgcctacattttccttgttgttttctttccccaccaaaatccaacttccaaacataacattacttttttcatcacatggtcatgatttagtgtttttgggaattttagttagtacttcagattcaataggcttacaatattcttgtacagttcaaaattgaactccaaagcttaactttctcttgctgctttagcttttaactatgcaaagtttgaaagcatagacttcaatttgatctattttacgttcctttctgaccacagggatct

SEQ ID NO: 56093 - DNA, 1024 bp, Cannabis sativa
tcattgcctttgtgtgattcattcgaatgccactgagcttattggtagtaagccatttcggttttttaatttctggaccgatcacccagattataaaaagacagttatggatagttgggggaagcctttgagatgtagtggtttgaaggggatttatctcagaacgatacgtcttaagcacaaactgaaggccttctacaggaatgcaatatggaacattggtgaggcgtatgagaaggccaaagatgcttacattgaggctcaatatcaatgccaagctagtcctaatgacaataatcttcttagtttggagattgaggcggctaagcagtttcacacacaggaaaaaatgtatcaaagcttcttgtaccaaagaagcaaagtcaattgggttcagaaaggggatagcaatactgcttattttcatgctttcttgaaaaaaaggaaggaagaaaacaggattgtctcgtttgtgactgagcaaggggttttaaacgatcatttccctgatgttgttcatcactttcttagtcacttccaaagcataatggggaaagccaagcctactagtatggagatccaacatgattgcattgcgatggggcctaaacttaaccttgaccaacaggttcatcttctaaagcctttttctctcaaagaagtcagagctgcaatgtttagcattcctatcactaagtctcctgggcctgatggttatggttcagggttttttcggtcggtttggcctgagatggggaaagatattcatgctgctattgctcatttctttgaaaccaaccagttcccggctgagcttcatagcacaactctctctcttattcctaagactgagagcccttctaaagcaattgactatcggcctatagcttgttgcacaacattgtacaaatgtgtttctaaactgatttgtactcggcttgccaatgttctgcctactttagtgagtcagaatcagggagcgtttgttaaagggcgctccattgcgtacaatatccttattctc

SEQ ID NO: 56094 - DNA, 1505 bp, Cannabis sativa
atcagagacattatagtagcaggcaatgtgaagctcaacaaggtgtcaaataatgaaaatccagctgacatgctcaccaaagctctcccaacagcaaagttcaagcactgcttagctttgctacagatcacaatatgatttctatgctggatactcatagttattggctacattaacagtctagctagatggagaattgtaggtgttacactgttaatatagttaattgtgggtcgaggctatccaagttatgacccattatgtaatgtcattttatgactcttagttaaagttcctagtctataaataatgctagtagtcctatgttagcagtgacttgtatttattattacacaaatcaataaaagaatcatattctctctaagttgtgttcttgtatgtacgtgacttaagatggcgtttggttgaagataataaaatgaaatggaacgaaatggaatttaaacaatttttattctatttcctttgtatcattactttgtttgaaacaatttttaaaatattaaaatatgagaaaaattttaataattctttttattaattgtattatatattttcaatttaattttattctatttttattcatgttctcatcctcatttatatttttatgtttcatttctttccactaacacaaattaaacatgttgttttgccattcatatatggttcagaagattagtgtgtcacccaaccccataattattacatgggttatgatctagcaatttccactattgccacttttaacgaataaaataatatgccttttatttttctgacagaaaagaaaagatatacatttaaacaactaagaaatgcaatattatacttatctaatgctatacccataccactacaatacatagtaattatgatataattatatgctagtgctaactatatcaatataattaaactttaaataggatttgtaagagaggacagatcattggagtagccacatggtagtgtctcagtaaatttttgtatttatttttaatgaaatacttaattaatacaatttattaattaattaattaattacgaagaataatgtgtaagaaataataaatatgaagcctaattaaaaaaagataatgcacgtaatgacatacaaaattgaaactattatgcatggccagttggagatcaacctctcattctgccccaacaacacgtgcacttattataaggttctattttgaatattccaaaggctgttggaaaataaaaattaaaaaaaaatagaattgtttatttatttatctaattcatatattattattttttgtcaataaataaatatataattatttaatgtttttataaacgttatagtaaggccctgcagcttaaatcgatcagctttcttttccatgtactcagttgtcgagaatttaggaatatttttttttcttcttttaattaatgcggccttgtcaaaaaaagcaagaaaaaagaaaagccaaaaagcaagacag

SEQ ID NO: 56095 - DNA, 1156 bp, Cannabis sativa
  modified_base (705)..(707): a, c, t, g, unknown or other
  modified_base (802)..(809): a, c, t, g, unknown or other
ttgactaaaaaattatttcagatgctaaaacagataggggtgcatcaatatatcctttttaagggggtgcattgtagaattttcctttagttttttagtttcagaaaatatacaagaaattattttatatattattttttaatttttttattcaaattttttatttgtacaccgtaattaaaggctcccctgtagtaattattattatttatttaaaccaaagtccttcattcaataaatcaaagtgtccttgtaaagcgagattagcacaaaagaaattaattataatccacatgactctagttttgttagtcgaagtataattggttaaaacgtgagcaaccttatttacttctcaatatacaaaagaaatctcaattccattcccaaataataataaatgtctaatgtgatcaagtacaccatcaatgtatcaacaactctccccctttgtttggattaattaaatagttttgagacaatcagattcgatactaaactgcacgtcgctaaattccaagctgtcactacaagaaatgtcacttttaccagcacagttcacttttaccagcgcatttcgcaaactgcgctagcaaagagatcaaagttttaccagcatacatttgcagtggctaaaatctaacttttaccagcacatttacgcgctgggaaaagtcttttttgcccgcgcttttcattttatgnnngcaaaagttctaataccaacattgatttgccaacacatcatgggtaaattctattttaccagtgcaataccaacttttgccagcacaaaaatgtnnnnnnnnaagtgacatttcttgtagtgtgtaaaccagcaagaatggctagaagttctgcatgtaaaggtggaaccacttgcttaagcacagttgctgaggtgaacatcacctgcccttcattatttcgaatcacacagctcatacctacacaattttccctctgtgacactccaatctttgtattaattttgaacccagcaattggcggtgtccagattgttggattaaaaattctactgtgggcatatgtatatgtatatgttattataaagtgtgatacaaaattaagtgatcaattatattatgagtatcaaaagggtattaaatttttatgaaaataatgtatagatatc

SEQ ID NO: 56096 - DNA, 795 bp, Cannabis sativa
agaatttcccaaattaccccttagtagcttttagtgatttttagtgtttaaaggggcaaaatggtcaatttgctacgttgtattttgtctttttgtgggctaaattaaatcaggtttttaattgatttttaagctgaatcatttggataaaccaatgtaatttcattattttgcaaaaaaaatagaaaataacaagtcacattttcactctcatctttctctcttttcgaacccaccttgaactagccagggttcttgttttctcaccttcatttcagtgttttcagcagttcaaagtgtaatccaagccaaggtataagctctagtaacctcctttttgttttcttgaattgtaagaaaaaggaaattttgcatgagttgttgttttagttgctattctagctgctagtgttggttattgttatctatgtattaattatgcttagaaatgttgttttaggcttgtggtggtggctaatttagtgtttgagcaagctttgagttttagaactcaagcttggctcattaatggctagttttgttttagtgcttgtagctgtgttttgttgcttggaaaataatctttaggatgcttagaacaggtctggaaggtttcatgtggattggggttgatttgaatgagttataaattttttgactcgttcctgcactgaaccggaattccgattcagaggggcctgcaggaactggaattctggttggctcccaggaaaccccacagaaccggaattccagttggggaaccgctctaccggttggggcaattttgggaac

SEQ ID NO: 56097 - DNA, 1290 bp, Cannabis sativa
tactgtctatgtgtcatattttgttgtacttttatcttttttttatatatatataatttttacaccaaaaatacaaaatgggtattttattactaaaataccaccactcggttaaagcaacattgatactcatcatctttagtttattacatttttaccacatgcacacacaatacatgcaggtgacacgtatttgattaatgtcttatatcaatctttcattacatcatttccctccatttttctattctttttcttattattttccatttcttttcaattttttgttttaaaaatatcataacctccatagctgaactcttcccaactcgttttccatcttctttctgtttttccatttttgttcaactctcattaacagattcacataaccgttttctctctttttctttttctcttaatccatttataaatatgattattactcgttctttatccactccttcccctttgccaaagaaaagttctaaaatggggttgaaatctttagctaataggaacaacggcaaatgtcctgttgttcaggaagatgactctgattttgctcctccattgtcaaaacgtgagcgagctcctccaaagaagaaattaaaggttgctgcctatgaaaaaatttctcatgatcctcgtcaaaaaaatgatcaggatggtgctggtattcgatctcaagcttgttttcggtttctttttggcttcaccctatttttgaaatttttttgtattcgacttttgtgggttctgtgtttatcgatttcattattttaggttttcattttagcaattcttttttttttttttgttttttatttttagggcttatgttttattaatttaattagtgtgttatttttttgggtttttcattttttcgttttttagttataatttctcttacatattgttgttttttccctatttttgtttttccagatgtgttattgttttttatttcagtttcttcatttgatcagttttcattttttaattattttttcataggttttttttatagttttaacaccttgttgtatgtattttttttcgaatttattattttctagttattttttgtccatttttatatcatcaatgggtaaaaattagaattatcatggatgttgatgttgaaggagattttcctgtatgttagtttgtttacaattgttttgtagttgtattatagttttgctacttgcatatgctcattcattatttttgctttctttgtaaaatgcaggattgggttaacaaattcagtcccaataattt

SEQ ID NO: 56098 - DNA, 1352 bp, Cannabis sativa
catgagatctcattattttaaaaataaaatattaatttattcataatctttaaaatagtgagatctcatgcttagttatttttcaataaagaagtatttaattatctttatcttacattcttttatatggactattgtgtgtaacatcttggaaaacgagatgtcacaatattgtatcaaaatcttgatccaaccagaagtgtggtcaacaaggacgtcaaaccccgtaagggggtgattgtgacagttagtagtcccatgatctgtaagggtaaattctgggtaagctgtgcaatcccacattgcctagggaaggtcaagtgtgatgattctaatatatgtagttatgcgactacacagttgaagatgacttaaatagtttgattggtaacacctatatcaacaaggtgcatcttattttctggagtaatcttgagaactcgaaagttaagcgtgtttgactggagtaatcttgggacggttaccttctcagaagttttctcagggaacgtgcgagtaaggacaaagtacggtagaaacagtcgtgttggtttgtaggatcagtcgtcactccataaaacagctaaaagtaacatacccgtgcataagagccataagtctatgcatcttcttttagtagcccatcatgaaaaaactccaaagataagcacgcttaatctagggtaattttaggatgggtgaccacctgagaattttttccaagaagcggacgagtgaggataaagcacactagaaagactcatgtttctacaggttcagtcatcattatgaagcagccaagagtgatgtacctgtgtataagagtcattaatctgtggggaaggctcaacggaggcttgaagaaggaatgttacattccatcctgagacagatggccagctcaagaggaaaattcagatattggaggatatgttacaagcctgtgtgatagattttgaaggttcgtggggtaagtacttgcctttgatagagttttcctacaacaatagttatgggagtattataggaatggctccccatgagatgttgtatggtagaaagtttcactctccaatttatgagatgaaatcggggaaagaaagtacttgggtccaaactcaattcagcgaaccagtgaggctatagagaagatcaaggattaaatgcttgattctcaaagcagacagaaaatttatgcagatccaaagcccagagatatagaattttaagtaagggaccatgtcttcctatgagtttcaccaatgaaaggggtgaaacgctttggaaagaagggaaagttgagccctaggttacaagacctttagagattctcaagaaagttggacttgtag

SEQ ID NO: 56099 - DNA, 980 bp, Cannabis sativa
tgtgttacctgcaccattaccaagatcagagttgggaatgttggtttgttgtccagcaagcaggttgaggagctgttggtactgtgcagcagaaagttgaggcagcagtgcatgtttttcactttggtcatcatctacatccttgttggtttggacttgatttgcagtagcatcttttgatttattcttgttgtaaccaggagggtaaccgtggattttatagcacctctcaatagtgtggccaagaacattacaatgagtgcaaaaaggcctattctttttgggaggatgagacttattttcttgagaatctggtttattcgggttagatttttctccttgaaaagcaaaagcaatcccaggattgggatccgaaggagtgtttgagctattcttttggttttcttcttgagtgacaaggtggaaaaccctattgatttcgggtaagggatccatgattaatatactcccacgaacttgggaaaaagaatctgaaagacccataagaaatgacattatatgttccatgtggtggtgttcttgaagtttcttgacaccaccacaagtgcagccattacaaacacaagctggcctataattggacaattgttcccatattgttttttcgtatagtacatactgactgtttgattctcttgttttaaattcattagacttctcctaaggttgtatatgtgaggaccatttcgttgatgaaaacgaaccttaagatcagaccaaatggcagcagcggactcatcgtacaatatactagatgaaatttctttagacacagaattcaaaatccaggaaataactatgttgttgttcctaaaccatgcattgtacataatatgatcagaagaaaggggtttaggaatggtaccatccaagaatccaagcttgttcttgacggagatggccaagatcattgctctgctccaagacatataattgtcttgtccagtaaggagttgaga

SEQ ID NO: 56100 - DNA, 1166 bp, Cannabis sativa
tatgtagtacgagttaggttgtaaaaataaatgtacatctctaaaaattgaaaagttccaacctcccaaactcacaattctctttctaattttggtaatttatttgttttaatttctcaccattaatatgtttgaaccatactaatttaatagtacggatagttttaagttcaacatcacctaaccatacatataaatatatagagccctatatatctatatatctccaccaaataaaatttaatatattatattatttgaaatagtttattttaacaatgaatatttttcatgaaaaataaatcataatatcatacaataagtaataataaatcccaataaaagaaaaaatttcatcaaaccataaaaattctctttctacttgaagagcatgctgagttaattcatgtacaatcatattgatcgtacggcgtacatgtatgttaaagttccttaacatgaatagagaggaaaggaagaagaagagggagaaagaaaaggaaagaacaaaaagagataacaaagataatgaaagagacattacattgaatgaattgagtacagccattatatacaagattaacagatgcaatctctaacagaattaaaaacgaactacagttagctaaacttgactttacactaactgtaacagctaactaattctaacaacaagttaactagcttctaactgattacttcttttaacaatgtattagggatacttcaggaaaattgggcatcaaacttgctaaatcttcaaacaaaaaatcaagttcattgatgaaggaagagcgtttagaaacgcatttacgattgctaaacaataagactcaacaaaatataacggaagaccaaccgtaaaagtccaatctaaagctacaagcgaagctatattctgattaaataactgagaaacaatctacaaaaaaccataaaaaataacattaaatccccatggaagaactcaaaatataaaaaaatataaccaaaacaacctacaatgacaaactaacaagaaaaatacatttgttaatgataaaaaaacctataacaaaacaaaattaaatccccatagaagatctaactcaaaaaaaaaaaaaaaaaaaaaaatattgcaaaaaaaaaataaaattttcaaaattgattaataaaaaaaaaaaaaa

SEQ ID NO: 56101 - DNA, 1071 bp, Cannabis sativa
cgaggaagtgttgcaactactgccgtccgatccttttgaacagctcgacgttgcccgaaaaatcacatccattgctctctcgacacgtgtctcatctctcgaatctgagtcctctgatttacgcgccaaactcgccgataaggatgacgtcatcgccgaccttcagtcccagattcaatctctcgacgcttctctttcccaaaccaccgacaaactcgccgtagccgaacacgaaaaggtccgacccgacccgactcaactcgaattttgctatatatattttttcaataaataattggaattttgttattgtaggagaatttagtgaaagagaatgcgattttgagcaacctagttaagaagctcaacaaagatgtatcgaaggtgaaatgttttatagagaattttgtagtgttatatatatatttatatatatttgtttatttaatttttgtgttaatatgattgattatgatagttggaggtgtttagaaagacgcttatgcgatcactccaagaagatgatgatagttctgtaagtttctatttatttattttacgaattggattgatttttgggtatgataatttaggttctgtaattcaattcacagggtggagctcctgatattgtggctaagataaaaaacaatcccagtttatcttcttcctcacaaattggaggttatttatgctactttcttcattgggcttcctctgttctttttttttttaattaataataataataaaaaaaaaaaagaaaatgaattgcataatcttgttaatttgcttctaatgcatacactttcatagttaagtttgcttctattttttgttttgttgcatattaaaatattgaaacgacaatagaagggtctttttactattttgatagaatgactattttattttgaaatggaagaaaagaccattagaattttttttatgcattttaaattttattttattctgatttttatttctattcttatattttcatttctcccaatcaaatgtgacgtaaatgatggtaaattgtagatgtgaaagaaaggatagaaacctttt

SEQ ID NO: 56102 - DNA, 750 bp, Cannabis sativa
aatggtgcattttatttgttttatatgatatagttgataaaggtccaaattgaaagaaaaagagatatatttccttttttttttctgctgttatatacaattatagttatttacttcatctcgagctagtgaaatcgggttgtgtctatttttttttcttttctcattaaaataataaaatgccatgtatatagataattgaactggaaagaaatgttgaaaagtagatagaaataaataactacaccaattagcttatggatcttgtcgtaccataattcaacacgtttttgttttcctatacttttccacatatttctttccaagcatagggttgatagataatatgaatgcaattacgatgaaaaataagcaaaaaaataaaagaaacaatgagcaagttcattggcagctcattatcttgcataatgctctgtttttcccattttctatatttctctgctttattgttcttaactttcctctccattgtaagaaactgttagaagaagtataccttatttgtgcgaagtactaattctagaaaagctagaagctcattaaaaaaaggagagaatgaaaagatataagttggaaatcagcaaactgatacactgaacatgttacatacaaataggatgaatgatttcaatttctcttaggctggggttccccttcttcttcatcatctccattgtcagagaaaatggaagttccagtgggttcgtaagcttggcggggtctcttact

SEQ ID NO: 56103 - DNA, 667 bp, Cannabis sativa
gaatagagaattagttctcataagtgtgacaccaaatgtatagccaaacatcacaatcatccatctttgactttacatttgagtaatgaaagctatgttgaaatagagagttattctggtcttgcaaaactcaactattgagtatgtttagcaagttttagacaaagtctaaactttgctagaagaacatactttgttagcatgtttgttaggttctcttcggtcccaatatttttttactttaacttctattttggctattacatctctgatgaaatgtagcttaatgtctatatattttgaccttgaaacataggattcttcatcgagtgtagtacactttggttgtcacaatgcactgcaatgtcttcagaattgaactctaatttagttgtgaaccctcttaaaatcacctttttgatttcttctgttgttgccatatactcagttgctattgaggatagagaaaccatcttttgaagattggatttctaactcacacatccacccataacagtgaatgcatagcctgtaatggacctcctagtgtcaatgctttcagcataatctaattaatcaacaaacctataatgacttcaataacttcattattattgttgcataatacacaaattccaagtccattgtacctttgaggtaccttatg

SEQ ID NO: 56104 - DNA, 881 bp, Cannabis sativa
tgctggtggagtctggctaaccatctggactgctggaggagtttggccgaccatggggactccttctagtggttggcccgccagaagatggacagagggagttgttgttgagcctgagatccctggtcgcccccatgctgctggttatcaggattttgctgttcatcctccttctgtcaaagaaagatcagtcctagtccctaaggaactgggttgatcaacatgttgatagaccctccttggtcaatcaacaagcctttcttgaagttggcctctgatgagatcctagcctcttctatcggttctctagttgaactaccttatcagatcactggcctctctattgtggaaatctaattttgcttggtgagaccgatggatgtactcttagtcatcaatccatctcaagagtttgcatctctcctgagcgagcacatcgcaatcaacagcacatggttcttcaagagattcgcgtctctactgagcgaatacatcacagtcagcaacacgtggttcttcaattaggtcgacttggtagacagtctctctaagtctagctaacttgagatcttctcccaagtccaggcggggctcgccaatagtaggcttgccaactcctggtctcgtctaacctgcatagtaccggggatgaaatccagtcattgttcttgggggtgcccctaaggattcttcgtttagttggaggcaccagtggaaggtccttccacggaggcaagggcctgccacttggatccaccaggatgcttgtatcagtttggccactattgagtcctgccaggtggccgtccatagaccaacagaggaggtttagctgtccaaggtgtgcaagatctggcagttcaaggtgcacaggatctggc

SEQ ID NO: 56105 - DNA, 952 bp, Cannabis sativa
tccgtataacaacccatataaaaaccaacgaagaaactattaaagcaacccaaaccataaatttttaaaaaaagttaaaaaataatatattaaataattcttctataaaaaaaactacatatgtacgtagatgtatataaattttctaatggaatcttaaatatattgttttctctacaattccaacttttttaatagtaaaacaggttaaaataagtcaacacgaacacgacatgatttttacggaacaagttagaattgagcaaattaaacgtggatcgaaaatagattaacatgcctcacacgaaatatagaatgaaatcaaataaaatagagttttttgcagtaaaaccttttcaactattgtttcattaatatttaaccctccaaattcaaattttagcggtaaaactctctaaactactgaattagtagcaaatttaaggtgttatttggttaacagttactatgggctacttatgtgtacactcttatacacatcacacgtttatattagtacacccaatattattatttaaaaattacgtttaaaattaaataaataaaaacaaaatattttttaaaaaataaaaaatgttataatttttgaaataatttttatacttttaaaataatattagatgtgtactaatataaattcgacacatgtacataagtgtacacataatccgtctatattgacgattaactgtaaaaaatagatgacactttttagaggattttatcgtcaaaatttgagcttaaaaccttaaatataagtgaaagaataattaagagaatttaacagcaaaaaattcaataaaatatgagaagaagtccttatatttgggtgatacaaggcaaaataataataataataaggctaattagtaatttttccctatgaactttgacatgtactaaatcgtgcctctgaacttttttggccgtt

SEQ ID NO: 56106 - DNA, 1365 bp, Cannabis sativa
aagccaagtgagattgcaaatggagggtgatatttccccaacaaatgaattgtttgagattgaaataaaccatgtagaaggtggtaggactggaagatgaccttgaagtcggttgaaggcgagattaatgaaatgtagattcttccatgggatctgatctatttgtgtcaaagagttgtgagaaatatctagcaaaaacagtgaatccttaccaacattccacaaccattggggaacactgccttcaatttgatttttggagagatccaagtattctaaattttgcaagcttcttaggaagtaggggaactcacttataccacatgaagacaaatacagtctaaaaagagtattgggaaaagtatcatttttataattattagatacacaagaaaaactattattagaaagattaagaacatagagctttttcaattttgaaaattggtctaattgcacgacaccgctcatattatttgaggaaagaattaaagaagaaagattgacttgctgaaaaattgatgttggaaagaagccttgtaagttattataacctaaaaaaagagataccaaggaattgtgttggaattcctgaatgctaccattgaatttattgtaacctaaatttaaatcttgtaaagatggaatggaatatatccaagaaggtattgtcccatcaagctcgtttttatataaatttaggaaagttaaatgcaatggaggagaacctactaacttactacaaatgtctggaatttgacctatgaaattattgtatgaaagatctaaatgggttaggtgctgtttatttaaaatggatgaccatgggaagaaaccacctaaactattaccagataggtctaaggaggtgatttgtgtgcaattgtcaagaaatgtgggtgatagtacttgtaccaaattagatccacgatgagatataacttgtaaatacttgaactttctacaaaggtaaggatccatcatgactccagtgtaagaaagactcaacactttaagtgggctgctgcaatcatgttgtggaaaagaagcagtaagattagtattgtgactcaaatcgagtcgttgaaggtttggcaaactgagaacattttctggaagtttcccctgcaaattattccaactaagatcaagagatgtcaaagaagttgagagattcataagggaatcaggtgaagtagaagacatatcaacacctctaagaaacaattctctgagatttgttagatttgcaacagttcttttccagctagatgtctctactttcaaatcattaaaactcaagtcaagtgtaagcaagttggacaagtaagacaattggagagggacttggccactgaaaccaga

SEQ ID NO: 56107 - DNA, 732 bp, Cannabis sativa
tgaaagatcttatcaatacaagcagtgaagaaaactaagcttgcaaaagatacaaggcttagaggctgatattgtatttatactgatcaagactttacaacagacaaaagaaaacagaaataacagagtaacaacttggacaaaaccgttacaagaactaactaactgaatgtacactattgactttatcatcccccctcaaacgaaaaggtgtggaacacacattaagtttgttcttgagataggtgaatctgtctttgcttaaaggttttgtaagaatgtcaacagtttggtctagagaaggcacatatcggacttcgatttctttggcaatgatctaatctcgaacaaagttgagatcgatttcaaatgtgcttagaccgagcgtgaaaaatagggttggctgcaagagaagcggccccctgattgtcgacccatatgatcggtggagtgggatgtgacatgttgagttcagagagcaaagaagttagccaacgaatctcagtagctgtattagctaatgatctgaactcactttcagtgctgctcctggccaccacagcttgcttcttggcagaccaagagatgagattgcctcctaaaaatactgcatagccccctgtggactttctgtcatcagggcaactcgcccaatccacgtcagagtacgcttataaactcatgtgcagactcggtcgaagatgtagcccttcatgaattgtacccttcaag

SEQ ID NO: 56108 - DNA, 2472 bp, Cannabis sativa
  modified_base (915)..(927): a, c, t, g, unknown or other
  modified_base (1004)..(1007): a, c, t, g, unknown or other
  modified_base (2252)..(2261): a, c, t, g, unknown or other
  modified_base (2387)..(2387): a, c, t, g, unknown or other
ttgtagctatttaagataatttgttataaatttttaaaaattctgaataatttatagtatcgaaaataaggtttaaatagttacttatcacgtatatacgaaaaatagtagtgtgtgaaaaaaaaatatataaattttatttttaacattgtaaagtactcggaaattttttaaaaaagtcgttttaaatagctacaacgtatgcgatcataaaaataatttagaataaaaagtcctcctcctggatatagaaacagagatagattatctactgaaaaactcctttacgggaggtgcactgtagacttaccatatattatttataacaattaagataattataatagggtgattctgcaattcaccccttaaaaaaatgtgcactgatgcacttcttatctgtttcggcaatcaacaataaatttagtccaattttttatattcgtgtatatatgttatagttatttaagatatcctgcaaaaatttgagaaatttagaataatttatactataaaaaataatgtttaaacaatctatttcacatacgcataaaataaaagagtcacgactgcaacaaactgtttaaaccttattttcagcgtactaaatttttttgaattttttaaaattttgcaaggtgtcttaaataactacaaacacgaccataagaaaaaataaactattttttttatatgtcaaatgtctcgtagaatttccattataataaaacgtctacaatcaaacaacaaaattgcttgaacaataataattatcacgatttgaaagataaggaactatatagaaatgtatatatgagttgagattttaatagttacatcaaatatataactattatggttatatttatttgtagttattaaatcactattaaatggttgtgattaatttaaaannnnnnnnnnnnnaaataataaataacttgtaatctaatatttattttcttataaaaacttaattaaattaattatatttaaaattaaannnntaataattattaattaattttatacaatttattacaaagtaaacatcttttagaaattaattttttttgaacttaaataattgaaatatttgcagcaaaactccttataatttacaattattacacacataactttaattaataaaaaatagtaagaataatgacctctaattatatttaattttacactcaatcttattttcaatgtctttaagtgccaaatagtgtgtcgattccaaattgattcaagttattagttttttttttcaaaaaaaaaaaaagaaaattaaattaaaatagtttaaaatataataataattacaaaattaaagactagttaactattcttgctcctagttaaaatcatcttcttcaatttagagattgtaaaaaaattaccaaagtaaattatcaattaattgagattgttgcttctttttcacaaataaacataacagtataaaactaacaagcaaatcactaaaaactaaagagaaatctaactgtaggtggtggattggagtaatgagcttatggcagagatgtaggaaattgtatcgaagtgaaaaatttacatgatgttagataaggatagactgaaatcttaagttttgaaattggagaatttttttttataagagaggaagataggtcaagcagttattggaaaaaataattagatgtcatttttaaaaaaattaattattcaaaaacatatttcggaaagggtggaactctaattttgtaaaataatagaattttatcataaaatatcatagttaaatggtttaactgttaaaaatattataacaaggacttaattataaaaataattttttttacaaatatttattgtgaaaagggttttgttaaacatttaaattaaaaattaattattttaagaaagtaattaattaaaatctaaataagagatttttagttattgttaacctgcagctattacaggtaaaaagaaaatgtaaccatcatgattataataaaaatataaccattaagtagttatttatatatatagttaataagttaactatcatttatcttcttcttctttttgaaatggtcatttatcttctttaatattagtagtattaccttaaaattaagaaaactcttatactcaacaatttttaaatgtcggagatactataccttatgattctcgtgttacataaaacctaaaaaatctcaatttttattttattaaatctctctctctctctctcnnnnnnnnnntctctctctctctctctcatctactaccaccccatctcatccctcttgtctcatctctctctccctctagtcgaatacgacctaccatctcgtctccctttggtcttctctctctctctctctctntctctctctctctctctcatcagtatttggcttgatcagaaattttgtttcttttaactcgcctttcttcggtggtttgcaggaa

SEQ ID NO: 56109 - DNA, 891 bp, Cannabis sativa
cattctttgctgcctgaaaagtggctgggtgttggtcaaaccaaacatcataacaaggaactcgtaacgcccgtcatgtgtacgaaaagccgtctttagaaatcttctagttgaacatgattttgtttgtataccgattttaagtcaagcttagaaaaaattgtgacaccattggggttcatccaaaaagttcatcaatcattggaatgggaaatttcttaggtatggtttcacgattcaggacccggtagtccacacaaaatctccaacttccttcttttttatgaactaacataactgggctagagaacagacttacactggattgaatgaccccaatatgttgcatttctgtcactaattgttcaatagcatctttttatgtttgggggtaccgatagggacgaacgctgatgggtgacatgcctttttaatagagtgctctcggtcgcgtacaagtggtaattccattggcatctcatatgcatggctcgcctcctctagtagtacttattcaatttcaagtggaatgggaaatatcttaggtattgtttcacgattcaggacttggtagtccacacaaaatctccaacttcttttttatgaactaacataactgggctagagaatagacttacactagattgaatgaacccaacatgttgcatttctttcactaattgttcgacaacatttttttatggttgggggtaccgatagggacgaacgctgatgggtgacgtgcctttgtaatagagtgctctcggttgcgtacaggtggtaattccattggcatctcaagtgcatggctcgcctcctctagtagtacttattcaatttcaagtggaatctcttggtctccttcagttatagatacttgccctaactcaa

SEQ ID NO: 56110 - DNA, 1061 bp, Cannabis sativa
agagaaataccagagggcctctttcttttctgaggaagaataggacttggagagacaatggtccttttcttttctccttctttggaattgcagcagggacagcaacaggttctgcactgacaggttcagcttcaggctcttcactttcacactcaaaatcaacagcagagggtggttctttgggcacaaactcttcacttgaatcggataaaccctctgaatcatgatcctcctcagttccttctttagattcagaatccgaagatgagacaaaaggggatttcctttgagacttttggcctttgaggatgaaggcaccacctttttccctttggacacatttttggccagaaccacttctggtttttgaggggtggataccttggaccttgtttgagaacttaccgtgggaaaagtcaccatagctttctcgacatttaaagcaccattcgaagaagaagactttgacaatgtgtgatcggatgaatgagattcatcatgatcaccaaacccaggtgttggagtagcaatcggggaagcaatgactggaggagaagcgacgttgtaggtcgattttcgagcttgggtcttcgaatttctggcaaattttgtcggagcagatgacaaaccaggaactccggtcactggtgaaggcggtgcggtggggtgatcggagaagcaaaagcagagccacgagagcgcttcttgttgctttttttttttctttgaaaccctagaaaaacaactacactctcacacttgaaaaagattagacttttgagagaaaatgagaaaggaatgaatagtggtgatcgtgggtaagtgggaagttgaacatatatagcaattcaattttaattactcaataatcagaaaaataaaaataaaaaaggaaagtaacttccttaccttagacaccatgtgggagagaaaagagaaccaaaaatatttttcaaaaaattagtcaaggttacctaaaacgaaaaaaggaaacaacatatccccataaaatctaagaattaaagacccaaccaaatccgaaattgccaccaaaaaggaaa

SEQ ID NO: 56111 - DNA, 1569 bp, Cannabis sativa
aataatttcataattaatcacaatcaactgataatttccaaattaactaagcgggctttacatgtaagaaaggaacagactgcaaaggatgccgccacgacatcgaatcctcatgcaagtggtaatatcagtaaagggaccaatggtggtaaccctgatcacaaacggaaggctgatgcttccaaaacatcagggggtaacataaagtttcggggaaatagaggtggcctttacgcgaatcttcattccgatcataccttgagtgtctgaaatgcaagaaacaccacagggtgaatgttgggccaagacttgtttctagtgtggcatggtgggccactttattagagattgtcttcaggccaagaaagaagagccaaagaagaatgcaaatcagaacccgggatgactatttaccatgactcaggctaacacggatgctagtccgttagtggtgacaggtcaattatctatcggtggtttttcttagactgtgttgtttgattcacgagcttctcattcctacgtgtcgagtagagtaattgaaagttttcgtaaaccatgtgatgtgtatgcttcggggtgtagtaccctattaccttcgggagaccttatagtatccattaggtggattcggtccttgtccttttggattaacagttgtgaattaaccgccaatctaattgaattacaactgtttgattttgatataatcctgggaatgcattttctgtctgagtatggggcaacgatctgcaagtgaagatggtggtatttgagcccgatagttctaatccagtagtgtttatgggtaaggttcagggggcgcataccaaggataacacttttaaaagctaaagatctaatgtgcagaggttgtctgagattcctagtcactgcggtggataccagtcaacctgtgacatttggatctgagaatacaagattggtgtgtgagttccttgacatctttcttgaagatgtaccaggattgccaccttcccgagagattgaatttgtgattgagttagtttagggagtggaaccagtatcaaaagcactgtatcaaatggctttagcagaattgaaagaattaaagatccaactccagaagttactgaatttggggttcattagaccgagttactctccttggagtgctccggtactgtttgtaaagaagaaagatgtgtcactgctgatgtgtattgattaaagagagttgaacaagcataccatcaaaaacaagtatcctctaccttgaattgatgatctatttgatcaactgaaggggaagacagtctattctaagatcgttcttcgctcaggctaccatcaactgagaattcgagaggaagatatcatgaaaactgcgtcccatactcggtatgggcattatgaatttctggtgatgtcttttggactcactagtgctctagcgacattgatggaccttatgaattgggtattcaaggattacctggacagatttgtgatcgtgtttattgatgacattttgtttattctgaatcagaagaggaacatgagctacatctcagatcagtactacaa

SEQ ID NO: 56112 - DNA, 849 bp, Cannabis sativa
aacaatctcaatagtttaaaggaagtttttaatggcctggaatgttgagagggtatgatttggtacacatgaaagtttagaggcaaaaattataagtagcctattattatttgtgtgctaattaaaaaatcataaaaaatagttatatattttggtgataagatagaaaattcatattaagtatgaagcattaattttatgtttcatttttttttacttattttgttatagagcattcttattggacaccgatggtgcctaataccatttaaagatgttgtctgatgattgattagtgatacactcaaaaagtaattaaatcaaattatatatgatacctggtatttaattgcaccaataataatatgacacttaagaaagtactagacactaatagtatttttagcgcccatttctctttattatataaataacgatgtagattataaaaaaataattaattaaattatatgcaattatttatgaaactataggcttttatattaaaatatatattatattaacacaaaattattactaatatatttatgttttttataaataaataataattaataaaagattataataaaaaaaatattatttttaattttaaaaagcaacatatttaaaaagaaaaaaaaaacatactacactatttgtctataaaattaaaaaaaattaatatataaataaattttgattagtatacataatttttttggggatttttacacttggtgcccttttttgccatttttttttacttttttgtcaatactcagttatttaaacttttatacaagttttatttttcaattttatattttcaaaagtttcataattaca

SEQ ID NO: 56113 - DNA, 751 bp, Cannabis sativa
tctgtcacaaaactagacatttggttcttgagtgcttctataggtttgataagagcaccaaatcaatgcaaggtcatgctgttcaaacatctcaaggtgttgacataaaatgataccctgattcaagtgctaccaatcattgtacctttgatgcgaacaacctggtgcaaagcaataattacaatggtaaagagaggttgtatgttagaaatggatcacgtttggaaattcaatacactggttatgctttctttaagtctcaaaacatagataaacctttaaatcttaaaaacttgttccacataccaaaaatcaccaagaatctgttaagtgtttctaagtttgcccttaataatgatattttcattgaatttcaccctcttgtttgctatgttaaggatttgaggaccaaagctataatcttgactgggaacctccacaatggcctatatacattttatcctggtcaattttaggtgctctctcagtctccttcatcttgtgcagctcccagcctcactaatcaataacatgcttgccttgtaaccacttgtgctagtagtctttgtaaagaccgcttaactttaatttggaaattagcagataataagggtttaattatgaaacttgcctattagttttaattattagtttacagagatttatttgaattcagaatacattttatatgtcatatatggaatttcataattttgcaagttttgtggccgacaacattggaacgcggtgt

SEQ ID NO: 56114 - DNA, 913 bp, Cannabis sativa
aaaaaaaaagccaatgcatgaattatcagaaaatcagcgtgacttttccaccttatctttagggtttgaattttattaatgttgcagctggccttgtactgtatttgtttgtccctaatatcaaagtaatttatttaattaatacacttttttccctagtagccctatacaagaaaaatctaaaataagttgttcaataaaaaaaaaaaatcctaaaggatgctgttgattatttttcacatttgaacaacaaccatatatatatatatataatataaaaagcacacttttagtcacaataaaatttatgactaaaagtaaaaaaattgtgactaactataaattattattcttatgttatgaccaaaaggtttgtgactaaatgtatttttagtcacgacacttgttgtggctaaaactaaattagttacaacttgtatctaaatactatattttagtcacaacaaaattgtgactaaaaattacattttgtcacaaaaaaattatattgtaatcaggggcggagccaggttcaaataacaaggggggccaactatttaatttttagattaaaactaaactttcaaaatgcacatgcataacatcaatatcttgtatgttacaaaaattatctgcataaaaggaaaaaatatttgtaatcaaatttttagtaattttatttttttttatgtaaaaaattgattttttgttatgcacatgacgtttttattatagattataacctaaaaatatcgtcctatattataatagttaaaaaagttaaaagtgtaaaaataaaagttgctaactctagattacatttgaataactatatattaggctagttttaaaagttcaaaaataccaatactaaaatgagttatcaaaattatagaaatatgtaaaaaaaaaa

SEQ ID NO: 56115 - DNA, 758 bp, Cannabis sativa
  modified_base (401)..(411): a, c, t, g, unknown or other
atgaaacttaacccaaagaagtgcactttcggggtcaagtcaggaaagtttctaggcttcattgtcagtcagcgggggatatacgcgaatccagagaaaatccaagatctcctaagcatgccttcccccaagaaacacaaagatgtgcagagcctgaccgaaaaagttgctgccctgagccgttttatctcccgatccacagataaatgcattcccttcttcaatatcttgaagaaatttcagaaatttaaattgtctgacgagtacgaggaggcattcaaaaaactaaaggagcacatggccaagcttccaatcctatcaaagcccgttctcggagaggacttgttcctatacttagctatatctgagaatgcggttagtgcggccttagtacgggaagnnnnnnnnnnncagcatcccgtgtactatgtcagcaagcgcatgatagaggcaaaaatgcggtacccggtgatcgagaaactagttttttgcctcctaatggcctcgagaaagctgagaccttatttacaagctcacccaattaaagtattaaccaaccacccgctctggcaagtcttacaaaaactagaggcgtctggacgacttcccaaatgggccatggagctaagccaatttaatctacactacatccctcgcacttccataaaaggacaggcgctagcagacttcatcacggagtgccatgaagcagaggctactgctagcatacctacaccacaagtcccggcgtggaaagt

SEQ ID NO: 56116 - DNA, 766 bp, Cannabis sativa
aacgtcttaaagagagcgacttagtccgcgactcaacccagaattcttcattcggtaatatcgttcctcttttattttgctagcagtttactcaacagatcattatagctagctgaatttgtcttcaatgttttgtaacttttgccttctcaatcggtacctggagaaccaaaaatgtttatatgtggtgcaattttatttttatgacacatacaaaatttattataatataatataatatatgccagtgtatacatataatattgtagtcatatatatatagcagatatcatactaggttttaaattttttgaataatttatcataaatagaatttacatgtatagttaattgtttgcatagtacgttcaactgattaattatttgaaccctagctagcaattttctgcccagtaaataattcagaatttactaacaacgaatgaaatgcttggtataaattatataagttatatttccttttttagatgtaaggttataatttttttagcgtcataacagaaaattgcctcacgtagtcacgtgtgaacatttttggaaaacaagcaataatgtatgttggctgtcttaaattggattgattggggccaagtgttacaaatttgaaagctatatagcatatatgcttaattggatcagtagatagtaaagtgaaaaatgaaacgtgagattgtagtcatatatatggctattgctactgagatttaccaatatgtggaagactcgaaatgtaacaccctaacta

SEQ ID NO: 56117 - DNA, 1267 bp, Cannabis sativa
ttctatttttggcatctttagattaacagaaatattttataatttgttttttaatttcaactgagttgtattatttattttcatatatttgtatttgattgattgatttatataagatatgaaaagtgactagattttctttatttggaaagtttgttataaagggtaagttttatgaataaatcaattctatctttctgttgatctgatcctttatgagttttttaattggttttatcatatttcttgtgaagaaaactaaagtaaaactttctttttctataaaaggaaagtcgcacttaatgtttatgattttgtaagtatagaagcaaaaattcttaagttgattgaagatcttttttaggaaagtttcttatgagttgtggtcttgttcaaattccatatatgagctgtctataaggtgtatattgactataaatacacgttatagcagctaggtttagtatctctttcatctctttgaatttcattcttattttgtgagaaaaaagtatttttgttgtgtaaaggagagtgtgttcgtccctttctccgtgtttatatgtattttgtattttcttgagtttgtaatcaagttcaaaagaagaagaacaacaatgctacctttggaaaaatattctacaagctttcgggagatagctttcaagtcttgccttaagagaaagcaagcactattcaaggaaatcaaatagagtttgagcacttaaagtttcaggaagattcggttagaaggtagaatacatcaagcttgtagcctacaatgagaagatgtctatttatgcataaatcatttattttatatttttgagatctatctaatgaatcttatctctgagcttgaccctatggagtagtaaatattgtacaaggattgtttataccacgtataaaaactttgtgtgtttctattttctgcattgttttattttctggtttattctgcagttacgaagtcgtattctgtagctacaaaataactgtttcagtatcatatttattattcaatatttaattaattaattaaattaataatattaaaatacagaattttagataagttaactaaatttaaacataattttttatataaacagattggatcaaatttagattttaatttctcacacgattaataaatgaattaaatttgagtttagtatttaattgtaatacctaaacttcaatacaatcactacacaaattgtcactcctaatgtttatggatagtgtggggggtagagtagga

SEQ ID NO: 56118 - DNA, 2017 bp, Cannabis sativa
  modified_base (413)..(430): a, c, t, g, unknown or other
ttttacagaacttagttttgattttatttgaattagttattaatttttgaaaattggaaaaatcttagcggtggtgacaccccatacgcgcgcagattcccctattttaggggttcacgcgcattcggacacagccatgtcttagtttcctcggacaagatgggctgatcttgtctgaaggggcccctgcgcgcgcggacaggctacaagcagcctccagcgctgagtttcctcgactgtgcaacccctagcacgcgcacggatggtatgcagtgcataccatctgttaatgcagattttcgttatccaaatttgagcctcacaatattgatttcacactaaaaattaaagataacaaaatatagaatatgaacacagggtttttacgttgttttgcagttaaaattctgcannnnnnnnnnnnnnnnnntattcagatttctgagtattttttcagggcctctttcatatgagttttttcgtccctattttgaggttgtttgcaactatttataattacatagtaggcattaattagaaagttgaccagaatatgtttacagcaattatccttaaaatcatgatatttgattagatatcaggaaatgtaaatgcagtttatgatttgaaaatcatatagttgtgattttcccgcttttactggggaaaaattgtcgtgtattaaacacgtctttaattgttgaatctggagatttctcgacaaaaacttgattatagcgatcccaatagcgagctggggccattcatccttctgaggtcgacgatgtatgttttgtgtcgatctcagttatttataaagaaatcttctgacttgccagggttgtgagcctcgctcctgttagttggacgaagctataggaagtcttcccatagcgagctggtcatctcgcatacttgttctttgtgccaatccgacttttacacttagtttgcttattgcaagctaaggacttttaaagttggtatgtgtcactttctccggtgcctcactattcgcatttagcgatgtatggtttctcgccaatacactaagtgtcagtttgtacattgattcctcccctaaaactttatagtcagcgaattacaaatatactctgactcttatgtaattattgagttattccataaaaagctattgcaccgattcacattccctttatcttgacacgtgtcctctagctgaattttgggtataacagatgcccctagaaaagttcctttttagtaaaaaaaaaaagtaataattacacagagggcattttcatcaagatcttttcttggaaaaaatgcatcctttaattctagccgttgtatggtttcaaggatcattatgaatcgtctctacatattttgcacaactttcgaccattagatttctcaatctttggctttcttgtcacggaacttcgtgtataaaagggcagctcaagcttgtcattatttacaaactttctggctcttaagtgagatccattttcagaatggatcatctctatcctatcaaaatgtctcttaagagttcagaagttcatccttccaaactcataatacccagatgcactaatcattctccatttgttcctacaaacttcaagcctcaactggagctggaaacgatggattccaaggctgaggagctttcgactaatccaaaccagggaaaccctatagcctgccatggcctatgctcaaaagtgatccctaagggtatagattttgtgagcgaccttaaaggccctcctcggggtgatgaagaattctagaggatgattggcatggtttcaggtgtatctaggaaggaagttggcgtggtttctatcagagaatccagccaacccaaggctcaaacctgccccagaagactttagtgccaacctctttcgggtatcgaggaatttcttgaggctgggaaaaagatctcagctttagaaaaatgggatcttctgatgatgaacggaatgaggtctgtgcagagatcaggggtctctaccggtag

SEQ ID NO: 56119 - DNA, 1580 bp, Cannabis sativa
tatcgttctgggacatctcgttggtaatatagcaacaacacccctagtagcgagctagagcttttcccacatctttctaaggttaataatgtaagtcttgttgcttctatgcttgaagacatggtgctccatctgacaaccacagttcttggcgacaaggtgaacttcaacagccaacatcacttgaatgatagcttctatcgagagaactgactcgacgacgctgtgagtttcattgaaagatgtctggagttgaatagtgaaggcaccatgagcgtgccttcatatagcgagatggatgccttgctaatagtagtatgagcttacctggctattacacttagtttgtatactgcgtattatacgctaagtgccttatcagtcattatatctctcctacgcctcttgatgtgtgacgaggttgatgcctcaccttacgcatccaatgttgtatggtttctcattaacgcacgagacaacagtttgtatatctttatctcgcataagaccttatagtcagcaagttgtaaataaactctatcactttcacatttaatgagttattccattttcaaatataattatcattatatttgttgattcgtattcttcctaatttcacacgtgtctccctctgaagtgctagcaaaattttgggtataacaattaccccttaaaagttcttttttaataaaaaagtgctttttaatgattacaaagggtatttttgtcataatttcttttgaaaaaatggacgtccttgattttggcgattttattgtttcgatacacatcaataccattaatgggctatcttttccacttcctttctattctcatccattagatcttccatattatgatttgatggttgaaaagtacaaggtataaaacggttaaaatcaaattttctaccattttcatctcctccaaaaacttgagctttctgaaacctacattcgaactctctaaaattgtgcatgagatccttatctttgacatttttcctacgaatttattcaggcttgcttttcgaatctcggtgttcaaaaatttatcctggcaaccatcacgccttcatttgcagaaatcttcagcatccgacttttcgacttcgaacaataagtttctcattctcctcttgcttttatttgagttatggcttgtcttacatcctattacttcatttggtttagcaattagggttcgtatttcctggatgatctttagggtttagccatagttttaggtttatcatattcctcaagcctctgatttgataaacttcatccaggaattggggttgtctttcttttgtaaagatgtcccaatctggttcagaaatttatcctctagaatctgcaataccggaacgccccacccatatagcttgtccatataaacctagaaactttgaaccccaatcgaaattggaaataaatgatgccaggattagagatcatttgattaagtcgaactaagaagatacttccaatcgttatagcagtttttgcaagagatttttgagggcaagcatcgctttttacgagacactacctggcctgaacccttgtgtttat

SEQ ID NO: 56120 - DNA, 943 bp, Cannabis sativa
ctaagcgggctttacaaatatgatgatggcagcatatgacaacaactcagcacaggcagatttgcagtaacctagaaacaacccaacaacaacttccaagctacaactatctgcacacacaattggatcagttcaagatgatacattttctctagagacaaggattgtgacatcagagtcaaccatccaacaaccagagaaaagactacaggagtagatgaatatttcgacttcaccgactacgcaaagcttgtggctgcagaaatggtacaacagcttgaaaataaccaggaagaagaagaagaagtcaacaacacagaaatgattaccatcactgacaaacgacatgaaacaatagaaaatggataaatttacaaggacaaagatacattgataagtatcctatgctgctttgcaattaagaaaacatttcaatgcaaagtagtgaaatcttgcacaaaagaatacagcatagtatgtttggacacaaactacaaatggagtttaaaggcttcaaaaaatggaaacacaaaaacattcataataaggagctactaagaagaacacacatgtgcagttccaataagatttggagatcaacgacaagcaacagtgaagttgatagcagatttcataaaaccaaagttcttgaacctgaaaacaaagtgcagtctaacagatataaagggagaaaggaaagaaaaatacagaataaagatgaattacatggaaacatggcgcactaaagagcgagcacaaagccagctacatggaaacgctaaagaattgtacagtctcttgccaagattcctgtacatactacagaaaataaatccaggtaaataaaatattttttttttcaaatatatttgctgaactaaaaacgttgtttttgcgttgctgcattgtaacaccctaactattttaggcgtattacgtgatt

SEQ ID NO: 56121 - DNA, 670 bp, Cannabis sativa
cgtttccaatgcagaggaagcttgtaaattctgtgttctttgattttaaattctgttcctagcatagaattaatctgttgagaattatcaattagaacttatagtaattaggactttcattttctattctctataccaattcacataagacactataataacgagttaaatgatataagaaattacagaaaaaattgatgtacataattaataaaaaaaaaggtagtgaatatttaaataagctacaatgatttacgctatttagagggctaatgttaacctaaattttttcaacctaatgtggcatattcacgtaagccgaagacagagtacaggtggaatacatccttcccagtagcaagacaggctctccatacaaggtatgtcaaaattatcaagcagcaactgaaagaagtggaacgagccatcaaggggctgtaccaacatgactggccggccaagaggagcctataggccggccagggtgaacatataggccggccaagatctgggcacaagttggcctgccaaaaaggtgacttccgggccatgggaacttttgttcgaccaagggaacctcgcctctgcaagagaacagtgtacaaagttattctccacttggaaaaggcttgcctctacatccaaggactagtctcctcttggtaaattc

SEQ ID NO: 56122 - DNA, 1158 bp, Cannabis sativa
  modified_base (441)..(443): a, c, t, g, unknown or other
cctggtctgggtacacaactgtgtttgggcccaagtttgggttcaagtttggttctggggctaggttcgagttcgatctaggtttgagtccgggtcttgttcactatcctagtcttgttcgagggtcctagtccagcagttcttgtttaggttcccgtttggggtcccgagtttgggtcacggtcccggttttgatcctggtccgggttcgagtttgggttcgagaccgagactggggtgcggttctaggtcccagccccattgaagtgtcccgagtctggttccatgttttgttctgagttcgggtccagggtcgacaccgagtccagatatgggttgagatccaagtctggttcccggttcaagtctaggtctgggttggagtctggttcctggtgcggcggttccgggtctaggtccaagtctggtaacggttctagnnncaggtcgatgtcttggttccggtctcgttcttgggtctcggtctaattccgattttagttccaattttgagtcacagggtacaggttaaggtctaggtttggattgggactgggttcgggtctgggtctgggttcgagtcttcatcgaggttcgggtctggggctggttcctagatccagacactgactacaggttaggtccaagcctgggtccatattcgaatcccaatctcgtgtcccagtctagttccatttcgggtgccaagtcacgagctcggtcctaggttcaagtctgtggctggggtcgggtcttaggtcacggtcgtagttccgttcccaggtccctatcatgattctgggtacaggtcctggttctggtctggatttgggtcccggtctaggttcgggttgggtcctagtcccagtttgggtttgggtctcagtttgggtttttatttgggtttgggttcaaatcttggtgcttgtcctagtcctggtcctaaacctagtccggttccagttctagttgtgattccatgttcaagtttgggttagggttcgagtctgggtctgagtttgggtttgggttcggatctcggtctaggtctagatcgggctctgggtgtgggttagggtcctgggtctcggtcaaggtttgggtatgagtcccaagtttcgatctcgatctaagtctgggtttagtttcgggttgtac

SEQ ID NO: 56123 - DNA, 1556 bp, Cannabis sativa
gctctagcaaactcatgagcaacactattagctgaccgcttaacaaaacaaaaataaacattattgagattagccaacatggctttgcattcctgaattacaccaccaaattgagaagacaaaatagtcgagttcctcagggcttgaaccaccaataaacaatccgtctctatccaaattgagttgtatgtttgatctttaatccaacttagagcttcccgaaagctcagagcttcagcaatggtaggagcaatgttaccgatgagtagtttagtgcgaccctcgataagcataccattgtggtcacgcaccaccatagcacaaccaaaccgattctgactttcaaaaatagctgcatccacattaatcttgatactattttcctgaggttttacccaacactccattccatcatagtcttgtagattagaccataatgactcaatttgagttttttgagcgtgtttccattgatcaagatagcttttagcagaaccaactatagctgaaacattgaacggtttcccttgccaaacaacatcattccttgctccccaaactgcccagcaaagagcagcagccaggccttgtttctcggtttcaagcggtgtgaaaacatgcacacaccagtccagaaacgcactgcctgctgcaataccagaagtgccaatgccgactctttcccacaccattttaaccactctgcaggtgagaagaacatgcgcaattgtctcatccatctcctcacataaaggacaacgtgtgttgacgggaacacgcttagaagcaagctgagaaagcgttggaagacaattagagccggctctccacatcaggttttttatttttgggggcagtttcagcgaccacatcgacttccagaattccgaggctgcaatctcagtgcctccgcccttgagtttttgttggagagcatatgcactcttaaccgagtacattccattagcctcaatagaccaacatagtctatccgaatcctggtgcaagcctagaggaattttcaagatcaactcttgatccctttcctcaaataagtctttcaatacatcaatatcccaagaagccatgtccatggacaataaattaatcactttagcttgatggagggctggatgagaagaacttacatatgggttctgttgatcgggcagccatggttcattgagcacattaataaaagctccattccctacactccaacgaactcccgcacgaacaagagcttgagcttcccaaacacttcgccacacaaaacttggattgttgcctagagaagctgagaggtatgttccattgggaaaatatcttgccttaaaaattcgagccactaaggactcaggtcttgttaagaaacgccaaccttgttttcccaaaagagccaagttaaaatcatggagatttcgaaagccaagacctccattgtccttgctactgcacatacgatcccaagacatccaaggaatgcctttgttttccttcgaaaagctcttccaccaaaatctcgccatggaactctcaatatctctactaatctc

SEQ ID NO: 56124 - DNA, 1543 bp, Cannabis sativa
ccaaaccttgcagatttgaatggttttgtccaaatgggaacctctccaaatggctttttggtatttacttactgacccttaattatgtaaaagtaattattctatgtttctaattaatgttatcatgtttgaattgaagcaaatgaaatattgaattttgagtatgacaaactaggaagggataataaggtcttgtcaagtcaatatttttagtacatcataagaaatgatcagacactaaaacaagatagacaaaatttaaacttgacaacatctaagaaatccatatctgcgataagttctggaatttctttccctctacttaacctgaactttgagatggagaattcatacttgattgaaccatattatgaaaaagaaaagaaaggaactcaatattgtaattgaaaaaaatgaactcattctattcttttagtatcagtcttccatgttagttttcatttgtttttctctttgtttatattgttcaattctattactattattccaacaaagtctcctataaaaacaaaattaaaggccacaaattgagatttaagtactggtatcactaaactattggtattcatttacaccactctttctaaactggttagtttcactacacatcatcctcatgatataaagagaaatcaggctcatctggcttaagaaacttaggcatctttaagctagtggaagaagcattagtagaagggccagtggcttgaactttctggttaacccctcttctggtatttgcagcaaatttagaagccagaattgtggcaccaaaattctgggcattgctagctctgccagttaaaggtgtttcactttcactcatctcaaatatcccaccctcctcctcttcaccctcttgtcctgaatttcggttatagtagtaagagctctcatgcatagctagctcctttgccatcttccttttcttataccttctccaagcagcttgtataaagcaagcaccccatgttctccaattgtgggagtaatacctgaaagcatgttgaagtttcttgctgtgcattcgcttgaactgacccgaaacaaacttaagatcctcagctctaagcgcgaaagcttcaacctcagtcaaggctcgaactgttctagtggaagaaggtaagtgcatactagagcttggcatcaaggcccaagtaagtaactcttcaccacaaaagtctcctggtcttagagttatggaattgaaaaacccggatctaccaccattagtagttgagctctcgagttgtcctctgataataaacaacatctcatttacaggatcatcctcttgaagtatgtaagtgccttggatactcagtgatgacactaaacgctcacatatagcatcgagaagttggtcatccatttgtgaaaagaaggggacctgttaaatgattgagaaaccaagagctctgttatcataatgcaaactatcaatctcagttagtattatattgttagggagcttcttagcttagcttgaggcatcatttttgccatttatgttttcggatcc

SEQ ID NO: 56125 - DNA, 1197 bp, Cannabis sativa
  modified_base (498)..(498): a, c, t, g, unknown or other
  modified_base (1125)..(1165): a, c, t, g, unknown or other
ttgtttgaaagaaatgattattttattcacaactgaaattcaaaatatttcatcagcaatgtgatttacaatcattaatctcaaaagaacttccccagttcagttgcttatcttatcaatcctctaggagcgtctggttttgataaattgggttttgatgttcagggtgaatccctaacatactcccctaattgtttcaatatccagggtcaatccctgacatattttggggttccaggtgaagtaatcctggttttagttctgtcttcgactgttactagttgacgttcagttatggaaaccatagcgagccaatatctactcaggtcacaattcttttacacaattgctttaccggagtaacaaccctttgtattcttgtgacccgctccctttcgagataaccaaagtgtcccttcttctcgcgtaagagggttataatcttcagtcactcgagttattggacagatcgaactgatcataggcatcttcctgccnctttatatatcgttgaaggtgtccttgcgatatgagactttctatctcatctttcaattgacgacactcttccgtggcatgaccaatatcaccatgatattcacaccgcctatttggatcccttttgcgcctcacatgtttcataggtcttggctcaccaaaaatggcttcctgtacaactgcgaggtaaattttttcccaagtttcattgagctcggtatattcggcataaagaggaatatatttgttgggcttcttatccttgagcagccttttgggattttttttatcccaaggcctccaaatcaggttttccaacagtatcgtgccccggttgtctcctgggcttcgtgacctgatgccctctaaacttattctccaactcgctcattcgtaaatgggatgaatcctttggccttgaaccgagtcgttcacggaggtcaggattcttcaagtttagatgttctcgtagatcactcttatcatgataatggtcggaccttgcccttcctctcaaggtttgactcacctttttcttcttacaagggtttgcacgagtttcattctaatgagcctgaatagtgggttgacaattttcgtccaatgttctgttgggttttatgcccnnnnnnnnnnnnnnnnnnnnnnnnnnnnnnnnnnnnnnnnntatagatcagaaataacatttaacgttgcatg

SEQ ID NO: 56126 - DNA, 701 bp, Cannabis sativa
tgatcgtttaacaaaacgaattttaacaaaaggcaaaaaaagcataagtgaaatacaatcttgaactaaattcccaaacacaaaaaaaagaggtgagcggctccggatagcggatagcttgagatagaatttttttatataaaatttatatgtaatatagatttttttatatatatatatatttccatttattctatcatagagtggtcctaactaaacatatcattgatccaaatacagtgactattttgattttgaacaagtcttctaggctttctaatatgtccatatcttcacttgtacatatggtcctatcatcattaataatgtcaaatttattgttataataatcgactaataattttctcatcattcaattttcagtaataatatatatacgttctttcataatttttcaaaaaaatcctgcaatatcagatcgacccaatgccacttcttcaaatgaaaaaaaattgtacattaataatgaattttcgatgattttgatctatattgtcgaatttatcttcttgacttgaagtgtttcgagtatgaactcctctttttgccatggttgatcaagaataaaaaaactaactagcagataggaaaagaacaagagaagtaggagtgtcaatgggtcgggtcggatctgatcctgctatgatctgacctgatccaaatcatgtaaggatctgccc

SEQ ID NO: 56127 - DNA, 1247 bp, Cannabis sativa
tttcatattatatatgtaaagatcatctaagattaatattttgagttattaaataattagagtttatgtatgagatttaattaatatttataaaatacatattgtgctaatatatttaagtttatgcatgtttattatgctattttatgtaactatctcaatttctgtgtttttgttcggaagctgtggaaggcattgttgggcctttagagagtcgcgtttatatgttaagaatattattatcggggtgttattgttgggtattagaggtattgtgaattggtcgggatttgcagaatgtctaaattacctttgggtgattttggatatttgagttatttaggggtgaaatggtcataatgttaggaatcccttcttttgtcttttgtgatcaacctaggctggttgttaatttaataaaatgactttttatagttaatgttagaaaggttaagagtaatctagaagaactcatcatttttccatacctctttctttctttctctcgattctctaagaagcggcaagaaaaggagattagtttgctgcaattatagtgatttcagcaagaagaaggtatcttgactaaggtgtaattctttagccttctcccctttgattttccttagcttaggttatgttgtagttttgatttttgtaaatttaggggttgtagatgtatagcttactagcttatgaattctgaagttaggatataattatttaagttgttagaattgttttggtggattgttgtggtgtttggttgagattggagttttggagctcaagctttgggctccaatggtgatttgtttttttgagtttgttattgagttttattgcttggttttggttcattatggtatgtacaggtgttctaaaagttttggaaagatttgagattgatttgagttaaggagatcggttttagggttcccagcacagaatcggtcgaccagttctaggagaccattagaaccggtcgaccggttggtacccaggagccggggttccgattgggaaccggtctgccggttggggctttttcccgaaccctagtttttctcgtttttgcgtaatttagggtgtttgcatcctatttattgatagggttatccttagtttcaattttaaatccccgatagatgtttatgaatgtctctcatcgagtttgaatattatggtttagggtcctgtaaagcatcgagctgcacttccaatcacgctgaccggcacacctgagc

SEQ ID NO: 56128 - DNA, 933 bp, Cannabis sativa
aaatccgttatattttattagtacttaaggtttttttttgttataattttttttaacgtgcatcgtttattttttctttgtaagattgtaacaattttagatataaatttagtcatcaattaaaagataattttaaaaaaataataaaaaatatctgaaattaaatctaataaaattgataaaaaaaaataaaaaactctcaaaaaaatttaaaatcctaactctaaccctatttataattatgatagaaaaatttacatggtataccaacttttgccatattttaaaataatactgccaaattgtacttttcacttttttactgtgtattttttataaatttcatactgcagtatactgtgtttatttattagttttttttgtttgttttagtgttattttacggttgttttctataatttattttttttaacgtcgatttcactgttgttgctccatcttgctggaattaatgattgttttctgggtgttctcgtgtagggatgaacaacggtcggttttttacacacaaaaaaattcaaaattcgattttcagttttcatggttataatctgaaaactgaccgatcattatgtaaatgtgaaaaaaccgactgttttaatccaccgttttaaaccgaccaaactgagcttcattttttttttaaaaaaataattttttaaatttactataataatttggaaactaaaaaaaactaaagtattgtatcaaatatcatataatttaagaacaaatttttttttagtgaaataaataatgtaatttttttttttttttaaatttgcttaaattatttgtgctactagtatgttaatgagtatattaacaactcgtattattttatgaatgtgtatatataatacgtaaatacatcaaattataataaaataaagcaatgaataattgagattt

SEQ ID NO: 56129 - DNA, 1265 bp, Cannabis sativa
  modified_base (237)..(240): a, c, t, g, unknown or other
aagaaaagactattcaatgttgaaacttggtgctaaggcgagtatttgcaaacacgagagacgcatctgcatgagtgttcaacccgaactgggagggttcatatgtaatcgaagcagtagaaggaattggagtttacaaattggctcggctaaatggctcgctaataaagaactacttgaacgtggaacatttgcgaccctactactagtaaattaatgatgtaactcacattgctnnnntaatattttaacttcagttatgaataaagagaatcatttattttatttaagtaattacaaagccttactctttaaaattacttaaggggcatttgtgtatgattaaccgaaatttatctggaaatacatgatctaatgccaacccataactttaatttattttattaaagtttttggtcaaacctttctaaagagaaagggatcaaaccatcataactttttggtttaaacctgtctaacgagaaaggaaaatcaaaagttataaatgagatataactcagaatttgcgtaccaagctgaatattaacggttcgtgcaagatagaaaagtattaaacgagacatcgagatgtcttgataaaagtacttaaacctagtgaatggatagataatctaactattcatacaagcaatcaaaaatatacaaagtgataaaatcattaaacgtatattcaagtttgcttaagacagattacaactgtcattgcgaggcagaattgataactgctcgaaaatcaaaagtctggtagatcaataactacctaaataggaaaattacgagcaatggaaagaccaaaagtactctgcatttgatcaaaatatagttatttacattgtgaataaaaaggtaagcaaacacaaatatattaagttcgaatgaaaaagtacaaggcatttaagataagttggtttaccaacttgtttgtacaaaaataccgctaggggcaaaccattaagccattttcctaaacaaagaatacaaggttatttatgggggataagagagctcgagaaagactgtctacacgtagctcaagaaacaccgtctacacatagcatgaggaagaccgcctacacgaataaggattcgaccattacatagacctcattctctgcattagtgattggcttcttcgaagattcccttgtgcaagcttgggtgttgaaccatttgggttctttagtagaatccatgatctcaccagctgggattaccttcttcctatattccttgtcagcctgagg

SEQ ID NO: 56130 - DNA, 1184 bp, Cannabis sativa
gactaatccatgacgatcaaaaaattattcaagagtaccattaatatattccttgccattgttacattgaaaagactttatattatgttcaaattgagttttgactaaagcatgaaaagatataaataattgttttacctgtgatttcttggcaacatgaaaagtccaaagaaatttgctatagtcatcaagaaaaaagaacataataacagtgcctagaagagctagcaactggagaagtccaaattctaagtattctaccaatgtcacacaaccaccactaagaacatttctcctattcccaaaaattctattagtgtgctccgtgacccaaattagaataatgtaatgttagtgaatttactgctttaattgataataagacttgggtattagtgcctcgaccaccaaatatgaatgttattcgttctatgcggattttgcgccataaatataattctgatggttcttttgagcattagaaggctcgtcttataggtgatggaaaaacacaagagcaaggagttgattgtgatgagacgtttagccctgtggttaaacctgctaccataatagctgttctcagtatttctgtctctaaatcttggcctatccatcaaatggatgtcaagaatgattttttccatggtcatcttaatgaaaccatttatatgcatcaacccatgggttttcgagacaaaaatcatccagatcatgtttgcctcttaaagaaatctttatatggtttgaaacaggctcctcgcgcttagtgtcaaaggtttgctaattttgttgctaccattgggttctctcacagtaagtccgatcattctttatttgtttacaaaaatgattctgacactgcttatattctgttatatgtggatgacattatacttacgacttcaactaattgtattcgcaagtattttatgactctattgggttctgagtttgcaatgaagggacttggccatataagtaaaagaaggtttgtatgagttgaacaagcatggactacttggacaggtaaatcttgaataattagatttctgtgaatattgtgttcttggtaagttttgcagggccaagtttggaactagcaaaaagaacaccaaggggacacttgactacattcacagcgatttgttgggaccctcaaggacatcatcacactcaggagg

SEQ ID NO: 56131 - DNA, 1500 bp, Cannabis sativa
tggatcctaatcacgggtcccagttgagtttcaattcatgccccaggtcccgctctgggtatgggtctaggtgtgggaccgagactggggtccagttttgggtctcaatcccagttctaggtgccgagtcctattcaaagttcgagtctgagttcaggtctgggttcgggtcccgagtcccgatttaggttcaggttcaggttttggacccaatcccggggtgggtctatgtcccagtccgggtcctggtccggttacagttttgggtttgggtccaagtcctgctcctggtcctattcctgggtcccgatccgcttctagtttcggttccagtttcaagtaacagggtacggcttcgggtcgagttttggttcgagtccaggttcgggtcctgatttgggtccggggcgaggttcaggtctgatttttggtctcggttagggtccgaggctgggtctggtttcaagtttgggtttaggtcccggtaccgttccaagatcccggctggttccagttcaagtttcggttttggttcccgtgtgtgggcctgggtcttttatatgtgtccgggtcatagtttgagttcgagtttgggttttggttctggtctaagtcctagatccatacaccgacgacgggtcaggtccaagcatcgagtcccgaatcccaagtccttaggtgggtcctaagtctaggttttggtctaaggtcgagtcccggatcccgatccaagatctgaggcccaagttctggtcctagttcgtgggcctgattcccaactctgggtcccccatctatatttggatcataggtcccggtctaggtcaaagttcgtgttccggttcaggttcgggttcggtctgagtcttggtcccgatttgggttcgggtccgagtttgggtcccagtcccagtctgggtccgggttttgggtccaaggtccgagtatggttcttgggtcgtgggttcggcctcggtttttgggtttggttttggcttcgggtctgggtccaggtcttggtcttgctttatgtcccaggacacaggtcccggtctaggtccaagtctcggtatgggttctagtctgagtttgggtttaggtttgggtcctgctacatcccatgtccgggttctagtcccagtcttggtccgattttggtctggttccgggtccgggatcgggtcagacctgaacctaggacccgatcttagacccagactcggaccttgacatggatctagatacgaacctggactcgaacccatacccagaccgtgatcggaccaggactgggactagaactcggacatgggactgtaacaggacccaaacctaaatccaaactcagaccagaacccataccgagacttggacccagactgggacctgtgtcgtgggacctaaaccaagaccgggacctggacccaaaccgagacctggacctgaagccaaaaccagacccaaaaacaagggccaaacccaaaccaagaccctgacaag

SEQ ID NO: 56132 - DNA, 1677 bp, Cannabis sativa
ttcttggtgcaggtaaaaagattagcaattttgttcggccatgggtcagaggtctcccagcaatgtacatatcaaccgtgttgtcttggcttttgggaagcacggtcgaccacttttctcttatgaattatgaatggattgatttgtaaagtttaatgcgatcatcgattgagaaagaaaaatggtaactcttgaactgtaaggtgacgacccattcgtgtttgtgggcaaggtttaaggattccgaatttcattaaccatggcatttaaggcagaaggtttaatataggataaatttattaacctttgagttagtgtgacaaatatcgcaaagggaacattagtgggactaagacacaattttgtggtccaagggtttctagatgccttttcagaatgccctttaaggttagtgataaagtgggaaattgattttgaattgaaatggtaatgggaaagaaacttgtatctagagttctgaattggacggtaattgtagaattgaaagtggtgaagattccattgtaggaaatgttagggttgaaattgctagtttgagtaattcaatctggagtatgccaactttatttgtgaagaataagtatcctttgtccaggataaatgctatgttgaacaactttaaggggggattatcttctctaggtttggtcttcgatctagttattaccaattgaagattcgaaaggaggatattcctaaaatagtttttttttctttttctttcgtgctggtgacttcatgaatgactttattagtggtatcctgatttcttccaacttaagaaggcatttgagaggtatttttggatggtgtggtaatgttgtggaagtcaaagcttcatactaaacataagaaacgcgagttttgctgatcccaactgtgcagtgaaggttagaggttttatgaaactaacagaatgctatggaatgtttgttaagagttgtttacgcccttagtaaggtcaaatcgaaagaacaaaaatagaggttaaccattttactagtgctaacattgctagtcagtaaggagaaattttgattggatgaaatacttctaaatgaggattagatggtattttgatacagtccaggaaagttattgcatgttcttctaagagattgagaaagtgtgagagatagtagtccagttatgatattgaattgatagtggtggcttttaccttgggagtttggtacttttacttgtttggcggaactataaagtttatatgaatcataggagccttaacattttatcatttagaaagaatttaattagaaggcaacgacgatggttagaggtgattgaagattataatagtatgattccctatctttctggggagagaattagtagtggatactttaatctaaaaaggcctaggacaagtttgtaaaacaaaaaaaatctcaccaaagtttgctaagaatgccaccagaaaagagattgactttatgaagggagaacttgttaatgttacattgtagtttaaactgttgaaaagaaataaagtggccaagcaaggtgactccgaactttaaaagtacaaggaaaggtttgaaatcggatgaataaaggaccttttgaatttgtttaaaggaattttacaatatcaaaacaaggttgatgtatcagtcatataagggtattgaatat

SEQ ID NO: 56133 - DNA, 1324 bp, Cannabis sativa
caaactactatatttttttttatagtggagaatttgaactttaaattcaatctttatatttatatcattatcgcaataactaaaatataacaattgaatgtgaaaagaattaaataatagtgttcggtttggacgggttaacccgactaaaccgaccaatttattgggcgggttgaaattcttttttcttaattgggcgagttacactgaaatttttgtgacccgatctttacattggattaaataaaatgtaatgtaaaccgaatatacagttttgtaatatttttaaacagtcaagtattgatactgtttttcttaattttataggttgacatttgacaacaataacaagaattcttgatctgatatatccagtttttgggatataatagatgatatctcttgtggggtgtttggtatgggtgttcgggttcttatgggaatgagaatgtaaagtcaaatctatgtttggtataagcttagtggactggaaggcttatgattaagtgagtcctatttttatggttagttttggagtaatctcaaactctataagtacttgagtttagtttgagattctcataatctcaaccccgagtgaaattgttacaccaaacactccattgtttataaattcaagagagacatagtatctctaagagagatgctaacaagatcattgtatatgttttttttttcttttgaaagttaaccgtttatagataggaaaaagttagactttacggtcgttacataaaatgttttcaaatatagttgagagcttaaccataccttttacatcattagcaaaagtctatttagtcacattatgatagtaaaattacaatcttggaataaaagaaaaattacaagaaaataaactagagagttgttaatgatgcacataattactaatactccaattatgtgcagtacaagaacctcaagaccatagattgaattatttttaaaatgatctttttataaataggttacaaaggtattgtcgagtcaactaataatttcttgccgtacaagaacctcaatacaagatcaattttaattgaagaaattcaaatacaatccgatcttatatgatcagagtttataatgtgattaatttcatttgatgtttttgactaacgctttgggtttaagctttcacaatcttatttttgagcagtgtctcaaactaatagagcaggtagaacatttatattttaggcaactcttgcctatttttccaatgtaggacttgggttgatacctcaataattctcccttcaaaccaaagaccacatacttctgacctcctcttcagcaa

SEQ ID NO: 56134 - DNA, 758 bp, Cannabis sativa
  modified_base (601)..(603): a, c, t, g, unknown or other
aaaatcccaaaatagatattttccatctactttcgtggattgttaagacctaattcacagtctagcttgttgtccacgtgtaatgttgtgcactgaagtcctaccagaccaagttctggccggccatgcaccaacaggatgcaggctggccggcctagtactgtccagaagttggccagccagtcccgttggggtggctagtttatcactcatcatcccgtttgagtgctaggactccctgtttattgaagtgcgtagatgacttggccttcttgttggtgagttttactgacacgtggcgctgagattggctacgtagacatgccacgtcaagtgggcaaaattcaggataacaccaattttacccttgtcttggtgcttaaatagttaaatgactcaggggtaaaatagtctaacaccataaccccgcctaaccttaatattccaagctcaaacatataattgtccccttaaataaaaaggttctatgtttacctatgtgactttactggccatcaaatgcattttctatcaccaccgagctaaaatcataaaaattgcatatttcatatttagcataaataatactcttagagtttannnaaatctctagaattgagaaattataaatttaatgcccattttttaaaaataggacccacaacataaatatattcacatataatcatcaaataacaataactaatgctaattgcctgtaatgtccccgcttcaagcctccattgggtccttacacc

SEQ ID NO: 56135 - DNA, 4589 bp, Cannabis sativa
  modified_base (4539)..(4562): a, c, t, g, unknown or other
taatgaataaagaatttagaagagagtagtgtaatagctataatttcattattctttttttttttttttttttttttaattattttaaatcccaaaataataaaattattttttttattttatttaaaaatgctactaatttagtaaaagtttatgggtgtttgtaccatagatctgggatctaattttaccttttattactagatagctaatactatatttatttagatttgtataattattctataactagctactatagctgtactatattattattattattattatttttatatatattctagatctgaaatttcctaccatttctttctttttttttttttacttcttttgtcgtatgattttggagagttttaggatatacaatttttaatcattcatatcatattgtaattcatttttatgcatttattgtgtaaatagtaacaacatcaacagcatataataattaaaaaaaaattgtaattgatatgaaatattaatctgaagaagaagaaaaaaagactgataacaattttctgaaatttacaccaccataaacaattaaaagaaaaataacatattcactaataattcctttttcatttattattttttgtcatgaaatctaaaccctctttaccttatttattttaggaaaaaataaataaataataaaaatgaaaatgaaaatccccttcccaaaaacccatgtgtgatctttctccatattttgtttttctttctttttttctttttcaatatcttgtcgtataacaactttccaatgtcgttttgagtaagtaacactaaaaatgtttcatcatgatcaggtccacgcttcgccggaaaacttaaaaacaaaaaaaaaaaagaaataagaaagaaaaaatctctgacccaccggccggccggcaggtcaacggcaatgatcatctccgacaaccccatctctcttgctttttcttttctctctctctctctcttcagctcaatcattctctgaaactcactcaactgcattaacagtagtagtggaagccttattagccaccaattcataattattcccaccttcatcttcatcatcttcttcttcctcttccatatcttcatcttcctcatcttcatcatcatcctccaatcgcgtattaatctgattattattattattgttctcgggttgcagcggagcaggcggccattgctgctccggctgaaccataagcggaatcgaattctccgctttatttgctgaggccgcagcagcagaagcggaggaatcgtagtacttattattcttcattctatagagagcgtccaattggtgaaagtaaggacatgtcttggaatcttctggacgttttttgttgctctctttaactttcttgaagtatttgttaatgttctcccatttttccttgcatctcttgggattgcgattgtacccgagtttcttcattgctgaagatatttcttcccagagcggtcctttgggaccgttctcttggtactttgaatccagatttgttcgtaactggattagagctaaaacctccgtttttggccaccgcgatgagctcattcctcctcctgaaccctccgcggccaccaccattgaactgttgttggtgatgatgacattgttctcatttgttgatttcttaacattttcactcaccgctaatggttgtggcggccgcggttgttgctgtagcggtggctgttgttgcggttgcggttgtggccgaggaggagtggattgcactgccgtttgcataaccttattgtttaaaattggggcggcaacggtggcggtggtggcagtggtggcggcgggattgtcgttattattattttgctgttgctgttcggaaactttttgaagaaatgacatgacggcggcgtctttggcggcggcgaaagatctttcttgagctaaaatttctctttcgcgattaattctggacatctcttgcaacctccaagcttcttccctaaccattctctcttgctctcgtttctcaatagcttccagaaacttcttctgcaaatcttcttgtctctgaatcacttccttcatcaatctctcaaagaaatccttccacttcctcttcctcttcctactactcctcccaatttcaacatcttccatctcctgatcatgatcgttatcatcagaagacgtagaagacgatgacgtcatcgaattcgaaacaagatccgctgaaatatttctcataaatgtagctgtagccgcagcagtagtagtagcagtaggaggaggaggattcattgccgccgaagatattatcggcgccggtggtggtaaaatcgaagtagtagcagtagggtttgctgaaacaaacggagattgaaatgagatgttcatggcagtagtaccaatcgatggaacagtagtagtactactagtagtaatattttcaggcaatggcgccattattggactattattattgctcggtggcggcggcggtattgccgatgctgttgcagctggttgatgaggtttgggaatatttagctgtggctgcggaggcggcggaggtggtggtgaagatgatgatgatgagaaagaagagatgagttgatgatgatctagagcttctaattgatcgaagaatcgatacgtttttccgtcggatttaccagttcggccatctttggttcttttgtgatacttgtaaacgttttcgaatttctccttacatttcttggcgcttcgatgataaccaagctcagctagcttcctgtattaatcatatatttatgtaataataacaacaacattagtttaatttttgctgtaattaattaattaaaactcgatcgatgcaataatattatatatatatatagcatgaaatatgatgaaattgacagccacacagggaaatgagtttatttatttatttatttttatcagtgaatttttagaaagggagtgatgagagagctaactagctactactgatgaagcttgggatttagcaataacgatatatttattattacagtacgatattgtatgtatatatatgccatgaatgaatatgaataaaccccaagttgatcagtagaatttattctcttttaccttgaaaatctaattaataaaaggaagagaagacccaagaaaacaaaaatcttagagaaatatttacggaacaactaaaaactcatgttgagatatagaatttattcaactcattattctctagggaataaataataaagaaattattaaaacaaaattacccaaattttttaaaaattgtattatcacttaataatcaaacccagaaaaattaagaagaagaagaagaagaccccctttacagatctcaaattaaaattgagataataataataataccttgaaacatcatcccacaatggacctttaacagatgcatctcgaaaagcaacgtccatttcagaacgtatcttcaaaagagcaatagtctcttgcctcggccaccgattaccaccaaagctgcttctatgatccgtaccaccaccaccaccactactactactcattaaaatctcatcatcatgttgttgttgatgatgatttttgctattactaccactcattattattctatgatgatcttctactaattcatgacctgaattaccacccctcgattcagccgccgcataaccaccgccaccgccacccgaagagcttcctaacccagttggggtaccacttgagtgatcccccagcatagaattacaaaacaaaataaaacacacacaaaaaaaagaactatatatctttctactacttcttctactaatactttactagaataataataataataattttattattattactctttctctctcttgctggagaatttttcttcttcttcctccaaattattactaacatctgatgatgaagatgaaaaaagaaaaatcataaaaaaaaattgaggaaaaaataaataatagtaattgaaatcaacccctgaaaaggatagtgaatttatgaagatgagggtataagggtgaattttaattttttattttaattttttttttctttcggtgcttggagagatcatcttagctatacttgtcaatctcaatatttatatatatatatatatggccacatttttattataatatttatttatttttttttactttttatagctgcggaatctttttttatttttttatttttttttctgcgtgtaggttgatttttttaaagataaaaaataagaaagcaccatatgggatcattcacttgagttcttctcagtaataataataaaagtgggcacagaaacatgtataaaaataattaaaaaaatacattaaaaataaaaataattatacttttctttatttttttttatgtcacagacatttttgaacagctgcacatagagacgataatgataataagttgatttttgtctgtccagctaaatttagttaaaagccggcccatgtaggtcagctttttattattattattattannnnnnnnnnnnnnnnnnnnnnnnttattattattattaattattttttaa

SEQ ID NO: 56136 - DNA, 965 bp, Cannabis sativa
tgttggaagtgtgtagagaaaataaagttaggcttggtgccctctttgaaactaaaataaaacatgaaaaagtgagggaaatagttgacactagcttcccgaactgggagtattacttgagtactactattagtaatagaataatgttgatttggcaatcgaagtttgttcgtgttgaagtattgttggaagatgcccagttcattcattgtagggtcaaagtgataggcttgatggaggagttctgctttactacagtttatggcagcaatatgttatcagaaaggaaagtcctttttgagaagttagctggtattggggtagttaacaagccttgggtaattcttggagactttaacacgatgttttgttttcaagattggaatggaggtaagcagatcatgcctaaagatattgaagatgctcaaaactggctttccctaggccaagtggaagacttgaaaagctccggggcctatttcacttggtctaacaagcatgacatgggtactagagtttattctaagcttgatagggtcctcattaatgaagactgaatggatcaattccctcacacataggcttgttttaaatgggactgtatctcggatcatagctactgcattgttaagagcaatagagttggtaatgtgggcataagaccgttcaggtactgcaaccattgggtgttacatgagaaatttcgagaggttgctataagctgctggaacagatactcagaagctaaaattgttgctgggttgattagaaagttgttgagattgaaacatgtgttaaagagatttaatagggaggagattggtgatgttgtgctgcgttatgaacaaagcaaagctgagtatattttggctcaagagaacctagctaaaaatcctagcaatggcatcctgcatcagattgaaaacaacaaaggccttgattttgctacagctgtgaaacactac

SEQ ID NO: 56137 - DNA, 926 bp, Cannabis sativa
gtcacaacttcccaatgttcatttcaaacaatttacttctgtgtctcaaaacaccaatcactctgtaccatctcaagctgctcctgactttactcctatagcagcaacttctccaagtgatcaggtaaatcatacaaactcatctcagttaaatcttgactcacttgatcatagaaatgttacacccgagagtgtctcagctggctccagtgcagacacttttcacatacagcagataactcaaaatgaagactctacaagtgtcaaccctgagcctacagatcacaatactgctgcaattgatgaagttcatactggtaacattcgtcccacacatcacatgattacaaggtcaaaggctgggatatttaagcccaaaacttatctcagccaagctaagtgggaaccaattgctgaagaaccaagaaatgtagctgaagctttgcaacacaagggatggaactgtgccatgaatgatgagattgtagctctcaaaagaaacaaaacttggattttagttccaagatctgaagccaacaatctaattggttgcaaatgggttcaccgaattaagagaaatgcagatggatcatttcagaggtacaagtcaaggcttgtggccaagggttttcatcaaagagcagggttggattatggagaaacattcagtccagttgtgaaagcatcaacagtccgaattgtcttaagtattgctgtgtcaaaaggctgggatgttagacaacttgacataaataatgcattcttgaatggccatcttgaagaggatgtttatatgtgtcaaccagagggctttgaggacactacaaaacctgatcatgtttgtaagttgctcaagtccctgtatggactcaaacaagctccaagagcatggttcgataagctgaaaggtactctgctgtcatgga

SEQ ID NO: 56138 - DNA, 939 bp, Cannabis sativa
gtactggtattgtaccttaaaacacagggtaattaatctaaggcacaaacaactaaatctacttaagtcttaaactcaatttgaacagcgtggttaccaatctagtccattgcccacaactaaaaaatttcaacactgaacaattaaaaagaaaaaaactctttacagtggagacaaattaagaaacctaccaggccgcggtgttggagaccagaatcccttcagtgatgaggaatccaccttgggtggatctttgtgtgtagtactcagccaaagtcggcccagggattccattcaaagctctgcatctagtcatgggcgcaagcaccaccctaccaaccataacaaaatctcataattactccaaattctcacaagaaaaattcctcaaaatacagatctctaaacccataaaacataattaaacactcccttctcctccccaaattgatcgggttaaagaagctaaaaaaacactaaaaccaagcttgatcgggtgaattacacgaatactgtggtgtgaccaaaaacataataaaaaaatgaatgattgatttagtaattttatcaagataaagagtattaaaaccaattagaaaagagctaatcagttaggtacattaccttaacattacaataaattattactataatttcaatctcattctcatagtaagtaatttagcatgggaaagaaggcgcatatatatacaaaaaatacacaacaactatatatatggaacgacagcaagcaagtccacaaaacaaaattttgagcccacaccaacaaatgacttcaaatgtgtgcatgaataaatagacaagcaacatcaacaacttgaatctagacttatagttcatcaatgtcttacacaaatagaaattcaacagtacatgattctccaagatactaataggtgctccattccaattaagggt

SEQ ID NO: 56139 - DNA, 3211 bp, Cannabis sativa
tagctgctgcttccagctccaataatccaccaagaaccaagaaaccacgcccttcttgctccaattgtggcaaacctggccacttggtcgacaaatgttatttcctacatgggttctccccggttatggtgacaaaaagaaacaagaaaagaccaaaggcaaagccaatcttgcttcctgcaccaatgataaatctgatgcagacacttcctccctcaacaatgatctctccacacgatgccaacaactaatttccttgttgagccaacaacaccaatccagaacctgctgtcatggctcctgctgcatcaaaccttgcaggtaatacctgatcctttacttgggtagttgacagtggtgctacacaccacatgtgctataacatggaatgctttacttctttttccaatagcaatcatcctcaacatattcttctcccaaatggtcaacaaattcaggttgccaaagttggtactgtcaagattaactctaatcttacactttctaatgtgttatatgtcccaacattcaacattaatcttttctctatctctgaatttgttgaaaatacatctcattccataaatttctttaacaattcttgtgttatacaagatcctattcggaatgtggtgattgggatagctagaaagcatggaaaactttacctgctgcaacaatgctaccctactgctgctacagcttctgttgtttctttcaaaaataaacatgtaaaccaatggcacaatcgccttggtcatccctctttgtcaattacaaacttgttcaataaagagaatattttttcttctcctccaactgatcatgtttgtcatatttgccaattggccaaacaaaagaggtagcctttcattgctaaccataactttgcaaataactcatttgacttagttcatatggatatatggggcccttttcatatcattagtataaaaggctataagtacttcctcactattgttgatgataaaactcgattcacttgggtctacatgctcaaaataaatcagatgtacaaaccgtaataccatacttctttaacatggtttgcacacaattttcatgcaccattaaagccattcgttcagacaatgcaaaagaactcaacatgcaatatttttttgcctcaaaaggcatcataaactaccattcaagtgtcgaaagacctcaacagaattccgtggtagaaagaaaacatcaacatatattaaatgtggctagagcactaggttttcaatccaatttaccactggtttattggcctcacttcgtacaaactgccacatatcttttgaatcgaactccatccaaattactcaaaggacttaattcatatcagctccttcacaacaaaccaccacagtatgaccatttaagagctttcggttgtcttgcatatggttctactttgccttcaacaagacacaaatttactcctagaagtagagcttcagtgtttattggatatcctcaagggatgaaagcatacatgcttcttgatttagaatccacacaaatctttatttcacgagatgttgttttctatgagaatatttttcccctattcaaccaatcttctatctctgaaattcatgatttatttccagatgttgttcttcccactgttacaccagtgcagcaacaacatcctactacaaccattaagaattatatgccatcgatccctgattctacacactcagattcagcaccagtgactacaaccagtgctaaaccagtgactacaatcactataaattctgagtcacatactcctataccagtgaccacaaccagtgctaaaccagtggatacaaccactaagaatcctgagtcacatattcctataccagtaactacaaccagtggctctccatccatttctaagactgttcaatcagttcctatacccgattcagacatgaatctttcctcaaaaaaacattgttcccaaaacaactcgatctggccgtgcacttgccaaaccagatcacctaaaggattatgtctgtcacaccaccacaacagattatcctatagaacaatttctatcctacatcaaactgcaccctcaatttcgagttgcagtacttgcagcatattctgagatagaacctcaaagttatgctgaagcctctcaatttaaacattggctattagccatggataaagaaactcaagctcttgaaaacaacaaaacttgggtcataactaaactaccccctggccataaggcaatcggctgtaagtgggtttataaggtcaaatatgatcgaagtggggttgttgagcgctttaaagctcgtcttgtagccaaaggttacaatcaaagacatggaatagattattcccaaacatatgcccctgtggccaagtttaacactctcaaagtgtttcttgcacttgctgcaatgaacaattggaatgtccatcaattgggcattaacaatgcttttctccacggggatcttcatgaagaagtatacatgaaaattcctccgggatacaaggcaccccctaacacagtttgtaaactaaacaaaagcatttatcgccttaaacaggcctcaaaacaatggtatagcaaactcagttctacactcatatctgatggtttccaccaatctatatctaataattcattatttaccaagcaaacatccaatatgtttctggttgtgcttgtttatgtcgatgacataatcgtggccagcaacaactcggatgttattgctcattttaaaacctacttgcatgacaagttcaaactaaaggacattggcaccattcgtttttttcttgggctagaaataggaaggacaaataaaggcatttctgtttcacagaggccatttacccttcaactcttacaagaaaccggttatatgggagccaaaccctcttccactcccatggaagtcaatctaaaacttagtaaagactaaggtaatcctttacctgatcctacttcataccgaagtcttattggcaagttgatttacttgaccataacacgacctgatatctcatatgtcgtgaatcacttaagccaatttttatattctcctcgcatcccgcatcttcatgctgctcattgttaggctaaaattagtctaagtttcgggtcatattttcagttagttttcactctttgtttctagttttagggctattttacgcttgattcttt

SEQ ID NO: 56140 - DNA, 567 bp, Cannabis sativa
tgagtctggcccaatcagtggaaggctttgtttgaagttgctgttggttcgcaatgtataaggggtagaattatatagttttgaagctttagacaggatgttttagttgttatgggatatggttaaaatgtattgggtggctcacattaaaaaactaaagtctgttgaaaagtgtcatgtggtaacatgaagatctatttctaagttagtcatgtggtacaattttacatctttattttcagttcatattaaaatctagggatagagctacggtttcctctgccattagtgtgtacttttaataaatatggaaggaggtaactgacggacatctctctatattctgcctattgcttctgttggtaccagggagtctatcatttgtgatttacttttgttgatacttttcatcgtttgcaaagttttaagcaaagtgctacttggatcaaagaaatgcaagtttaaaaagaaaaataaatacctaatgagaaaatgttgtttgaacagaaatagaaatggtacttttttcagcaatgggtttacaggtttatcatggaggattcagtt

SEQ ID NO: 56141 - DNA, 700 bp, Cannabis sativa
gcccagagaatgtaatcaattagtaaagtataaaagattacaaaagcaattgacataaacaaatttagactcactctaatgatttgctgcaacctttgtaatccaccttactaatctgatctctgaaccacacttagtagtgaactcccttcagctattgatgtgtgcttacttcctctcgaagtaaggcttaaacaaatctcctcctgaagatatatgctcactttctcccaaaattagacttggaaaagtctttttccgaattcaaattttctcttcaacctattctatgaatagtacgagatcataacaagaaaacaaaacctaattgaacactctaggtttttacaaataaaacactcttcttacaaagatagatatgaaaatatgagactaaaaaaatccctgatttgtagcatcaaattcagattttgctgctgcagatcgggaaactttccaaaaacaaccaagatcacaatttggtcttcaatacctaccaaataaagattactcaatttactatatacatattaaaaccaaaattaacatttagagaaagatagtcaaattttcaaaaaataggccactttccagaaaaagaattcattctcttgtaaggcaagtttcctaaacaaaagataacagttgtaaataaaacttttcctaaaagaaaagagcaatcaaagccacaaaattaaca

SEQ ID NO: 56142 - DNA, 755 bp, Cannabis sativa
ataatttttttttttaaaaaatgatgccttatatatttatcccttaaaacttgctatttttatttcaggtccaataattcaattctctcttcactcacacaatggttcagcccaacaagaagtgagacacaaactcatacaatgagccaacaatagttcggcccaaagagatgagagaaatgaaaccctagtttgaaaccttgatatgaaagggcgattatatgcaaggtaagaaccaagtcagccgtacctattttcctctcttaatatcaaatttcaaaacttcttcttctctcttctaaacgtaaattactgctagtgcttctaggattggggtttctctatacttctctcttcttactttcttctttcaacaaaaatattgttaattgattgtctgtgtgcgaactgaaggtagaaaattattcatatcttttttttttagtattatttttcagccaaggtacttgaatcctcgcagggtcttgtgaaactttctaatttttgttatatatatataaataatgtatcatttctcttgtacacctatgtttatttgaaatatttctcttctaagtatttttttttatatatatatataacttacctaatatcatatatataaatatatatatttaattcttttaaatttacaacaactcagtgtgaaagaaatacctgagaaaaccacgatagaacatagcagattatgagttgtgggaacgaaatgttgtttgttacgaaaggttgtcttg

SEQ ID NO: 56143 - DNA, 2317 bp, Cannabis sativa
aaaattacaaacgcggccaccataaaccaggagcccagacttatcgacattcaaaatcgagatccacaaaacctgccatcatagaccaagaaccaaaaccactagcgttcgaatgaaaaaaacagcaaaccccaccaccatagaccgcaaacaaagttcaaacaactagatccacaaagaccttcaaagacaattcacatgaaaaaataagagtcagagagagattttaacccaaaaggagaccatgggtgtttggaggcaaagaagtcgtcgatggagtaagggagacaagagcttccgtccggcttcgtagagggttgaacacgaatgaccgagaaaggaacaatgttttgaggggtgttacgtctaggggtggtggctgtttgggtattacaacactggagatgcctgtctggcctagctatgagatgaatgtagagaatatgatagagagagaagaagaagcggaaaaaataaaaataagatagtaaaattaggatttctaaagtaagccttttttatcttttattttttttattcttaatattcatttatttattttatatataaatgctaaatatttagtgacgctcatgagttttttttaattgttatgatatagtgacgctcctagcacgtttagagacatttacacaatcgtgcttggcgcctcactatagtgacccttaggagtttttttttaatcgtgcttggcgcctacacaatgggagcgtctagatccatctcttcgtcccaatgaccctgctagcaactagttaccttttgggagtcttcaggacctccagctctagcactagggccggtataacaaaggccagattgggttctgttttgagatttttggaaacagaataaaaataataagaacagaagactaaataatcaaaaaaataaagtattaaaagagacaaatagttttttcatgtgattggggcattaactagccttagtccacgagtcaattttattcagtgaactgtttacttgtaaatgctctgagaaatacacacggagtatcttcgtatgtttgcttgagaaaaatacgtaagagagttcaacccctaatccataagattaatgggatatttatagtagttggagaattacattagagtttccttttttccctttactggggagtttacagctaaacaatgcctttgggctttctcatgaagtccagtccatgaagaatataatctgctgactaggcaaattggaattaggttgatcgggtcaaaatcacatccactaatggtgggcagttattctggaataactataatacgctaatcataggaagttcccctttaatcacaatatgatataatggcgcaatctgacagttagtattttcttatttatattcaggaataaatagagaaattgaaagggtcttctgggaacataatatctttctcctctgggctcatgaccctagaggcatcttctgggcttgatctaccgaggcggagagctctgtgagtacaaaaccaagacaactcccggaaaggcatatccaggtgggcttggcctactttattattgatgagggccccactgatgggtcttgaatgctgacttggaatccacgtgtccaatatcggaaacgcgaataacaaggagtgaaaagtgtctcaaatcaagctcctatttatagtatttaaattctttttaattaaaatatatttaattgtttaaataaacaaataattataacataattcggttattgatatttatgagagaatctttcaaccatttgagagaatatctcaacaaccttgaaatatgtataaccatttttcaaattagatatttacttaattgaattaatcaaataattaattaacgtaaaaagacaaactccatcaggataggaacaagccataggcgtctacccttatctttaggacaagattgatgtcttttgtcttaacaaatcttttcttgataaattttttcttaacaatttttgtctttcgcctatcaaattaatttgaaaaaattatttatttatttattaccaaaaaaaaataattactattttgccaattcaaaatttatttttctgaacatctttataaaactctttatccctactcttgacaatattttaaggtgacgattcggggaccatggacatataattctaagcttcaataaactatattatttattgggtctcattgttaggctatttttagcctatgttttggatccaatttatgtgcgtttttagctgtgttgggacggaattacgcttgttttctatgttttcaggttctttggaata

SEQ ID NO: 56144 - DNA, 534 bp, Cannabis sativa
aatctaaaatattgaatatacatgatttcaaattaatattaaataatattatttgaaatataaagaactacatctatattttgatacatcatgcaatcatgcaaagcatctactcattaagaaaagttataaagcattcctatttatatactttgctcattttagttgtattcatctctattacaattaaataatttcatttaatattttaggaaaaagaatcgtgattctgtatatatattttctttaaataatgtgaacattgagacattattctataataattgtttttccaactctgtaattagttattttaaaattaaagcattttttaccttctcaatcaaaaatattaattttttaataaattatcacaataaaaacaaaattattagaaacctcccatcaacttctctactctataatctatctatcaaagttcaaaatatatcactaaaattttattttattttttcctagttaccttaaattttcttataagcctataataataaataaataagctataacaaa

SEQ ID NO: 56145 - DNA, 1410 bp, Cannabis sativa
acttgttaagatggaacatggtcaaagcccacgatttgtgaaaatagttatgtattttaaattcaaatttaaataactaccaacctatattcctataaataggggcggattatacagaaaaagagacagaaaacctttgagagaaaaagatcattaattgtaaaaccataattctgtatcgagaaatatcttgaataagatagactcgtagactatgcagagttaactgcaaaaccacgtaaaaaagttggtatcatcattattattactattctttttcaatctcttataatttatgtgcttaattcattacgaaaaaggcttattaattaggtaacaaaaatctgcgttaacacccgacactcaaacgggcatcaagtgacatactagctccctcacaagagctagttggccaagccttcagactgcaccatggccagccaccctaccctccacaggggcctagccggctcgaggtgttctgtagggtctcctgtgcacttctacacatggacaacgacacttaggctacgaattgggccctaaaagccgaatagaatagcataataatatctagattcaatggcattttggtcttttgtaattaactaataaactatacaaatatctaggtaatcaagttgtaatctagggtttaggcctcctatataaaggtcataactctaacctagaaacctaagctgaatttaagcctaaaacctacctccaagctctaagcctaagtttgacaacttttctcttcttcacttcccctctcacacgcctatacaaacattatcttaacacttgagttttgccattcttgattcatacttcctaagggtgctatagcagatccatctataatgatctggatagtattaatcctcggtattaatataactaaaaagatagtaggtcattacccattatcaaaagggggttgaacctctataataaatcggtttactactttcattcttgtttgtgcaacacgtggcaattatcagatatatacgatctcgctgtcgatttatcatttttttaagtcaacaatatagattaaatactgtattgggtgattatgcatttatataataatgatacatgtgaatggatggaattaattttttatgcatgaatgtgaatcgctaattatatggtaaaattgggttggaaattttacaattttattagaaaaattgtacaccatatttatggtttaggttttgctgtaattttaattttaaatttaatttgtaaattttggttgaaaattgtaacatcaaaaagtccacaatacctccattgatgggtgagctcggatttaaggagtaaatcctggtctgatcaagatgatgagttttggacctcaaatgatgagccacgaaccctgaagggttgtggctc

SEQ ID NO: 56146 - DNA, 2392 bp, Cannabis sativa
  modified_base (1226)..(1229): a, c, t, g, unknown or other
  modified_base (2160)..(2179): a, c, t, g, unknown or other
aatggattttatttagggcgcaaaacccaacactttgcatcttcagttacccgtgaaactttggtcacctccgtcataaatatgctgatgtatgaccggagaggctcgcctggtcgttgcttaacttcgaccaagtcttctagatgaaatgggagttggtgtgaggaggacaattctacatcgaattccgaagagaaggctttccatgaactaaacattccaagggccaacttgaaaaaccattgttgagcggcttccgacagagtagcaggaaaaattctgcaacacacatcccctcgtactccttgcaaatccaattgcatttcaaaatacttgaggtgggagagaggatcttctctccctgtgtacatcttccatgttggcattttaaacttgtggggcagcgccaggagattgatctcaggagagaaaggtgtactgcgtgctcgttctaactcaagattattgtttctctgtccagccatgccatggaacatatttttcagttcgtctagctatgcctgcacggctgggctaacttgctcggcatttttgtcaatttgaatcacgtctgcatactctgggctgaacgatcgtcgtgacattctgatcgtctattcctctccttctattcagatcattccttaggtcgtgagttgtccccaacctttcgaatacagaagcgcctggctgccttagcgtttgatttgcttggttgactggtgggatgcaccattgatttggttggaaccatcaagtatgatctctcccgatgaattactagacaaggtctgccagcctgccggttggcctacaagtggaactcgtgaccggggactgggcggctgaccatttgtagtctgggaagtattcatcgctggatcttcgtccgtctcacccaggggaatgacattcggtggttgctgacctacagtttggtaggcttttcgtattagcacggtagcttgccgactacgattttcaatctctgtatgatcagcccttaacgcctccatctctctatctcgccactcaacaaacatacgcctttgttcttcgaacgtgagatttatggcagcgcggagttcttcctgatcatgatgtagggtattgttatgacactgcaatagtccaagagcgtcaaggagattttgtaactcagtagcatctccgatggttgtttgaacgttggtgtcaggcggaacggctgtgttatgaatgccctnnnngggtgcggaactgttattcccagtgtcttgcacaccaggcgcgatttcatctatagcagttgttacaccgtgacccacgtttgccggctctccaggattaacagctggcggaacccttgtgtttcttgggttctgcgatgcaggatccaccgtctgtgaattggctggatccccttgacccctatgagtctgcaccaccatcgtatttgttgaagagctattcttgatccttctctcaatcaaagcaccaaaatgttgacttcgtttttagccaacgacaatgagtcttatttagtaagcgataagtgatttataacaatcgatatatagtaaaacaattataaagacacaagaattttatagaggttcaacctcgagcagttcggtaatagcaagatacttaatttgatatttaatgaaattttggaaaattatttaagttgaaaattttgttattttgaaacaacttaaattagatatttttcagtaatttattttattatattttaatataatttcaaaattttataattatatataaatagatttttgaaattaatttttagaaattaaattaaagttgaaaattaattttttaattaattttggactaacttaaattaagtaattttcattattaaaatatatagattaaaatacatgattaattaaaaataaattattttaaataatgagctttaatcgaagagatatccaatctccattgttggtcttacaatggttaattgtttttaatataacctcgagacgctagacttcgtccctcttatggatggttattcgttgaaagcacttaacactgtaagatcttgtatgataattattttgtaagtttttgtttctattagactctcccctacggtgactactaagaaataaacttacagagtatgaaacaatggtggaagcnnnnnnnnnnnnnnnnnnnntgactctcgcctaccgggacaatgttggattcttattttggtcgaataaaaggttgctaaaatggtgtccgttttagatgagcactactctattcaagtaatgtcatctttgactcttgcctaccgggacattgtatttcattatgttggaaaacttggaaaataattaatatgtttaatttttggtactttgcaaacatatttgctttactt

SEQ ID NO: 56147 - DNA, 1061 bp, Cannabis sativa
attataattaagttgaacttaaaatttaaacaattaaacctatatagtcacacctccccactccaaaattatgaaatggaaggtatacctagtacgtcgtttgttcattttagtataattatgttgtttgggaacgctctacgtactgttcttttgttcctgttaagaattttaatcctaattatactctagtatattattcctaatcgtgtgaaaaattctcacaaagacttataattagtataaaaaatatttaaattacaaaaaaatataaatattttatattatttattattcaatatactaatattattacacatacaatgtagaaatctacaaatatcagtgcaagagtattatctagtccataccctgagtaatattcaggaacaaaaattggtctctttagcctcgctttattccttagagagtaaatttccgtcttagggaaaaatgtgcatcccgtcattttttttttggtataaatattgagaaattatattattattattattattattatctacaattaatcttattattgtagctaggcatctcatttttattatttttttttaaatagtttacaattttaaaaacaagaaataaaaacaatcaatttcactcatactcatgtacatatataaaagtacatttgcattgaaactttttatttatattctgttttccacaccttaaattattcaaaaaaaaaaactaataaaatacctactataattataatatatatacgttgtcatattataaattatgttaagttgccaaaaattaggtaataattaaagataaagatagtactcctatcctaccatcaaatttcccaaaatatattcacaaaattttggtatgtatatatttgttggtttgtgtaattgagagaggaagggttggtattgttgaccttacaattcagttggtagagcatgaatctaactgagtttgaacaataatatatatatatatatatgtgtggcaagattatggtaggacttagcaaaagttaccttgaccattgattttagatcatgtggttattatga

SEQ ID NO: 56148 - DNA, 1811 bp, Cannabis sativa
acgtggtgcttgttattggtcaggtcgtcttttttctgagagtgatattccccttgctctacagtcatttgtattagcggatatttttatctaataaagattattttcgttcaaaaaaaaatcctaaattattcctaaaaagatattttcaaagtttaatttatttataaacacgtatctttaaaaatcaaagtaaaattattgaaaattcaataaataatttaaacaaactaagattttttgaagaaaaaatcaaacttatttgtatttataaactcatatcttaaaaaataaaaaataattaaaaattcaacaaaaatataaaattattttgaaaaaaatttagatattaaactaaaaaaaagttatgtttacttaaacaaatttaaatttttagagggaaaaaaatagactcaagcttattcccgtaaaatctagttgttacaaaaattaaatgtttaatattttttatatctaaatgaatcttttgataaaaataaataattttttaatcgctttattagttttaaaattttaacttcttttttaattttcttaatcattcaaaataatttttaatttttgaagatttactaaaaaaaaattaattttaaaaattataatattatgttaattctaaaaaattatttataaatttgataaaaatattaagtttacttaaaaaaatataaattattcctaaaaaaaatatttcaagtttgattttatttataaacacttatcataaaataataatacaaaaattattgaaaatctaataaatgatttaaacaaactaagattttcgaagaaaaaaaaaattatttatatttaaaaactcatatcttataaattaaaaaaaaaaaatcaataaaatataaaattatttttttttaaaaaaaaaaaagtgaataattaaactaaaaaaaatatatgtttacctaaatatttaagatttctggaaaaaaaaaaaaatagactcaaatttgttcccataaaatataatttttaaaaaagttaattttttttatatattttttacatttaaatggattttttaataaaaaataataaatttttaaatctcttacttagcttaaaatttttaattttcttaattattcaaaatgacctttttttttaagatctaaattaattttgtaagaattactaagaaaatattgaatttttcaagtttttattttgatgaagtacgatttaatagttgtcaaaatttagggggtaaagttgctaatttacaaagacatgtcagtatttaaacgaaataatgagacataacttatcagaaggactaaatttttgtaaatgtaaaagttgaagggattcttaacaaacaatatattttaggggacagaatcagtattgtcaaaagttcaagagtaaaattactaattatttttcataataataataataataattaaaaattgtgaaaattcccaattaataataattaggggtgctcatcaaattgtccacaccgtataaattgcctgcaccgtaccacatcacataaaagatgcagtttaaaatcttttgcggtgcagttgtagtttgcatttttgtcaaattgtgcggtgcggtgcggtttgtagtttgcggttttaaatttaataattacggtttaaaccacaccacactatatattacaaagttatcaatttttacaatatgattttttttttttttcatataagaacaaatatatgtaatatatatgtatattacattatttttaaagacaattcaatataataacttaatgagtaatatatctattctatataaag

SEQ ID NO: 56149 - DNA, 735 bp, Cannabis sativa
atgtttaggatgttaaacaacatagatggtagtaaatctagatcctggtaaaataatccccaaaaattggcctcagagccatggtaatgattcaatttcatgaaatctggttttaaaatgatgtttgtgttgatttggatgtgttcatgttggtttatgtgaatattcgatgattatatggaaatcataattttacgatgataaaattttttatttcaatctggaattatttttactggaaagcagatgaaaaatgaatcaatttagacttttacagaactcaatttgaattttttatgaattagttatgattttttgaagtggggatgcacctcgatcaagattgagcttcagacagctcgtgactgaggttcttcagacattttctgtccgaatgcattgcagcctctccctagcacacatccccctcgtacacgcgcgcaggggtatgcaatgcatacccctgtgcccaattttatttttgtgatatttttagtttcaaaaatcattttttaatgaaacaaattcaaattttggtaaaattatgtgtagaatccaaattttcaaacaaaaatctaattgttgacctcacttttggccaatgacagtgagtcttgattgtaagctacaagtcgtataatgtatatgtaatataatgaagtaaataaagacacaagaattttatagaggttcggccccaagcagttcggtaataacctaatcctcttggtttgt

SEQ ID NO: 56150 - DNA, 1050 bp, Cannabis sativa
catgggcccgcgtaggcgcaattatttccttttccatttttgttttgttattgaatttatttttaggattttcacaccaaatttttaattttttaattttttttagttttaaattgtgtactgtattttcactattgttttacagttattttttacttattctattattgtttttaattattttattattttaacagtattttttgtaaaaaatttagcgccatagtaaaattttataaatttttatccaaaatccaatatttttataaaaaccccatatttaattttatttgaaagaaatattaattattcttactgggaccataaaaggtaacaacctagaaacaacccaagaaactgagagagctcagaatgcttattttgtttttctgcttgttttctctgtcagtaaaaattcaataaaacatataataaatgtgtgtacgtatatatatattataaatatatagaatatgatatcatgatatgaaaaagaggagatgaggggccacttgagaagaatttaaaaaacaaataagagagccatagtttttattattctaaaagctaacaacagtagttgtggagacaacaatggaaagtttttgcaaggattcaacatgaaatgaaatatttatagtaaagacaatgatattagattttaattaacctactcagactttggtgggctttgacagattttgatctacattccttctttccttttcttgaatttgttgttgtggatgcacctttactaaaatgggaatgaaaaacaattgcatttacaaaactccacttcaagctttggagttatactatcttagaaaatatttggtttctccatgtccatttgtaagggagcttcttctgtttttctttctcatactaacttgtcagagtcagattgtgccatggaagccagccgaatccaaaagcaccgccttgatttgctcgggtagcacctcttgcccttctctgcattgctgttgaacaacatcaaagtttaagaccaaaacaaaggaaatgatggaaacagtaattaaagat

SEQ ID NO: 56151 - DNA, 960 bp, Cannabis sativa
cttccgatctttattattattattattattattattatacgtattattattattattattattattattaataataacaataataaagaaaaagggtctagtgattaggttatataaagcaaaggattgctatggtttcaaatattttggaaacctagtttcttttttttttcttctcttcggcggcttatgggtaaaagagattcagttgctgaaggaaaatcaattgcttggataagaggaaaggaatattgatctcaaaataaaattgggactagcgcttgtgatatagaggtttgaagcttttctttaactaaataaatcgttttatgggtgtcttttatgggtagataattgttggtaaacatgtatgtccatatatatatatatatatatatatacttatgttggtgtatgtatgtacgaatgtgctagaagtgagtatttgattttattgtatgttaaaaagtgaacttgtgtcagacattgatttcatacatatttggacacttgaattcttggatcttattattatgtctatattatagatggtgttgtttgaataaaagatgattgaattgtgcaagtcacatggtaggaacttagagtgacgattatttatatattataattataaagttatggtattattggtaaaaagtacttacatggatcattaattggaagctcaccaatttaatattataaatgatgttaatctgtattaagaagaagagtggggtcaatgggattttttttttattctcgtgtaggtgatagcaagaaaatttgatgtaattatttgtgatgattatatgttttgatataatatatatattatttgtttaaattatagattcatgcttctattaattggttaaatagttaggtatatgtatatgtgtttgttttgatgatttcttggagagcatatatgcattagggtctaatgaaggaccc

SEQ ID NO: 56152 - DNA, 1277 bp, Cannabis sativa
attccagtcgaattatgatgccagatgagtttatcttgtgcttggtaaaaacttaaagggattgttacaatacggtcaatgtcaatttgcccaaagtactcaccgagaagagtcaaatcccattccatggtgtcttgaatgaaagtagatactggcatatcaggttgaccaatgtaactaacaggccgaaactcactatgccctgggatccatgggtccaagccagtcctaacatgcaaaccagaacctattttataccttagaccttttaaaagcaactctcttccccaataaattccttgccaagtcaatgatggtgaatgtcctaaatgtgcatcaggaaagaatttcttgagaaatatcgatgctttaacagtcggcttaagagagagtgtggcatttccaatattctccatgcttgttttgcaagcatcgcttgattgaaatcaacaaaagaacggaagcccatacctccttcaaattttgatttgcacaacattttccatcgcttccaatggatcttagacccgtccttgtttgacccccaccagaagtttgccatcattgattcaatttggttgcaaaacccaattggcaatcggaaacaactcatagcatatgttgggatcgattgtaccacagccttcaataaaacctccttaccaccaatggagaaaagcttatcattccaagcatgcagcaaccgccaaattttttccttgatactgctaaacatttcctttttattatgtgttgaataagccgggagtccaagataagattcatgacactcacaaattggcatgccaagtatttgactaaaaaaattcttcgccacatctgaagttcaaataattattgagtaaactaaaaatctttataaagtttgaaaaaataaaataaaattaaaattacaagagatatgtaaatgttatttctgaaagaaaaaaatataaagcatataaatgaaaaaaacaagttgtgttagcaaagaattgagtaagtgattgaaaagaaaaatagaagaagagagttagaagtcagtgactctcggcggttagaaaaaaaaaaagaaaaagaaaaggagtctcggtataggcatactacattattaattgaaaattcgttatattttgagcatttaaatattaaagcgtatttttataagtaattaaaaaaaagtgtattctgagataattttctcttatttttttgtatggtttcagctcttttatgtcgcttattcagtattattatcatttttaaattggctgata

SEQ ID NO: 56153 - DNA, 1153 bp, Cannabis sativa
tttctctagcctcccacgaatcaatggccttcatagatttgtccattttccacagctgcttgaactttttgtccaccgtcaggcgtttctgcactatccactcctcgaaccactttggtaaactcggagagaaacgccatctcgcctcatcgtcgtgtttcatccatgacccgaacaatgggaaaaaagcacccttagagtcttttataacagtaggaggcttgaagcaaaacttctatccgtgagagataatgccgcattttaaacaaaacttgggaagcttttcgtatttgtattgcacccacaggtctttaatggattccctcttcatgaagaaacccgagaaaaggggtttgtcaatgtcgatggtggccttgaagcgtagtgtacccatgccgaatgaacctctttcaaagtctatgtatctaggcagtttgtagactattgaagcttttgcagcaagctcttccagattagttttgttccaataaaatggagggattccgctcagtcgtacccagaatggggacttatcaaatttgacttctgatggggcaagccaagatggccaaggcataatgaccaataacgccccgcagataatccaagggcgtctattaaggacattccaggcgtcttcattagttgcaaaagtgaagagtatgatcccttcatcatcctctttccagctccaccctttaaaagatgcccatgctttttttaaagttcctgcaatcactttacgaccaagtttgcctttgcatataagttttcccagtagcacatttccttgaggttcctgaacttcagtttcccctgggtcaagacgacatgtcaagtcttctgtagtaatctgaacggaatcttcaaaaagatggctgaggctgttatccgccatagcaatgcacgaaagtagtggactgcagagtggtgaactttgcaaaccagtaaatccgaagcctactgcagaatgcaagagggctttggtgagcttccaatgaagttatactctcaacagagtaaaaaaattccgacaaactttcatagttcttccttaatttgctccatctactaacgacatatctttgttttctttgaattgcatgcatgagaatgtaaaaaataatattaacaatatgatgacatatataca

SEQ ID NO: 56154 - DNA, 3327 bp, Cannabis sativa
tgtcaacttcaaatctgtagttagtcttcatctaacatcattcgtatttttaaactattattatagaaactatgagtagtcgccaatgacaataaaccagcatctagtcccagccactggcaactatattatcataactttctccatattcatatggtttagcaacatagggttctgcatcagccgagagatcagtagaaacattatgcgaatagttgttcatattgccagcatcgatctttgactcctcaccaacataggggctgtagtgttgatagttctctcctcctgaaggagcactgcggtagtcataggctccaaactggctgctgcttccagagcgttggtttcggccaaaggaagtcgagctatcggcatattggttaagccatgaaggaaccacctgactggattctagcatgagttcaacaagtgcctttgcaagtgtcaagttcttctcattgaagaaagccgttgcaagaccagaattaccagcacgtccagtccttcctatcctatgaacatagtcatctatgtctcttggcaaatcaaaattgataacatgagcaacatgagggatgtccagaccgcgtgaagcaacatctgtggccaccattattggagtatggccgcttttgaatgatttcaaagctctttctctctccttcataatttataatttgttaaaatgatgttaagatataacaggaatcagagagatgctataaaatactgaaactagtcaaccatatcactttctataaatctacaaattttcatcattttcaagaccaattatgatgaaaacaagaaataaaggtgcatgaatactttcacagacaacagaaacaaaatttcatataaggtagaatctatgatttgaaattgcaaatatgagcatctgggggttgaaaagaagtgacaacacaaaacatttaggcattgtttgaactttgaattcgaagaggaaaagaaaattgaattccaaaggatttttcatgttctcatggatagattgaattaattataatatgcaccaaaaagtttcctatcaaatttgcggaaaacatttttctcctatttttcatcataaacttttccttgctaaactccaaagtccaactccaagtaaggtctcattaagcatgaaaaaggtttttacttggagaaaaatataatttatagaaatatgataaatgagtaaaaagaatgaagatactaacaaattgaactttgtccccatgtattgctattgctggaaagccattcatacacagccagtattccagtgcatcagctcctttcttcgtctcaacaaaaaccagggtcaaggcaagctgctgcatgtaaatatcacaaaatacactaaaaccgatcaaaagatctgagaaattcaagcaccatttaacagctcaaaaaataccaaaacagaaatttaaagtagaaaataagacaaattatacctttccccggatttcatttggcatatgagtatgaaggatatgcatcagatgatttcttttatccatgtcctcaacataatcaatcttttgtacaataagatcagtgctggaaccaactctgcctaccgccagaaatatgtagtttgaaaggaaatcagacgcaagcttctgcctcaatcaaaaagcaagaaaaatgagctcatgtactttaattccatcaaacattcaccctaaacctaattgttccatcatttctttacaggtacattttagcactttgcacaaataataagcagtgaaatgagatgaaagaaaagatcaacctgaatctcagtggggaatgtggcactaaaaagcattgtttgtcttgttcctggtggaggcatgtccattttctcaacaatctttcgaatttgaggctcaaaacccatgtccaacatcctatcagcttcatccaatgtcaaatattttatcgatctcagtgaaactctccccctctcaatcatgtcaaccaaacgaccaggtgttgcaactaagatatctactcctctttccaaattccgaagctacagagtttagagaaaacaaatgcaaaagaataacaatgattaaaaagagcagaagcaacttatgacaaagagttgatctcctagtcccggataaagtgatctaaatacaccacaagtaaattaacaagagtacaaccacaaatgccaaatattttatcaatctcaatgagactcttctttaaatgatgtctactaagtgagtaaaggttgcaactaagataatcacttccaaaattccaaactaaagagctgaggaacagggaaggcattaaggatactaaagacagcaaaacatagcaaattgttactaagggttcatgtttactcttatagttacataagcaaatcaacaagactacaatgacaaccgccacagagccaaaaacaggagcacattacaaacacagaagaagaaaaacaacttaaaatgcaaatgcagcgcaaaacgaatcaaagcaaggtctaatctgattacaatatgcataataaattatgtaaaccattataaaaacttggaaggaacaaaacctgattggtaatagatgccccaccatacgcagcaacaatcttcaatccagtttgatgtgcgaatttctttgcctcatcatgaatctacagaaaacaacaatcccaagattcaacgcatcaaaaccataacccttgtcaatgtattaaataatgagcacaaaaagtgctatcaaacaaaatagagatgatacaaaatcatatttatattgaatcaataaaagaactgatagtcagactcaaaccaacagacctggccagccaactccctggttggagagagaatgagcgcactgggaaaagcagtctgagcataacgaggctgtgactgcttattatgatggacgttcttcaaaattccactgattataggaaagcaaaaagccgcagtcttacctgaacctgtctgagcacaagccatcaagtcccgtccagcaatggcaatgggtatggcatggcgctgaatgggggtgggcttcacgtacttacacctcttgatgttatcgtgcaaacgctcacccaaacatatatccctaaatccattcaccggcgccggaatgtccgtgccactggtttcaaccggtatatcttcatatgcatcaaagttaatacccccaccatcgccaatgctatcatcctccaaaacctctaactcatcaaatttatcagcaacctcattaacgtcctgattcccactcaggttcgatccccgaccaatctcgtaaccactacgcccggagccgccacgtccgccgcgcccatatcctcgc

SEQ ID NO: 56155 - DNA, 733 bp, Cannabis sativa
aaaatatgagttagggttattaccctaagattttatatgatgtgataaatattgaatacatgcaggtatgttaagtgttatgtgtgtaaaacataactaagttagacctggtatatatcaccaggataaaccactgaaagaacgtaatgtatggatttcatatatatatatatatgagtaaggttatgtgagaaaggcataactaggttaggctcggtaactagaaaggcataactggagaatgaaaaaatgtgatgaaggtgtgttggggttctttttccgagatgaggatgactgtaacatcgttctggagaatagaccttggctggtaaatggggtggctctgaatctaaaaccatggtctgtggagggtgaggtgagagttgctgactttgaggtagcaaggtttcgggtccaatttcatggtctatccacccgttgtttctctaatgagaacacccctattattgctaagaaagtagggtctttcatcaaggctgattccaagaggaaagaggaactggttctgagaggctatatatgggcttagattgatgtatggctttcacaaccaatcccggtgggattcttcttgacagctgacggcaaactagagtcatggattcaattcaagtacgaaaaattaccacacctttgttttaactgcggtaagcttgcacactaggataaatcttgtcatgttctggcagctatgggatccctgcaattcgag

SEQ ID NO: 56156 - DNA, 685 bp, Cannabis sativa
  modified_base (573)..(588): a, c, t, g, unknown or other
attttttaaatttcttaattagttataaattcaatttctttttaaattttattaatcattcaaaatgatattttttaaggtctaaattaatttcttaagattcactaaaaaaagttgattttttctcatttttattttaaggggtgcaatttaatagttatcaaagtttaggggcaaaattgttaatttacaaaaacatgtcaacatttaaacaaaatatggaaaagaaccttagagaaggattaaatttctaaaaatgtaaaaattcaaggggattcctaataagctatatattttaaggggcagaatcaatattgtcaaaaattcaaggagtaaaattgctaattattctttaatataattaaaatgctaagggataagttgtctagtatcaagagagctggtatattattatttgtgcaatttaatattggatcctacacatttaatttaggtggcgtttggtaatatttttttaatcagttttttgtttttaaaattgaaaaagtgaaaatattttttaaaaatatgttctatataaaactattttcactttttaattttttaattgannnnnnnnnnnnnnnnaacaaaaaaaaaatcactttcaatatttttttaaacatgttaaacaattagttatctcttaactgttttttcagttaattgttttgttaaggctggt

SEQ ID NO: 56157 - DNA, 857 bp, Cannabis sativa
atcgctaccaagaatgaataagaacggagaaagcggatccccctgacgcacccacgggatggcttgaaatgttttaaaggacccccattgaggaagatcgaaaaactaacagagtggatgcactttgccaccagtcttctgaaaaaagaatcaaacccgaaggcttctaaaaccttgtccagataactccattccattctatcataggctttggacatgtcaagttttacaccaacgaaagtctcctttcccgtcttcttttagaaagaatccataatttcatgggccataatgccattttcagcgatccaccggcctggaacgaaagccgatcggaaaggagaaatcaagtccgggagaatgattttaagccgattagcaagaatcttggagatgaccttatagacgaaattacacagagaaataggcctaaaatcatcaaaccccacagcgttcaccttcttgggaatcaaaactatgaacgttctattcagactttgcacaaaatcccccgtcatgaaaaattctctaaccgtatcaacaacggactctcccacagtatcccaatgaaaccgatcaaagaatcccggcataccatccggaccaggggatttcagcggacccatcgaccaaaccaaaaggcgaacctcctccggagaagggactctagacgaatcagaattcatatcaccagaaatacaaggagcaataaggttagatagagcattaccaaaggaagggttggaagagcaaaagacatcaccaaagtgattgataaagtaatctccaatctgtgttctacccgagatccaatcgatcccattattcgtgatggctccaatgaaattcctctttct

SEQ ID NO: 56158 - DNA, 1378 bp, Cannabis sativa
  modified_base (204)..(210): a, c, t, g, unknown or other
atattgttcaacaaaaaatttaaaaatgataatagtaaaaatatagctctctaatctatgccactggtcacaatgatcttctctgtgtataaacaacccatattaaaaaaactatcattattcatgtcattaaataaaagaattttatggtaattaataagaagattaataatattttggtaatcaatcaatatatatatatannnnnnnataaaggagaagtataagacggtgacatgacgctttagaattactccaaatacatctatctattttctccttaattctctcacttttaaattttttaataggtttaaaaatcaatatatatatatatatgagaaatataagacagtgacatgaccctttagaattactccaaatacatctatctatttttttccttaattctctcactttttaattttttaataggtttaaaaatatattaaggagaagtataagacggtgacatgacgctttagaattactccaaatacatctatctattttctctttaattctctcactttttaatttttttaatatgtttcaaaatatgaattatctaaaataataataaaaatctctaaaaacaattaagtaactaatttatattttccctatattactttttaaaaaatatcctacggcttagttaaaaaaatccctgaaaacaattaagtaactaatttatatttttcctatattattttttaaaaaaaaatatcccacggtttagtcaaaaaaaaaaaagaagaaaaaaactaacaaaaaatacattaaaaaataaaaaactaaaacatatctatttttttttctttttaatgtatttttcgtatttcttttccatatataaccttaaatatataatcctaaacctaaaactaatttcatctctttatttttctttctctcaatgcattttttttcttttatttttttttctttatctttgtttttaatgttaattctccatatctttctctaattttatttattttcttttttttttgtgtgtgcgttaaagagtttaaccaactattaattcttggcagataatgagcaatagcagtgacatcaatgatcaacattaagatattgattttctattgatatttattttctctatattttataatatatttcttgatatattacaacctgttttttttctttttttgtctgtgtgttaaagagtttaaccaacttttaattcttgacagataatgaacagtagcagtgaaatgaatgagcaacatcaaaacttcgattttctattagtatttcttttctctatattttataatatatttcttggtatattacaaattattgtcaatattctctttactttttttttctattttatatatat

SEQ ID NO: 56159 - DNA, 665 bp, Cannabis sativa
ctctaatatgtataagaagacatcagcctaaaaattcatttgatgaggtgattattcaatttgcagatgacgggagggacattagtagctcaacatctaaatgaactcaataccgtcacaacccaattgagtttgaaaaagaagtacgagcattaatacttttgtcttctctaccaaatagctggaatacttttgacgatgttcgtgatctagtttagtgaagagatctaacaaagacagtcgggtaaatcatcaacctctttaatattacatacaaagtcaagaggaagaaattcaactaaagggaatggccacagaagactgaactatcgaggtaaatccagagatagaaggcccaaatctaagaatcccaataattcttagagcttgaagaccattgagtgttggaatagcagtaagattggacactacaaaaatcaatgcaagagtgcaccgaagatccaagatgggaagaaagagaaaaatgttacttttgcctcagaaggtgagttgcgttgaaaacaaattatgcgttgatatgttttctagagagcaaggaatagtcttgggtgttagactctggagcatcattccacactactttgaaaaagaattttttgagaggtatgtccctagaaactttgaaaaggtataccttggtgatg

SEQ ID NO: 56160 - DNA, 1170 bp, Cannabis sativa
tataatacaatacaatacaatataacctaatacggcgttccaaacgagccctaaataatctaacatagaaatgttataaatagtctggttatatttttttacatttgtttgtactagaattgagcttgataatgctaaaaaaattggtaaaaattgtgttcaaagtactattttgtatcatttcgaaaaatgtaaggtctgatttattatttaactaaatcaaaggtcatatgtcctattagtaatttttgcaaaacacgtgatgtaaaataatatgtaatctattttaaattctgttgtatgtcatatttttgcataatattatgttaaattttaatttatatcaaaatattatatatttatatgcacatacaagtcaatacatatacagtattatataaaaatatgacatataatattatacaatttaatataatactacacaatataatacgatataatacatcgtatctttcaagatgtttaatatcatatcgacgtgacatctcataattaattagcaatttttcatattatttaataagggctcgtttgataggctaataagagtcgtattgtattaaataataaataacactgtgctcgaataaagcaatgtattatattaattattacgactaaattttttgatataatgtaacttgtattatttaatatataataatggtccgtattagcttgtattataatatttacaaaggatccggggtcaatctaattctcagacccggatccgaacccgaactcgggacccgaacccagacccaaacttgggaccagacttggacccggacacaaaactcggacccgaacctaaacctggaccgataaatagacccgagacccgacccgtagtcggtatttgggtcgagtttattaacatgtcataactttatataatacaagtcaataccaaacatgatattgtattaaataatactaatacaatacaatccaacataatacaatatgacgtaccaaacgagccttaaatgataatgtgtgggatttgattattaaaaaattgtgtgatttgaaattgaaatgtactaatagtagtatgttaccttaaaccttagagcatctccaatgggagttgatcaatggagttgtcttaatacatataattttcaagaccaatttcaattt

SEQ ID NO: 56161 - DNA, 1038 bp, Cannabis sativa
gaacctgcattgcaaatcttggataatttccaatcctgtgcaactaagttacaagcatggcatcgatcaaaatttggagacttgcctaaaaaaatcagactctcccaagaaaaagtgacagcattaaacaattctttagatacgtctactgctcactttgatgacctgaaacaaagtgaaaatgtgttagacgatcttttggctcaagaagaagcctactggcagcaacgttctcgttcctcttggctgaaatcgggtgactctaacactcattactttcatcaaaaagcgaccacaaggaggaatacgaataatatcaaatccctcacagatgataatggtgttgtgcacacttctcactctggtttgtgtggtgtcattgagagttattttcaaaatatattcactactgatggtgttgatcgagaagcagttcacagagttatttccactattccttgctctataacagctgagatgaatgctgatttaagcaaacctttttctgctactgaagtttacaatgctctcacatcaatggtggatgataacagtcctggtttggacggtatgtctgtgatgttttatactaactattggcacatagttggtaacttagttactgcagcagtgttaaaagtgcttaatgagggtgctagtcctgctagttttaatcaaactcttattacactgattccgaaagttaaaaagccttctaccatgtcgcagttgagacctatcagtctttgcaatgtgttatataagctggtttcgaaatcaattgtgcttcgtttgaagcctttcctatccttagtcatatcagaatctcaaagtgcttttcttgaatctcggcttatcactgataatgttctgattgcttttgagttattacattctctgaagcatttaaagagagggaaacaaggatatgcagctattaaactcgatatgagtaaggcgtttgacagagttgaatggcactttttgcaaagtatgttgacggctatgggctttcctttgactatggtggatctgatc

SEQ ID NO: 56162 - DNA, 1013 bp, Cannabis sativa
tttttccttcaaaacagtcctcaagctatacaaagtagtatcatacgcaaccttaccccatggaaaactgttaaactcaccagaaccaattaaatgaagtaacccactacttactttcttgcgaccagacttactaagcaagaaattcgtaataaaataaagcacatccattccattaatactaattagactactttcttcaaatcactaaaaatgaaataaaactgattttataaaatatttcactaaacttaccaacttaaaaccttaatatatttgtacatattacctacacaaccccattaatgcttaacaagacacaccaacatatttcctaatttaatttcctcattcattcttaccaaataattccattgaaattccataaaatttggtaatttaaaaactaaatcatcctactagattaggtcaaaaccacattaattataaataaaagaaaaattaaaatggtcaaagatattattataagattccctccaataccctttcggcctttgaagtgagcaaactcttatgacttttcatgcacttcttgttaactcatttgaatcagtagtaatattaaaagggttattcatgattcctgccaagagagtagctagaataatgatatgtcgtcaataccaacgtcaccgttaggtgccactaacggcggtctttctcgttcgtacatgggcgggtgaaagggtcaagtgcattgaccaggatattgcgtctcgaaattctcgacccaaatataagcctcacgagctttttccttcaaggaccgttttacaccatgagtactgcaagttcggtacatacagaattcgtaaacggcgacatccttcgccgttaaaacaacattaatagctcttagaccattgtctttaccatccgcaaggactaatagatgagaagtcttacgaccaataggccatagacctttaaaaccacaaaagacttgcttcccaatgacaagattagatgaacctcccttgtacatctccgtc

SEQ ID NO: 56163 - DNA, 1104 bp, Cannabis sativa
  modified_base (713)..(719): a, c, t, g, unknown or other
cttttgtacgggatcaacgactgagttgccacatatacacttgctatatctacagtcagaatagtgaatgcagtgtatttggcatgattctaacggggagtctgtccggatttattagtgaactttcctttcttctcgtttccttgcttgtggttgttgctggaacgcttgccacttgagcttgaattatttgagtagttgggaagttgggcggatgtcctagttgaaggagcctttgactttcccggattttgttcacctttcgctcgttaaatggcttcttcgagcttgatgaagcctttggctcgttcaaggaaatcactcattgagtctaccggtccgttcttccttatatctttccaaagttcacagaggacatcgatgccccccagtatcgcggataactttccatcctcagttactcgtcaaactttggtcgcgtccatcatgaatctgctgatgtatgcccggagtggctggcctggtcgttgcttaacttcgaccaagtctcccaaatgcgtttgcgtgaggaggagtattacacgtggaattccgaagagaaggttttccatgaactaaactttccaggagccaacttgaaataccattgttgaggggcttctgacagagtggtggggaagattctgcagcatacatccccgcgtactccttgcaaatccatttgcatttcaaagtacttgagatgggaaagnnnnnnntctctcccagtatacatcttccacgtcggcattttgaacttgtggggtagttgcatgagattgatctctggtgagaaaggagttctgcatactcggtctaactcaagatgattattacgttgtccagccatgccgtgaaacatatttttcagttcgtcaagctaggcttgtatggctgggctgacgtgctcggcattctagtcgacttagattacgtcagcatctttctgagcggggatttgagtacgggctccaggctgcacgatcgtcgtaatgttctcttcgtttgttcacctccttctgtttagatcgttccttaggtcatgggttgctcctaacctttccaacacagaagagcctagttgccttagcgattgattcgctt

SEQ ID NO: 56164 - DNA, 1314 bp, Cannabis sativa
ttgttgttaaaattccaaatctgctgtacgcttatctagacagacttttcatggtcattatatttctactttatttcagtgtctcttactcttactagcatttttcagtactggtaaaaatgagacttaatctagttcttgaattcttaatttatattctcaacatgtcgaataagtcttaaagtaaaatctgaattatgtcatgttatgttatggtgtttaattttgttccctcttaacaaataattataatttataactatcgggttcttattgttgtctaggtggaagcttatccgtgcaaatattagggtccttttcttcttcttcttctaaatctggtgaagatgagaaacttgacatggcacagcactcagacaagcgtaaaggactttctgcttctccaattattgtcagttccaggaagaatgtttctgatttgttaaagtaggctaattcatctcaaatcttattgtaattttatatatagagttattacatctgtgtttattttgtatatagttgctggaggcatcacaagttttcagccttacatttatacttaaaatacataagcagttaagcacaactaggttgtataagagtgaaaagctgagaagaggttaggtatatatatagacgcacaacaacaattgtatgtcgtactaaatttaagctataagtggaatacatagattatgtttgtagctcaaacaaggggttctagccttaatatttgataatacaaacaaaaataatagaaatatgagcttaaaggataatgaaaatgacaatatatctatatcttctctctccatagatatttcacccgaatactcaataattatatttttaaaattataattaattaaatatatatatatttttttttaaaataactgactttttatttaaatatttaataagactctaattaataataaatataaataattttatttttatatttaagtctttattataaatattttaatagttaagtcatttaattatattataataaaattttattattttataaaaattaaatttctatcttttttaaaataaatttttaaataatctattgctaaaagattgtaatttagtaacatgttgaaaataatcaattaataattattagtaatttaattttaaattaattaattttagaaatttttacaataaaaatacaaaatgaaatttttattacataaatgcttacacatagttatctcaacatttttacattttctctttattttattacatatataccacatgcacactccccccatgcatatgacacgtgca

SEQ ID NO: 56165 - DNA, 1205 bp, Cannabis sativa
taaaaaaattaagtgatgtagttatatctaatatataaattttacgctaataattgcacatgcaaaatatggattgaacttttgacatgatacgaaatcgatacgagcccaaaagatacaagcacgattagacatgagaaatacaagcttccaagctccggagacacattttcgaaaaatcccaaaggcaacactataaaatattaaataaatttgtattgcaaatattttatatagttgttcgatgttaaatttacgtaggtctaactgtgaatttcatgtgtttataataatcaatttagaaaaattgtatctatattattctaattttttttcttcaaaaaatcctttcaaagtttaaattttattatttgtatatttcagtaatatcttttagtaagtatttatgtaaaaatctcaatttagaaagaaatatgcaatatataaaatattttaagtttctgtatccattaatatatatataaatatttatgtaaagaaaattacaaaagaatataaggtacatcctaaaatatttttttatctattttattagaattttagtaaatttatttcatttgactctaaaaatatttttctttgcgaaaattctataatgaacaattatttataacttgatattaccaattagttataattttatttatttatttatttgaatcatattaaatttatatcattatttgatataactatatatataattttaaaaagtggactaatattatttttaatagtatatctatattgttatttagtaatttattaatttttaatatttgttttgtcacgatttttaatatttgttctaaaataataattttttttatatattttaaaaataaaaatatattttcaattataataataccagtttgtttataatacagaatgaatacaaatatatatatataaagattacaaaaattggtcaacaccgcgcgaagcgcggctaagttctctagttatatgataatgacaagaatgtccttaaagatttagtacttgctatgttaggaatttgcccctgtccacttaacgtcaagtgacgaactcttttttgcaagtcaatggtatgactaccaacctccacattacgacatttgtcacccattatggattgagctaaatcatgaatcttgatatttccttcaaaatcttcctccatgtcttggaaaaatgat

SEQ ID NO: 56166 - DNA, 1070 bp, Cannabis sativa
  modified_base (498)..(498): a, c, t, g, unknown or other
ctcgtcaacccatctgcctttggtagcatctaacttcttcttgatagtatcctttaaggttttattaacaatttccacttatccattcgcttgaggcttggatactgacgaggagctcttgataattttgttcctctcgcagaattcaatgaacaagtcgccatcaaattgggttccattatcggatactatcttcatgggaattccaaacctacagacaacgttttgacaacaaagtcgagtactttcttgcaggttatggaaataaagggctcgacgttcgtccatttcgtgaagaagttgattgctactaccgcatacttagcgtctcctcgccaagtgggtaatgccccaattaagtcaattccccttatagaaattgggtaggcgagatcatcattcttaaatctgttggcggcacgcgaagtatatgtgaaaacctctgacacttatcaccttttttgacaaactcgtgggtgtccttattgatcgttggcnagtaatatccttgtctaatgatatatttagacagactttgccaacccacatgatccccacaaaagccttcatgaatctctctgatgatttcattcgcttttgcagggagaacacaccgaagtaggggcatcgagtacccccttctatatagtttgccttcaattattgtgtagcgaggccatgaatacaatagttttcgtgtctcatttttaacatttggaagttgcccatcgagtaagtaactgataataggagtcatccatgtaggagcgctatctatcatctcgacttcttccgttttacatatgcgtcgctcgcttagtatttcgaccgaaactaagttcaattcacccaagtcgttctacgaggccagtttcactaaagcatcggtgttggagttttgttctcttgtaatctgttcgattttaaagtaattgaatctttccaagttcttcctaacattctctaaattccttgccatttttaagcctttcgcctggtattcaccgaggacctggttcacaatcagctgcgaatcactatggcagtgaggtttttgactttcaatgcct

SEQ ID NO: 56167 - DNA, 645 bp, Cannabis sativa
tcagcctggaaccctggtcagttccttctttaatcagggaccctggccagcacatgctaatgccttgggaccctggccggtacacaacttaaatcccaaggtaatggcaagttttcgatcatcttttgactctagcaaggcctttacgatggccttataatcttgttcaaccctcgttcagtacttggttcccttaggaactttgtatggcacttcttagggtgattttatcttagtcaattaacaacttaagactcaatttccatctatgttcttgcacttggaactcgtacaatgctaattttcaactttttaaaatagaacttccaggctagtatctttaggtttagttaaccactatttcatctaaatcttgtcactttgtctagttgctcaccttcccttctcttttatatgtagatgaatctacgtgacttttagggaggggaaaatcgaatagacgaagattttctcagtctttctttcaagaccaccatccagctggttcttcgactagttcctcaagtgatctcgaggttagcagtgcttccccagagcctaaagtccagcatcactgctatttgaagcgaataggcaatgaattttactggagatttgtttggagttgaaccaagagtggaggcc

SEQ ID NO: 56168 - DNA, 683 bp, Cannabis sativa
attataaaatttaataatttcactacgataattgttgttgttgttgttgttgttttaattatgcatgtttcgtttttgcttgagcttgtgcctatgattttggcttggattgagcttgtgcctatgattttggcttggatttatgctgagattttggagtacaagaagacttctatctctcctaaagcatgagttcaacttttaaattatttagctatgtactataagtctatatatctctcattcaaatacattcaatattatctatctctggttgtacaattcaaagatgacaagccttataacgatcagaagataaataaaatacgagatgaatggggcaattttgtaaagtcttatatattgaaagaatgagtatacgattttttatattttgttatgatacatgtaggatataaaatttttaactatatgatcgttacttttggtgatatttagttttattgatatacttcatagttatatcaattttttattatgacatgtaggatacaatttttatgatggttactaatgttaaatatttgatgtactttttagttatatcaatttcttagttacatgaaaaatattatcattgttatattataaatgttattgttattcatataaatattcgttactacaaaacaagcctttagaggcgcttttttcagcataat

SEQ ID NO: 56169 - DNA, 2417 bp, Cannabis sativa
  modified_base (1102)..(1108): a, c, t, g, unknown or other
ttttaagaggaaaaactaaataaatatatatttagtattaaaatattgttattatattaataaaataataaaataacaattaatataaaattttgtgtaatttttagtattgtgattgaaattaaaaaaaaaaatagtgttgaaatagcattttttttttgtgtttatttaataccaaatttaagttttaccattggagataaccttagttacattttaaccgacatttcatagtaaaaaaatattgaacaaaggagacagtcaacaataataatgatttaaggaaaatttaaaacaacattaaaaaaattaagaatcacgattaaaaaatggtaatactttgagtttgagggagaaaaattataggcgggaaccattttgttttttattttttaaaattttacttaacaaaatcttgtagtttcttcataagttttgattaattaatcaaaaattgatttttaaaatatttgttcttttattcttcttagtatccaatcctaaatttaaaatcttgtattttttatttattcgaattaagtaatgtggaaaattttgacaaacatggttttttcttttctaaaaaaaagataaacatgatttagttattactactactctcatggaaacattaaaaaaaaaatgaatgcaatgtttcccacattcattctctattttggggtcttgctttggtgtactccatgtcctacctagagtgtttttggctattgggtcccaattaagacgagtaaatgggcaatgtcacactttttctttttcttttctctttttcaatatgcttctgtttttgtttttgtttctttcctttcttttcaatgatttaagaatcttttcttaatttcttttcaatgactaccattcccatgaatcaatgatgacttttatttatattttaaccttctaaaaatatatattatttatttgtgaaaaaaatatagtacacctaaagagatattttggtaaatcttctatctaattttatatctaatagagtttttttagtctatttttttttttataattgtgtacgttgtaattatttaaaaaaataaaaaattttataaatttttaattttttttnnnnnnntttataatataaaaaataatatttaaatatttttttacacacatgattgatttttcttatactcatagtaagcaactgtctgaactttattttcagtatataaaatatttaaaaatttctaaaaatttacaagatcataaaaaaatttagatgagaaaactctcatgatactaaaataaataggatggtctggtagactctctatttattttcgcatctaggagagctatttaattttttttatttatttatgaacatgtacattgtagttatttaggtcatttataatttcaaaaaaaaaaaaaattgaatagtttatagtgttgaaaataaaattaatttttcttgcacatgtgactatttttttaatacgtatggtaagtaattgtttgaactttactttcaaaacggtaaactattcaaaattttctgacaatttacaagtgatcttaaataagtacaatgtacattatcataggaaaaaaaatgaacaaaacaattctcttgaatgtcaaaagagactcctaactatttcttatgtaggtcattatcaatggcagaactcgaacttgaatgtaaggggccaagttttaaaatttagtatcaaataaaatttttataacgcatatttatattcaatattaaaatttaaaatgatttttttgtatgtaaaaaattatctatattatacaaatttttactctatattattcaaactggaaatattaatacacttctaatcaaagcacacgtttaattttaaatttttagtaaatatttaatacaacaaaaatatttatatgaataaaataatttttatatttaacaaaatttaatgcttaactaaaggagatcataaatctcaacttttattttaataatgaaagttatcaattatagtgaatgatgtagaaaaaaaaaatataacaataataggtgtactaacttattggtaaatgattttttcatttttacatttcaaagtaattatttttatatttttacgaaaattcacatagcaacctacatagcaaccaattgagcaacttaaatcacagtttaaatctacataacaactaccggaacaactcaaactgtaaaaataaaataaaaaataaaaaatagtataatgaatgattcctaaaaaaaacaattaataaacaattgtcttaaacaaattaattcctattttatttttattaaaatttaatatattttacttattattaatagaggctaaatatgtttatttattattaatattgctttatttatatgtgtattttactttataaatatttatttatat

SEQ ID NO: 56170 - DNA, 640 bp, Cannabis sativa
gaagcttgtttgattttgtgttttagagttagtttaagtttatgagagttgttttaagctgaattggtaaggttttggtgtgggttgggcaaatttaaggttagagaactcaacttggatctttaatggtgttttggttttctgagtaaattgttgaggtttgttgcttgttttagattatttaaggtatatacaggagttctggagattattggagagtttgggattgttttgaggtgcttgggacatttttggggttccctgcattgaattggaattctggttcagggggcctgtatcaaccggtccccaagaaatcccaccgaacccaaattccagttggggattcagtctaccagttggatcagttttgccaaccctaattttcttgtttttgtgatactgccatggaattcatcgatagggaaatctttagttttgattttaagtcctcgataagtgttttagcgtgtctctcataagaattatggatattgtgatatagggccttgtaaagcgtcgagctactgttctactcgggctgaccggcacacctgagcatgaagcaaggtaagattagcataaagtataaatgtgaatgaatgaatgcgtgttattaattgtttacactactaatact

SEQ ID NO: 56171 - DNA, 1238 bp, Cannabis sativa
aaaaagaacttttacaaaatgaggcataaatgacaagcctccagcaagactcctttccgtttagcaaattgaccacaaccttagaattgctctcgttcatgactcagttagtaatgtagtttttggatgtgctatcccaatgattgacaccatggattcgactatggctgaagccttagcttagtggtgttctcaagtgaagatgcccattgagaaaattgagacaaattctaaaagtagtttattggttaaattctttctatacaaatttatctactcttttggatgttatcaactgtatcaaaacttttttatcttatacccttgatgaagctgtcaatcatattactcgagatgtaaatgttagagcacacaatgtaggaaagatgcattaaggctagataaacaaaaagttcagtttagaacggtaacattccaaattttcaagaacagagagcttaatgaattctcaatatatgttacacattttcaataaaaaaaaaagaaagaaaaagaaaaagcaattaggaaaaaaaaagaaattatttaacaaatagtataattcaagtagtattgctataaatatttttaatataaaatattaagcttttaatataaaatattaagtgataacttaattagcaaatgaaacatagttgctaaaaacaataaagaaaaatgaagcatagtacaaccgagtacgaccgcttcttgaacaggtcaaccagttattaaatttgtttattttattgcaaaaagagtcaagagctgtttagttgatgcctaatcgaaagagcaccccaataaaaacactttaaattacactaaaattaaaatgtattagtaatgtatttttcttcctattagtattagtgtaatataatcttgaatcttacttatttcaatatagttgctattataaaaaatgactaattagtagtaatgtactatctcatagtgatgttgagtatatttagtgtcaagtaacaatatttttctttaaacgtagctatacattatttttcattatatttgttttttttattcttgatcttttctttctttctcatattttttatttaaataacaaatatataaaaatataatatgtaaatactatttaaaaatttaatgcaaggaaagaaaataaaattatcaaatatactttgaataattgagtaccacttgttagtaaataattagtaggatataagaacccttacaaaaaaaaaaaaaaa

SEQ ID NO: 56172 - DNA, 796 bp, Cannabis sativa
atatttagagtaatgattttgatgatcatctaatggacttgcttgatgaagcacaagagaaatttctttatgatcctaaaaattttaataatttgctaagtgatgcaaataaaaatttggaaaataaaaatcctaattaaccctaaaaatataataccactttcattactttctactatgtctagagatgcacattttccccatggggatgggccctcgcagggacccgcccttaatggggcggggattccccgtctaaatggggaacggggtggggacggaaatcaaattttgtccccgaatattaaacggggcgggaacggggatgacactccctgccccgacggggacccgtttaatttattaattatttttttagtaatattttatatatgcgtttgtatttttttagtatattgaatagtaaataatatgtaatattttatcttttatgtaatttaatagttttatacatttaaatttttataataaactttatttctacaatagaagattccctgcctcgtaggagatttcccgccccatccccgatggggaataagcgacgatgggaattaaaattcttaacggggatggggacggggagagcactccccgctaattctccgccccgtgtgcatccctaactatagctcatttgactaaacatgtactttttttaatagctaaaagtataaaaagtaattttttttttatttatttgttatgtttgaataattattatataatttattttaattgaaaagttctcttcaaagcgctaggatattattaa

SEQ ID NO: 56173 - DNA, 1088 bp, Cannabis sativa
gatccgatccagaaaaaaaattaggcggggcagaacggatctaatccaagatccaataagtactcgaatgtttcagatcagaggtgatccgtcggatcggaactccaacccgctccaattaaatggatctttttgacatgcctaaagagaagagctcaaaatcttcttagatttgatacattttactaaagagaatatagagagaaagagaatgaatttcttattgatttgaaaaagaattacaaataaatgataagcatgatcaagcttacatagaactagttgaacacttaggtagcgtttggttagagataataaaatgaaaagaaaacaatcttcatttcattcttttgtttagttacatattaaagtacttgaatatcatttcaatggaatgacatttttatcattttttttgcattttaaattttatattcttatttccgttctctttatttcttccaaccaaacaattacattactttgattgtcataagagaaataataactaactctaaacacactcaactaactaattttcacaaagctatatatatctaatagatgggatgataaatatacatagatatattatgtatattaatatatatatatatagacataattggagtctcccatgcatcattaacatattctatactttttaggagtactatgattaataaacaaataattaatcaatgtaatcatatgttttagattacattactaatctctcattaattatacaataatataatttttacgcattgtattatacaacatacactcactcattatatatatttggaatttatagaagctgtattttcttttacgtgagaaattagggcaccatcttattcttcttcttcttcttctttttttttttttgcaatatatatatgggtgataaaactagtttaattttagagttttgactagttcacgtattaattttcatgctatatatagtagttgaattattctctcttgatcccccaattcacatgggtgctatagaatatctataactataatataggtataaagttatcgatacatatacaaaatgttatatatatata

SEQ ID NO: 56174 - DNA, 777 bp, Cannabis sativa
tttctgggtgcaggaagtacaaatcaagtgaagaaattgtttctcttactttatcttagcaataattttcttgtaatttgaacaaactatggttgttatgttgtctaacttactgtagaaaactgcagcatgctaatggtgttgcgaaaaataaagcatatgatctgctggaacaaaaacatcacaaaagggtaaagtacatttttcagagaaaagttgaagagttttcaatcatacagtctcatgttttcatgatgtccttgtggaaggctgacttaataatactacctacgaatgatatctttctgttttattattttctgcaggcattgcttgagctcttagatgaggttgaagatgtcatatctgttgaagattcagcatctgacaaggcagatgggtttcgatgccatgttgtagatggcagtagtgatgtggttcctgtcaaagtggatcttccaaataaaggggttaaaacacatcttttggatgttcaggaggttccagaaccctcttccaattgtaattttcttgtattagaggtatttggttaaacctttctagttcaactgctcgtgaaagagaaatagtcttatcagtttaatacgcagcaacttatctcttcctcaggtatccgagaagcgtggatctgttaactcatctaatgctcaatcaccttataaggtttctagtaagcatttttcatgaatttacttcttacttcaaatttataagatatgaaattgtatattactattggttctcaggttctgcgct

SEQ ID NO: 56175 - DNA, 654 bp, Cannabis sativa
cgcattaatttaaattataccattacgtccactaataccaatatacaaaaactaatacatacccatccttctttactttatatttactcacgtatcacgtatcacatttttttttttatttattttttctttctttctttgttatctagccattaattatattagttttttagttttttattctattaaaaaaattataatacacggctattaggtttatttttttagccccacttttgaatttctctctttttttaatttttatttttatttttctttcttttgtttatttgtgtcagaaacttaagtttttttttttaatctttaccatacttttgaaacaaattgtagttgcatcataattatttagaattaagaataatatcattataatttactttttaatgtgatctatttcaatgtgcgagaaacatatgatttttatccgttatcagataagatatttgaaatgaaaagcaacactatagtttatattatattttgttaacaaaagaaatatattaaaatttagtaggtgttattaaagaaaacaacacttaaagactagttggttttgttttaataaagttcattttgagataatattaatttatatatattatttatattatctatttcgattagttaactttt

SEQ ID NO: 56176 - DNA, 1058 bp, Cannabis sativa
cggtggagccacaataggttcaagcaagagaggactatgatcagaagatgaaaattcaaggttatgaagaagagcagaagtaaaaacctgggcccaactaggagtgaacaatgctctgtcaagcttgctttcgatccatgatggtgagcctctccccctttcccacgtgaattgataacccaacatctccatgtctgtcagattgctgtccaacaatgcttgtgcgaagccctccatcaagttccttggatacaaatgaccaccacgttgctcttttaagtggagcaaattgttcatatctcccattacacaccagggaaggtccgaagttgaagaaagatccctgagaagattccatgttttccaccttaggcttcgatcgggttcaccgtataacccagtgaaacgccaagccgcctcaccctccctttgaatctcaacatcaatatgattttttgagtagcccactacccgaccctcactctgccaacgccacaaaaaggccagcccaccacttctcccttgggcttctacaataaataatccttcaaagcccaaacaaagcttaatccattccattctatttttagcacatttggtttcacataaaaacacaaaattgggtttcttttgagaaataacctcttttaggaattgaacccgcgggttcccaagcccacagcaattccaacttaggaaactcataatgcttggcgggtctggataccagaacccgccccattgaagttttttgtcaccatctcatcctcacaacccatggactcatcagatataataatcggcccaacattcaaattatcatcctcaggcccatctttcaaagattcaccattggcccttcttctcttattatcaataaccacaattgcattattttgtacgttaccagctggccccacatcagagtttcccatgtttgactttccaagattatctttgtttctaataactggaaagatattctccttaactgtcccactaaaagttgaaggattgactctaccaccctcgattatgggagagttattgataattcc

SEQ ID NO: 56177 - DNA, 3520 bp, Cannabis sativa
aaagttttaaaaagtattaattctcctgctttttttttttttttttttgtagatctgttttatggtttttagtgttagatgcatggcatatttgtgggacttgctctataaatgtgaggaagacgcactcgaaatagcaattattacagttgctatcacatagaaaaataagacaaattttcctccttaagtcactattaacccccctcgatttatgccacataaattttttcgtgttacaaaaactatgttaagcatttcaactacaggtgataccctattctataacacttcgtctaatcatgggaagaatcaataattcaaggaaaaaaaaaacttgtcttaaaaaagtaaataataacatgggaattgagtattacctaaccaacaatatttgcaatatctgaaatgtaggtttgaacttctccagcagtcatggcagcgtacactagtctctgtaggttgatttgaagacaaagttctcttccaaatagcaaagtactcaaggataagaatcgaagcaaatacaaagacaaatacacgccataatttacgtataacactcctattagaaagaacacaagcaaccagcaatacgatgtatagcatagagatgacattcaacaaagcaaagcttgcaagaagcaatgcaatcatgtttatctcaagaccaaagagattaaacatattctctaaccagaattttaaatatatttttaaaagaatcttttgtgcttcaaatctttcctttctcaaggatagtattcgcttcttgttccacttatgactttcactggtgcttccccaaatgtagccaaatgagtatcttctgctgccactaccctcggagctccgtgctttagaggacacattattaggtgattcagacaaaccagaggaaaatggccatggaatgcttgtcacacgaacttgttctgcaggcaatcctccagaatccaatgcggtattttcctcaccagaaatggaaacactactgataccatcttctcctgaaagaaacaatggacaaggttcttcccacttccctttattcaaaatactagcaggcatattgtccagccaacggaaaacattatattgaagggtacatgcagcaataaccagcacttttcctctcaagcctgattctagaccccaaaaaccatgcttaaatacacgaaaacccaaaaatatagacagatttgagtgcttttgtccagggaacatccccgccaggctaccccacatctgaaaaagatattcagccgttactagaaatcctgtgtaaaccaagaatgatttgggtgggaagcgtgaagccttaggtaaagttgaacaaaggacaagaccaaaaagatatagaaggccaaatgcactaattggtgatatagatgcatagaacaatgccataagcaaaatcttgtggctatgccaaatgaaaaatcgtcgaacgagcccaagtaatccgaattccaacgtatcagaatcatccaacctgttatgcttactctgtctcctctcatagctataaagctgcatgacaatcaagatagcaagagattcccaaacattctccaatgatgaagcgtcaatgttatagcctaggtagaaattaaggtctataaatctagacaaccaaacctcaaagctgggaaagctgctcaaactataaataaagataaacaccatgattgcatatgcttttaatggaaaccaaaggcgtctttttgttctctcaactagttgtcttccgattatccaaacaaggaggaggaatatgtacccaaatgatatataattaggcctaacaaggtacactgtgagaagaatagtcagaaaggcaatgtaggttccaaatgatcggtacactgagagaaacttctgcccaattgcaccaaggaatgatgctattcttctttctagaagaaaattaaataactgcttgttagcgtaatagtagcaacaaaaataagacagtagcagaaactcagatataattatactagctgtctacaatttttgagtttagtaaataagcatatattaattaattaatattacaaaagtttctttagtaaacagcatcattctctaaacagcatcatatcatcttaacaacaaaaagcttaaggtataaggctatcaagggttcattaaagtgttctttaccaaaaataagtaataactatatttaattcattccagagtatgtaggagatagttataaagccagaataagtgatcagcagattttgctctcttgaatctctgagcccaataatttattataatgtgctaatttgacatcttaattaaactataatttgtagagaagcattaagccaaatatgaaaactataccgtatgaaggattatcacgtgtatgtacagtggtaggtgaggcatacactgacaacaatacagatttgttcaggccagcttttaaaatactaaatccaataggagggcttgaggtattctgcactattgccgagaaagaaaatagcatatcaaaaccatgattgtgaactgcacagaagcaaccgagtaaagctatttccaaaaaatcccacgaactttcaggtttcaagagacctgcagcggtagggaaaaaaaagttgtgtaagttattttcagcttttctttgtttgtgcagtctgacattaaagagcattcatatacataaagacactgtttgtgtaagaacattcatataattttccaaagtaagtcatacctaactgtgagaggacttccatacttaaagaacctttttgttctaaagtactggagatcaaattaatctgaagaatgtataacagtgcaaagtgagcctcgcataaaagaatcaaacactggcgaatccttccactgatgttgtggctcaagagatatattaaaaagaagatcactgaaacaaggttcaaaagaacataaaataataagcaaactggaataaactttaaatcatattataagtacggattcaaagtgatgtactatagtatataagaacaaaatgaatagccaagaggagctatggcctagtatagtttacagcaaaggttatataatcatgataataacatacaatatacagcgtggataaaaccaggcttcaaggcaatgagaaatatcagtgccagcataatagcacgagagcttttgcgaagtccccatgcaattgtggccacaatcaataccttggtctcttcctgccctgttaatttgtgcacacatatatcaacacaaaaacatgataaaaagatttgcccaaacacaatgcataatattaacaaggattaaaaaaggtattgaaaacttaaatgtctagctataattcaaaaatagaaaatataattaaatgaaacattgacgttcaaggtaacaacaagtaacagcatattataatgatgagtttccaagcctatacacagcacaattttatacatgaaaatctagcaaaaagatgcatagctcctaattatttaaaaaaaattgctaataaataccactacct

SEQ ID NO: 56178 - DNA, 1545 bp, Cannabis sativa
attagaaacaccaatacaaccctaaaattctctcaaaaacacaccacaaagcaatctaatccatcctactaaccaattcaagcataaaataacttatttgaacataatctaagcaacatgcattcaagaatatacaccatggaaaaatacatatcttaagcttcactaaatgcagaattcaacaaagaaaaaatcaagatgttaccccaatatgcaagcctccaaagtgccaacaagaatcacttcaagatcacctccaatttcaagtaattttctcaaatcaaaagcttcgaagagatgagtaaaagagagggggagagggttcggccaagtgcaaggaaaaccataaatgaatttctttctattttttccaaaaaaaatctcattttgttgaaagtaaaacaaatggtcaaaaatacaaaaatgcccctatggccattatatcacataagcataactcaagggcaaatatgtcattctatcacattccacaccaataatttttcagattattcaatcattaataaaattccaaaataaaaccctaaaaatgtatttcggccccgaacccagttcggtccaaaatacctgattgtgagtataccacgccgacttgccaaaaaacacatgtacaagtataaagcaagtatactatatattaatatagttcatgagcacgctataacattaaaattgaatttttacacttctcgggtcaaaattacgaaaatacccctggctcaccaacggggtcttaacatgtcatttatgagtataattgacacatattaaattatataataatatattttcacaataatacacatttaactagttagggttcgctaatccgttttcttaatcttagggtattacatgtcgtgacccatatgccctctactagggttaggcaagccacacaaatatgccaacagcaaccccagccaagagaaagcaaaactgaatcctaggcgactaggcgtaagtgttatacctgaaattcagttggaggacacgtgtcaagataaagtgaatgtgaatcagtgcaaaatctttttatggaataactcattaattacgtaagtatgagagtatatttgcaacccgctgactataaggtcttaggcgaggaattaatgtacaaactggcacttagtgtattaacgagaaataatatgttgctaaaggtaaatagcgaggtaccaaagaagagtgacacataccttagcttgcaataagtaaaataagtgtaaaagtcggatcggctcgaagaacaagtatgcgagatgaccatctcgctatgaggagaattcctatagtttcatccaacacacaggagcgaggctcataaccctggcaagtcactagatttctttatacctgcgatcgacgtaagacatacattgtcgaccttggaaagaagaatggtcccagttcactattgggatcactatatgtaatcagatcccacgattttagggataatggctataaacatattctggtcaactttgtaattaactacccactatgtaattataaata

SEQ ID NO: 56179 - DNA, 1451 bp, Cannabis sativa
gcatcattctctaacatctctgaagaattatatatggtaataatgctagctagtgttaatttttatttttgaaaatgtagtgttattttatttatttatttttttttacgaagtgattattactcattaatttacgatgcaaacgtccgccaccgacactcgaacttcctcgaaccaaaatagcttatcgtctaaccgtagagcatattttaacaagccatgtgggccgctaaaatctcaaaacgagccagaatagatcatcgtctaaccgtagtgttaattaattatatgtattttgaaacttaagttgtagtcagctagagtaagctttactaagaaacgacaattatttcaatgcatgtttgaagtagagagaggggaagggaattcaacatgttgggtttgaatatttgggagaagcagctgggaagttcaagtaaagaacatgcatatgttatatatattagcacaaggtttgaagtttgaatgggttggtggtggtcttctctctcaccaactaaaatagtagatatattaattaattccaacacacgcaaccttttatggcgacttgagttagtctcgtgagtgtaactttttataaaaaatattagtcttactagctctatatttaaatttaaaatttacatgttatataaaaacaattcaaattaactttaaataataaaaattaaaaattaataaattttttaattattaatatcattttattttttttaaattaatatatcattaaatattattataatatgtaaaaattattttaattgtaaacaaacagttctatcataagagtatacaccttacatcataataactacaagatttaaaattaatggtaaaaaaaatcccctatcggtaagaaacttttgataggtcctaccatattcttgttctatatgtttgtctaacgcccaataatgtcacattatcatcccgaagtggattttttttctactaaaaatataaactcaccgatagcaattttttttttttttttgaaacaacgatagcagtttacaaatacaataatataacaatacttaaaactaaataaattatattttaattgaaaagttatattttaaataataactaaatagagttatataagagaaaaaattaaaacacaaaaatatatcaacttaacaacaataacaataaacaatctttaaaattacataataataaaaatatttttaagtgaatataatatttatatatgtattaaatttataataaaattaataattttatataaataaatttataaattatatattttattaatatataattatttttacatattaatatagtcttttaatatgagactaaaaaaatatatataataattataatttaaaaattattcttaaataaaatatttttaaataaaaaattggtagataatgttatatttctagaag

SEQ ID NO: 56180 - DNA, 768 bp, Cannabis sativa
  modified_base (572)..(573): a, c, t, g, unknown or other
agtgttgaatgaccactttattttccttaacacgttctctaatagctaagtacttaatgtcgatgtgcttgcttcgacgtccacttttgttcttcttagccataaaaacagcaactgaattgtcacagaacatttttaatggccttgctatggaatcaacaactctaaagcctgaaatgaaactctttagccatacaccatgtgatgtagcctcaaaataagaaatgaattcggcctccgtagtagaagtagcagtcaaaatttgtttgttactcctccaggacacagctccaccagtaaacataaatacgtaaccagatgttaatttacgtgaatcgatacaaccaataaaatctaaatctgagtagccaactacttcttgattgtcaatttgtttgaacatcagtttgtaatccttagtaccctgaacgtacatcattaccttctatgcagctttctaatggtctatcccctggttactctaaaatcttcctaacactctgacagaatacgcaatgtcggtcttgtgcacacctgagcatacattaggcttctgacaacagaagcataannaatgtttttcatttcttctctttcaaaatcattctttgcacactggctcaaattcaatttatcacccttcacaattggagcaacgctcagtgaacaatctttcatccgaaatctttctaaaactttcttgatgtaggcttcttgagataaacctaagatacctcggtatctatctctatgaatcttaattcctat

SEQ ID NO: 56181 - DNA, 930 bp, Cannabis sativa
  modified_base (892)..(894): a, c, t, g, unknown or other
atcaaagcttgttctgaatgagaattgtaatagcccatcctctcgttctttccagctccatccagagatggaagcccaagcattgttcaatgaaccctgtatcgcctttctgcccagtctagtgtgacaaaagagtttccccagaataaccttgcaaggctcattcgggggatccacttcaccgggatgaagatcacaagtgatgtcctccacactaacctgtacagactcctcaaataaatcattaagtgatgtatcagccataactcgatcaaagaagatgaaatggaaccttgcatcctgtagtcttgtgaacaaactaaatgagacaatggtaaactcctctatgtagaagcagtttccatacacttccaccggaagttagcacattacaacttagtgcgcttcacttacaaacataaatatattgacataaaataacattaattttagctaattaatcaggaattgcatatcccattttcctgtgcatgacttttcctccataattaagttccagtatggaaactccaaagttgttttcacatttcttcgtggatatcgatatatgcctagcaccatttgaagtgtcatataactatcgataaaattaagtatcgagtttcacacaatttaatataataattcttatagaatactgctattcatacttaaagcgtcactttatattagtgctagacagcactgatgtctaatagcaatactatttcaaagtaacaaacaatgaatacaagtaaagaatttattttagattcaaccatggaccattattagctaagctttctttaagaaaaactcttttgttgtacttttatttatgggcttttttcataaatgtacaacaaaaacataattacaaaaaatgtgcaannnaaaattattttaaaaacttatacattttgaaaactt

SEQ ID NO: 56182 - DNA, 1182 bp, Cannabis sativa
taataatcacatatatattttattatattatatattaatcgatggagggtttttcttataatacaaaaaacaaacaatctacgaatttaaatatatacgtacggcgaagatctgtatgtacgtacgtacatatatatatacataacatgatgatgtatacgtgcatttttctatatacatatataattggatatatatgacaacaagttaacattatatattacataagttttatcctatactttaatgaaatattacaaaaaaaaaaaaaaaaaaaatctaattaagtaatccatttacatgcaacgtacaagataactttaatttcttaaatatactttagaataattttaattatatcctagctagtaattaattaacataacaaaactactattttttattaatattatatattctttaaaaacagaaaatttgtttcaataagtaaccctaaagtatattataattaatatatatatatatatgaaagaagttgtgatatttttttttttttgtaacaaaagaagttttgatattagttacaccgtatatatgtataatctgatatttatatttatttttaattgatagattattattaaaacaattataattaatttagaaatattgcatatatatatatatatgtaattaatcatctatatacacacataaattaataaacacaaactcagtacactaattagaaatatcatttcaacaaacctcaattacatagtcatacacacaaacgaaaagctatccaagtatatatatatatatgtacaatttaggaaaattttataaaacgagtgtggatacacgttttgacatttagaaaaatttgttagtttatttttttttttatggttgtgtatgtagttatttaaaatatttaataaaattttaaaaaatataaggttcaaacaatttatttgcatatataattttttttttattttatatgcgtgtgaaataaattattaaataaatactgctttttatattataaattattccgtaaaaagttataagatatttgaaatagctataacgtgtacacgactataaaataatttgattaattttttttcttaaatgccataacagtaaaagatgtataagtgcacttttcggatgcattatcctcatatcattattatatactcatttatataa

SEQ ID NO: 56183 - DNA, 1697 bp, Cannabis sativa
  modified_base (366)..(368): a, c, t, g, unknown or other
aagtacaaagtaattgacgtaaacaaaacattgactccctctaataattttaccgcaagctttagtactcttatttgctgaatgaatctccttaagagatcaaggtttaaactcccttaaaagttaaaattactttatgaatgcttgcttcctcctgattcaagatttatagaaatcttctcccgaagatagcagtgctcacttcctctcgaagatagtagtgcttgcttcctcccgatgcaagacttgtagaaatcttctcccaaagatagcagtacttgcttcctcctgaagcaagacttgtagaaatcttctcccgaagataggggtgcttgctttttcctcagggccggccctaggcatagnnnggctaggcccgtgcctagggcccacactttttgggggcctaaaataaaaaaaaaaaagaagttttaattattaaatttttatttaagtaaaattaaatatattataagtaataaatattcataccttaattagttggttatggtgtatcatatattacccagggttcaaatcccatgacactcatgtttaatattatatatatatatttgagagtgggggtccaaaaatttgattcgccttagactcatatattctcagggttggccctgtttctcctgaaataagacctataaaaatcttatgttgaagatatcggtgcttgcttcctcctaaagcaagacttggataaaccttctctcgaaagttttatgtttttcactttggaatttaattcacataaaagtaacgcaaaagacacacaaactcactaaggaatagcagaacgactatcctttacaaaagaaacactctcttctaaaaatataagaaatcaagaagttaaagagtttaaccatttgctggtggtttatgtcatatttatagtaataaatgacactcaaaactgagctcaaagtctaaatacaaaaagaaaatattaattagttttcttgtaaaaactcatcaaatgataaaattctgtctgaacagatatagaaagtgtgtagacgaaatcctgaactgtctagcattgtgaatctagactccatctattgacgctaaaaagtggtcaacaccagctcactagattggcgagatgaataataagtttaagtaaataatttagagagacacacaaaatttatagtagttcactcctcatgtcgtgatggtaatagagctatgtctacttcgagttttttatttctcacgagatggtgttatagaaaaaggctaagtgtttaaactctagtttccagagaaggaaactagagagagatgttttactttgtgggtagttttctgaatgtgaagaatgaactatgggagctctccttttataagggaaggaggcccaaaaaaaggaaaaaaatacaaataaaatatttttgaccgtagatgatgatctaacggtaaaaattagtatatgaaagtgatagtcatttttcggagcctggtgggacccgttgtgagtaatcagagcttattttcgtaattcttttggggtgaaatttgagattgatagcttcagaattttgatcaagtgtgagatattaattgatagagcattgaactagcttcaaagtttaagttgaatcgcatcaattggattaatattgagtgagttatgaccgttttactaaaggcagttcatgaccaagtgcccaagt

SEQ ID NO: 56184 - DNA, 1027 bp, Cannabis sativa
  modified_base (993)..(993): a, c, t, g, unknown or other
attatttttgtattgggatatgtgcatatattgatattatatatttgaaatgaataaaatataataaagagtagagtttttgtgatgtatttaaaaaaaaaaatgatgtatggtgtaatataaaagtatgctgtaaaataaagaaaatagattattggactattagtgatgtattttgatgaatagggtagaaaagttgttccttttattttatcacatttagcaaataaatttagataatttctattataaagagattgttgtgagtgctctgtatataataactctagctactctctttatgttgcatgtttgtaagactgacaagatatatattttttattattttatatgtttatagtaattattttatcatgctttctggtagggatggatagaatctaatacaatcaaattgaaccgaactgaagtaatctaatctaacccaattacaaaaaattagatatcaaattataattgaattagattggatgttaaaagttgtaatctaattggatttgattaattattggatgtcaatctcaaaatctaattaaaaattaatttagcctaattatatttaatatatactacaaaattatctatatttatttatataaaaagaatattaaaaaataaaaatatatattttttagttatatttatattgactatttttttatgaatttgtaatacttggttgttttattttttttcacgatattttattttatcctttttataagtattttattttactacttgataatgttgttatagtcttttcaaacttatagttgcattaaatttatggagtattaaacttgaaattttatttgttataattagcaattaaaattaacaattaacattcaaaactgtagtaaacttatttgaatagaatcgaaatctattctatcaaaaatagaacatgatagatcaaaaatatactgtagaaatgacacataatattttagagtaatttgcggcatnaatacctaagttttatgccgagtagcagataaat

SEQ ID NO: 56185 - DNA, 868 bp, Cannabis sativa
agttttgttttaaaaatatgatgacgctatctgtgtggagaaaaatgcgaaatttacactggtcataagaagctaagatatttcttcactcataaagatttaaatatgaggcaaagacggtagttgaaattggttaaagagtataattgtgagattctgtatcattctgggaaagtcaatgtagtggcggatgctttgagcgaaaaaggtctcacgtaggttttcaacatcgtgatgatagctcctcagctagctttgaaaatggttaaggacgaaattgaatttatggtaggaaagttacacaatttgacacttcaatcagatttgttaaaaagaatcaaaagggcacagttagatatcccgagcaaggaaaaattcaagatcaggtatttgccggtcggcctaaggacttttctatctcgaataaccaaatgttacttttcaaagcttgggtctatattctagataatagcgagcttaaaaaggaaaatccttgacgaagctcacactataccttattcattgcactcgaaaaccatcaaaggtatcaggatttgaaaccctattattagagatatgggatgatgaaagatgtaataaattatatgattaaatatttagcatgtcagcaaatcaaagctgaatgtcagaggccagcaaggttactgcaatcattaaccctacccaagtggaaatatgaggatattgtaatggatttcgtaattgggttgccttgaactatgagaatgtatgacttagtatgtgtcatagtgcactattttatggagtcaccacattttctgccagtaaagactacctatacaataggatttgtatgcagagctatttatacacgagatagttcatc

SEQ ID NO: 56186 - DNA, 1252 bp, Cannabis sativa
tgggtacatcaagatgattatttagaagttcaacatggaagatgcaaagagtacatccattctgttaggggatcagtttgtttcgtcaaatgtacaatgtcctaacaataggaaagagaaagaagaggtgaaggatgtaccttatgcaatggttctaggatgcataatgtacgtgatggtgagcacgagagcagacatagctcacgccttaagcatcctaagctggctcatgtccaatccaggcatggaacattagacagcccttaaatggttattgggatatgtgaagggcacttggaattatggtctgaccaatgaaaaaccaaaaggagaattagaattgaaagggttcttggatgtagactacgcctcgaatagagataccaaaaaattaaccacttcttacgttttcttgaccaactagaattgtatatgtgtgaaggctcaattacagtgtgtggttactctttccaccacggaagcggaattcatcgcgactacggaagcattcaaggaagctttatgggttaaaacaaatcaaaagaggagtgattgtttattcagatagccactcttccatccacctttgtaaaaatctttatcatgaaaagagaaaacatatagatattagactctaatggattagagagaagatagaagaaagactggttgatttagagaaggtcagaatagaacatactcttattgatattggactaaggtcttaaccttaaacaagttctagcattgcttgaaattgatcaatctcagaagttagtatactgagattaatggaacaccaaccaatgatggctacattctttcttcattatcttcattcttttaatttgaagtaactagttgaatttgtcgtatagtttttccaaataaaaagatctccgcaaacatcatttctagatatttgtttactcacagttgccagtcccggaaggagtcttgtggaatgatattcgggtctggaagggagttctcgaatgactacaatgtccactccgggtccaatgttcaggaaacaaacctcactccgggatggagttctagttggccagttgtccctccggtagttccagatagtcgactccaggaggctctatcatatctagatgcatcttcagcaagtttccttggtctgtgagtaaggaagctcatatatgttctcggaggccctgattctaaagctaacatggagacatgactcaaagaggaattggttaagttagttatttctaac

SEQ ID NO: 56187 - DNA, 1116 bp, Cannabis sativa
attattgttgatgaggcacgagatgagtctaagagggagcaaatggctataatcttaaggtttgttgatgatgatggttttatacaagaacgatttttttatcttgtacattttagagatacaattggattgactttaaagaatgaaataactagagttatttctcaccattgtcttgatattcaaaatattcgtggacaaggatatgattgtgctagcaatatgcgtggtgaatggaaaggtttgcaagcattatttcttaaagattgcccatatggatactatgttcattgctttgctcaccgattacaattagtattagttgctgcatctagagaggtactttatgtgcatgaattcttttcaaatttgaattttgttatcaatgtcgtgggggcttcatgtaaacgtcatgatgaactacaagctgctcaagcaacacaaattgcacatatgatagttattgatgaactcgaaagtggaagaggagcaaatcaaattggtacaatcaaaccagctagtgatactcattggggctctcatttttcttctatttgtagtctgcaaaatatgtttggagccacttgctcagtgcttgaaaacataataaaggaaggatctaattaccatcaacgctgagatgcaaatgctgcttataaaatgattacatcatttgaatttatattgatattgcacttaatgaaggaaatcatgggtattactgatattctttgtcaagttttgcagcaaaaatcttaagacatattgaatgccatgaatatggtatctactacaaaaaatcttatccaagaactaagaaataaaggttgggaaaatttgcttaaaaatgttgtctctttctccaagaaattttacattgacattctaaattttggctctcgttatgtccaaagacgtggtcgtcatcaacgtgatcacattacaatagagcatcattatcattttgatatatttaatgctaacattgactttcagatacaagagcttgacaggtttggtgaaggagcaacaaagcttttaactcttacctcagctttggatccaaaggatgcttttaaatctttcaatattgatgatatatgttgtcttgcagaa

SEQ ID NO: 56188 - DNA, 912 bp, Cannabis sativa
acccccatatctttgagagaaaaatagcattgagatggctaataagttgctgaataagagtagtattaggccctgtaatgagaatatcatctacatatataagtagaatgagttgactagaaccagattcatgtaagaacaatgatgtatcagcccttgaagccttaaatccctaactgaataaagtggttttgagtttgtcattccaagctcttggtacctgcttcaatccatagattgctttgttcaatttacatacatgattaggatattgatggtcttcaaatcctttaggttgagtcatgtaagttgtctcactaagttctccataaagaaaggcattggagacatcaagttgccttacttcccaattatatgtaactgctaaggtgagaaccaatctaacagtgactggtttcaccacaggactaaaggtgtcctcaaaatcaattcctggctactgtaagtattcacgggaaacaagtctggatttgcatttatccaaagtcccatctgcattcaatttcactctatacacccatcagacatatctatcaaaatcatgtgaggttcatagtgcaataaggtccaggttccttgagctttgagtgcacgaatttccgtagacattgaaccattccaaactggatctgtaaaagcagacttcactaattttgggtctctaggcaacaaatattctggtagtctatgtttagtggcaagataagctttaggcttgtagatacctctcatagatcgagtgatcatggaatgagtgcgagaaacattaccatctgcattagatcgagcaatagtactgtcaggattagtaactggtgcagaaggttgctcagatgtagctgctgtagcttcaggacttatatcaaacaaattgaattttatggctgagga

SEQ ID NO: 56189 - DNA, 1799 bp, Cannabis sativa
  modified_base (304)..(313): a, c, t, g, unknown or other
  modified_base (415)..(415): a, c, t, g, unknown or other
  modified_base (1425)..(1426): a, c, t, g, unknown or other
ataaatattaaattaaaagttatatttaaagttgtctaaattagtaattttaattaaataaatatattaatattaaaataaatagactaaaataaacatcaaatgaaaatagactctcttaaaataatgagctttaggtataaggatattcgatgttcattcattagcaatttagcgccgtagaatcttaaaagataagtattattgtatgtactcttttattcttagtaacaatcacactaatagtgactgctgagagtagatcttacaaagtatgaaataatggtagaagctcataagatannnnnnnnnngactctcgcctaaatgggacaatatcggattcctgtcttaatcgaataaaaggttgctagaatagtgaccaatttagataagctgactactctattcaatgnatgatatctttgactcttgcctaaatgggacactgtatcagtttgttgaaaaccttagaattatttaggatgtgtttatttttgtactttcacatgtctttattacgtgctaaatgtatgataatttctgaattatgtttaaatttatattgtaccttcaatttgttttctattattaattgtaatataaattttgagtcttcattgttggtctaacttaatttgttgttttaatgggacaaatcctaaaagattgttatccgttagacaaatataaaagtgttagatcttgacagataaatatttgtaaatgcaacatttagttaactcatccaaagatgaaaacttagactagtgttcacaatatgaaacaatatagaagtttgtacaataagaataactttgactcttgcctaaataagacatcgttgattcttatttttatcgaaattattttttatttttcctctgagcttttctattatgaaattgcttagatagtctatcattggattgatggtttatagtaaatcatatgcttatgatgtcattctattttctcctataaaattgaatgacgtagatgactatattctagacattctattccgaaatgatataaatcctcaatcttaaaaaatctcctacttatatatgtttattaaagacaacttagtcttagagttaaaatattagtggtggtccaagctagaataattactcaatgaatatttggtataaatttaagtctttgactttaaattttagagaaattttaaattttagtttctcgaatacattagacaatacagtataacttttagaagttgttaatatcaatttttatataatggatctaaactgtaggttaatgcatgtatagagtatgagttttgtactttgtaaccagaatctacttggactattctaagaactctttattgtaagtagacctacgttatcaaaagatcacaaccataatatatatttatggcatttgtatcttgttnntagtggttttgacaagatcaatctctggaaggagaaaataagccagtatctacttgaaaataagatcatatatattcgtacatatgaatgtacaaccaggggtggatatgagttatagttaaatttttaaaacgattactttagatatttatcttatgcaaagaaatttgaaatgttcgagaaattttatgaatttttagcaatgttaaaaaatattaaggtaagtggttcagatcttgggaacagataggggtggataagtatttggttatgcagttcaaagatcattaagttgaactttgaatagtattaataataccttcccagaaattcggattgcatattgataaaaaattaaaggactatgattagt

SEQ ID NO: 56190 - DNA, 1271 bp, Cannabis sativa
aggtcctcaccagaccttatgtactagaacatatagtttttggacaacagaatcaggaacaaaaggaaaaaaaaaataaagaaaggttcaaaattgctttgttcgacactataaggattctaatcacgaaaatagcatccaagaccttgtcggacctcataagttcagcaacaatgcaaagtggaaaatacatgatactaagaatgttaatttttctaagacatggaaaaaatttctaggctcattcgccctatcaatttttaagtttctaagagaaaaaaaaaccctaaaatttatgccttatatggtggtggaggcgatagatgatcaccataaaatccataaaaaccctaaaaatgcatagcatcacagcctaaagcatgctacctagaacctacgtacctacccaaaaaatagtcgtattacgagtacaagatagaggcacttacaagtaagggttggtactgggggtatcgggtcttgaacagtaggatgaagccttgtttagaaagctttgatacgccttataaatttgtcgacgtctgctggaatgttcaatgatgaagctatcatgggtaaaacggtctctgaaagtgaggttttgtctagaaattaaacactttcttttgagttggaggagacgatggtgaagttcagtcgcatgagcgaacatccaccgaaaaacttctagatttttagggggttttctctctcaaaaagtttgagtaaaaatttttaaatggcaaaaaatgatcacacatgaaccctcacttatttatattcaaatggtgattcgcgtgtctttgatccaatgactcagattaactttaaagaacacattttccaagatccaatagtttgagaataccaaaggttaccattaaatgcattgcatgaaactgagacacattaataatgacattttcctcagaaatctcacagatgtgtctagtcttcagtttgcaaatcgaggtcacacacacgtccctatgatgcatgacacacaggaactaagaaatcgataacacgtgcactcaaagtcattgaatttgaaaggcctatgagcctatgcgatctttcactttaaaattttaaagggcctaagctgctcatggttctgtgtaataccacaagtccagatggtggctgcaagcctctgcgactctcgacctttgaaggcttggggtagatgttatctgcatttcttgacggatgacacgtgagcatccaatgtccccaaatgatcagtttataggcccattctcaaggcc

SEQ ID NO: 56191 - DNA, 859 bp, Cannabis sativa
atgcagaaaaaaaaaaaaaaaaactgttttgaagtgtaaaaatgaaaaagtctctatataatttggttgtctcaattttaaatctacatattgaattattttttataattttaaattttctatttatatctttctcaattactttttagaatattttatatattttattgttatgttttagttcgattttgttatcgaaggattttggacaacactaaatagaaaataaataataaatatttaataaaaaagcaacgaatactcaacttaaaacaacgagtattagaacgagactgcccagacaataaaagaacagtacaaaacaataaacacaaagatgtatagtggttcagttagattacggtctgcttagtacactgtaacaaaagatttttgtcctagtttattcatgttggatcactcctttatatacaaagcaagtttccttttagttacatagaaatcaatcggttatagaactgttttacattaaatattaacattgaattataataaaacgtaaaagaataaatgaagaacagtttaaatctgtttcaccaaatacagcaacgtatgcgacttctatagtgcgagttgcgtgttcatattctcgcacaagctcgcaggcttgaggtgcattttatcattctaaagagggctaacaagcctcatattaaggtatctgtattctggtcaagatgcatatatggacacctcatatattccttatcgagtcatcgagtacgtcgggtcatttatggtggtgtggacgtgtccccgacttgagggccagtcgtttctgggaataggttgagaggtctaatattgctcctccctactccgccgttgatgacgtcca

SEQ ID NO: 56192 - DNA, 732 bp, Cannabis sativa
tagccactaacctggctttgaatcgcacttgttcattctcattgattccctctttcaccttgagaatccatttgcactccacaatctttttattcccaatattggtacaactacccaagtcttgttcttcatgagcgaatccatctcctaatccatggcctgaggccattttgacttgtttccacatgaaatttgctcctcataggttccaagctcttcaatttctgtttgttgtactactggcagtgcaaaagctattaagtctactttcgcgaaccttgcccaagagtgaatctctcttttggttctatcttgcaccaactgataaccttctagacctctctctctaagtatttttagaacctctatttggtcttcattatcttccacctcagcatcagcttctgtctgcgcattgtcttccaattccatattagcttctagttgtgaaattcttctgaaattttcattttgtattctatttccatgcgtatagtgtttttgtttcccatttttcttgcatcacacggagacacactacttttccagatgtcatgtgaggatattccaactcattaaaaataatatttttagcaatcacaacccttggtctacccttcttggaaatgtagattctataccccttggtacctaaggcatgacctaggaaagtttccttaattgatctaggttccaacttgtccatagattggtgtacataagctttacacc

SEQ ID NO: 56193 - DNA, 843 bp, Cannabis sativa
ctcttccgatcttgagttttatttagggcataaaacccaacacacccataaacgattaaaacagtaaagcgataaaaacaataccaggatatatactagttcaagtctgatagatcgatgtgatttatggttctactctagttttagtacaccaccaaatcctatttattgatttaacaagaacaagtttgataaagtcgcggaagatcctctgttgagttctctcaaagtgttttaactctcatactcttactcaagaatcttcttcatctacagaagattcttcatacaaactaaaacccaatctctctctttcttatgtacctctctctacctctcaatctctttctctctcaaactcaaagtctcctcttgaaacttgtcaatccaaatcttgtagaaatggtacgtgtttgtggtatctacaggctcatgatcaagatcccaaagttggtgagtgcaagaaactatgttgttaagttagttacgccaataacaaatttaacaacctcctcgtaacagaatttgcacgttcgcttaagtgtaagtgcatctgggaacatatatgtgagctttcgggatcacaaacaaaagcacttcctgaaagggcttccagataggaaagagccagctggagtcgactatccaaaactatcttctaagaggaactgctagccatctggaacttttttctaaaggaggtccaactttcccgaagactaaactcggagtggacatgatagtcatctgggagcctccttctagatggcaactattccacgagactctttttggatgaacaaggtaactagccgggaacgtacttctgggagacaactaact

SEQ ID NO: 56194 - DNA, 1801 bp, Cannabis sativa
aaaaaaaaaaaatactatatactataccatatttttgtctctcattttgctaaattaaaagcaaaggatagttttattaatatattatttatattccattcttcacaattttcacataacaaactaatatttatttcaaaataataaaccaaacatcatagattcataatagtattcccattattataattacattgcatcactattatatatcattacaagtacattgagtgtatttcttatatagagtgctataaaagtggtgcatgtattttttagcccatttttataaaattaatttaaatttattggtagtgtggtgtattaaatattacattttcaagggcaattttatatctcatatggctcgtgatcagaattctacaactagctcatgatttggcaaaatatgtctttcagttaaacgatgagctatcctaattcgaggaggttccaccgccgtttataaattactactttgttacttttgtatgactctattcaccacatcaaaaaaaaaattacatttattattttctttttttcgctcattaatataattaattatttatttacagtatatttatacattttaatgaaatttttatacattttcaatcaaaaatgttttgttaatttttaaattaattttaaagctaatggattgtcaaatttaagctttccaatattatgagtcaaatttaacataaatttacatcatttattagagatggtataaaccaaccgacacttgatatatgcacttattaattattatgtgtattatatataatctattttacatatattaattatgagtgtattaatgataaattttacatatatatttagagcaatgatatattagctactcacatcattatttattactctaaatttatattaaaaaaaattaatttattttgaattataacatattaataatcataatactaaaaatataatatttaaatgatattaaagaaaaaaaaactagaagaaaatggtgtaacataaaaagcttagtttattaaatacataaaaaagaaaaaaaaaattgtaatttattttgaattatttatagagaagaggaatgctctagtaaccaagagttagtgttaagaaatgagttgttggataatttatatacgttggccacacaagacaaaagtttgttctacatcaacctacaaagcacgtacaaaccatgcagttaacttgtacatttatatatatatatatataggtcttttcctttctagtaaagtcaaaagatatttaatgaattgtaaaaaagtcatcaagtgatgatcttggtagtaatggtaagcttcacttgaatattctaataaatattatatttatgaatcatatatacatgcatgcatgagttgtaatgttgaaatgaaaagaaaataaaatgagtgattgagcaaagccaactaaaaggtcaaacaagtttacatagttgcacagagtttgtcatatgtccaacattattataattgtcatatatatccagcatcttgttcagtcattattcctaacaatggatacaatatagctatcccctatatttatagtctagataatagtctataaatatatacatatagtctctctctctctcaataatacttttatatttcggtaataacagtgttgtatattttacaatgctactacaatattactctatttccttccaaaatttaaatttaccgtcggtttctaaaactaaaactgatgcatatgtgacaggcgaccgccataaaattgggaccatatatatgtgtcagtt

SEQ ID NO: 56195 - DNA, 1638 bp, Cannabis sativa
attacaacactaccaccatctatggttttgaaatccatgaaccagtccctatttggactcctgtgatatgtgcacccactgtccatgatccaatcttgatccttgagacaagaactggtgcagacatcaccatctgttgaactttcaagcttagtttcagaatgggaaatggtaagaacatctccatcagaatcttcaattactgcattagaatcattgttgctgtcctcatattctttatccttctttttctttcttttgtctcttaagtcccaacagtttctaatcaagtgtccaactttgccacaatgatgacacttccttgtttccctaggtcttgattttgatctcgaattagtcctagagttacctctgaattttgagttgcctcttctaggtattctgcctcaaaccataagtgcatcatcagttcttgattcttgcttagcagctttctgtcaattcaactcagcatcccttgatctgagtgtactaattacatcatttaaggttaaagtatccctgctgtacatgataactgttctcatttctttgaactgatctggcaaagcattgagcaagatcactgcttgatcttcttcttttatagtttcacccatattagtaagagccaacacaatcttgttaagttcatcaagattctgatccaatgtaacagtagcattcatcttaaacccataaaactttcctttcaagaaaatcttggttgcagtagatcgagccatgtacaattgattgagtttactctaaattccaagagctaacttctcactaatcacctgcctaagtacattgtctgcaaggttcatgacaatggcggatctagcttgcttcataacagtatccgattccttcttctttgattcatccatgtccttcttcttgacatcatcagcaccaagatcttcatctaatgctgaatctagcttctggtaggtaaatatggccaacatcttttctttccacaaactgaaatcacccgtaccatcgaatctttccaaatcgaacctagctgatgatgaaccaattgcgtattatcacacgatttgagtttcagaagttcttgaattcttcctggagctctgataccactattgtaatctaacaacacaaactcaaaccaattaatgaacaaataatcaacaattaaataatcaatcaaaccagaaactaaagcaagataaataagcaatgaaaaacaagagaaaacacaaggtttatcctggttcggatctcaagtttgagtcctactccagctctcccccaaggagatttatccactatgaaccagtaattacaagcttcaattatagtgcaatgcactcaagaacaatcccagtcataattgactctacaacactcaaaaaaccagagcaacttagtcaacatgaacttgatcttcttgcagcattccaaaacaactctccctgtttttccctcgatttcttgccttgctctgaatacaatcaagaatttcttatatagttgatagtagctgacatgtccagcacttaacaacttaagacaagttagttattaaccaactaaccgacttcctaaataggaaagatcttaactgaaattaactgaatatccaactgttttgcagataaaacc

SEQ ID NO: 56196 - DNA, 1237 bp, Cannabis sativa
aagtgattgtttctcgagtaccccatgctcataactctcatgcagacgctttggcccatttggcctcaacaagagaagctgagttactcgatgtaattcctgttgatgtgttagctcacccaaccgtaagtcgaaccgaagtaatggaggtaaatactgccagagaagtcacatggatgactccaataatggattatttggaaaaagaaatcctacccgaagataagatagaagctagaaaactgcggtatcgagctgctcgatatgtcatttatgatggcaggctttaccgcagaagcttcagccaactgttgctcgaatgtattgatggaaccgagtgcgattacatactccgcgaagttcatggttgcatctgcggcaatcacgtcgggggtaattcccttactttaaaaataatgcggcaagggtattattggccgacactgcgagtagatgcctcaaactttgctaaaaatgtgacaaatgtcagcgaatagccacgtataccgaccgacctccaagccaattaaactccataacaagtccttggcccttcgcagtctggggcattgatttaattggagaattacccaaagggaagggcggggtcaaatacgccgtagtcgcagtcgattattttaccaagtgggctgaggcaaaagcccttgcgactattacaactatcaaattaagagagtttgtgtataattccatcatatgcagatttggcatcccttacaaacttatctcagataacggaaaacagctcgattgtaaggcaatgcgccaattgtgcgatgagttgggaattaaaaaagcgttttcagcagttgcctatccacagagcaatgggaaaatagaggccgtgaataaaataatcaagcatacaattaaggaaaaactcgaagagcgtaagggggtatggccggaagagcttccgcaagttctatggtcgtataatacaaccccctgatccacgactggcaaaactcccttctcgcactcctatgggtgcaaagccatgataccagtcaaagttggggcagggtccctgcgaagagatgttttcaacgttactgaaaatgcagacaaacaattgctccagcttgatcttttagaagaaaagcgcgatcaggctcatctgaaaaatgcggcctataagtagagaactactctctatttcaatttgaaagtcaaagagagaaatctgcgagtaggggatttggttctgcaaaaa

SEQ ID NO: 56197 - DNA, 1201 bp, Cannabis sativa
aaataaacaatatacattacattattctcaaataatttttatactattatttaattatattttataaaagtaattaaattatacatacacaacttgccaaatcattacaacaattttcacattttctctcatcttccacctaatttctcaaatttccaattgatttcctaaagttaataacaattttaatctcagacaattgatcgacgattactgtggagacattcgatgaggtgcgctatttaaaataactttttgtttccattaataccttggccaccaccaatggtggaactattggattgacaagcttgaatgaatttgttttcaaattttggtacataaattcagatgctttattattctcattgactctgcatgtttgaattttatctttattttggtacatgcgcacataatgtttgataaaatttctcagtgatctgttacacttatttttcctaataatgtcatcttttaaataattgcaatctctgagtatagttattatactaataaaatgactcaaagggaacaattgaggagaagcagagaaatggttttgagctctgagtaagtaagttgttgaaactatacattaaggtttgtgaatttacaaactgatgattactactaatttgataaatggttccctaattttgtacctaattttgttaattaaataattatgatacatttatggtttttagtttttacttcagatgatcatataaattaattatcaaatgaattgagctaaatgattggtagatagacacatattagaacattagagagaattttactggaagaacatgacataatccaatatgataggaacaaagtaagtacttgcctttaacttttccttaatctttagctaatttctctatcgaattacataccattttcaacatagtttcttatcttccaagcatatattgatatttttgtataaaaaatatttcaaaaaaaaaaatatatcttgcttttccaatgaaaatatttctgaaaccatggtgtggccaaaaaaaaaaaattgattttttcaaaaataaataaatgaattatgttcattttttttttccattaataattttttttcttaacaataataattttaattttgaagatcgaaccaatcaaaacgtttttttcgtaacaaactaaactaacaatattaaaatatttgctttcaaaa

SEQ ID NO: 56198 - DNA, 1117 bp, Cannabis sativa
aattgtcctatttgagaaattgtaatattacatgtcttaggagtttacaataattttcccaagatttttaggtttgtttaaatgtccccaattatttttacaaaaacattgcttaacccggatttcaaaaaaatggtgtaaccatgagttttgtaaaaatcataacttgttcatattaacacatttttaagtgattacaaagctaaaaaatactctactcaaaccaaactaaaataaaaaataataatacgaactataattggtgggtttgattcgttggaagtcaagtctcaaaactgttggaaaacactttcaaatcggtttggtagaaactttggatttcaaaactctctcaaaaactaaagatttacctcttgtagctaaggttttgagtagggttttgatggatcttttgggttgatctttctatgattttacctatatgccccaagcttggtatttttctatcaaagataatgtaacaactcagaatacataagagaaaatgatgattatggtttcagccctatagatgaaaaggagaagacaacatagtcttgcctcttcttaaatcttatagtaatgagcttggaaccacgaggagacctcgctgcaatggagctttttccttctagtgagaggtattgaacccaaaataaatacaagaactgagaatagaaaattacatataacttaccctagaattcccttgatcatgttagcttatggaagcttcaatggagctttctttgaagagggatcaagagagagagcttctttgactttcttggagattaatttctaaattttgaaaaaatgaagagtgaggagagagaggggggttcgggtggcctaagagagggagtgagaaagagaggtgtaggtaattatgagttaggaccatgcatgaagaggaaaataaaatgaggaagtcatgcatgagaaaccactcctatcaacggcccaagcatgagggtttttcctcttaaaattttcctaattttgcccccaagatccctcttaactacattaaaacccttatgacttttccctccaaaaactatatataaagctaaataaaataaaataaataaatatatgtgacaaccaaaataat

SEQ ID NO: 56199 - DNA, 852 bp, Cannabis sativa
acttaaaataaattaaattttaattaaaatatttaataaaaccatttttagagattacaatttataatttttttattgtttattgtaagaaaataaataaaatcagattagtttaataatttattaattatttttagtacatatttaatataatcattcaaacttcttatatatataataatattttttttgtttaattttattaataatgtttgagaagaaaaaaataataagttgataattatttggagtaaaatagacaagtagttagaagaggaagaaggaagaaggacccatgtttagctgctgccacaaaaggggaagtgtcctccaagcttcttcaatagctggagtggtgttgtcgtttactacacttcgcacacattttttatttttttttcattttcattgctttctatcctaattttatatgttgttagatgatacctcacttttagaaaaatggaaaacaaaaaagaacaagtaaatggataggagaaataattattatgatttaactataattgtgtatattgatgtttagttctagactaagagaattttgaattgtgatttattatagagtcaattacttttttatgataagctattaaataaataacgtagaaaactatatatcactcccactttttttttttatgtacaatcaaattaagtttacaatacacgtaaaaaaaaaagttaagtttacaattattacctttcttttatgtattaaaagatgaaaaatgtagcgatttagcaatttttattttattttggacaatttgactcaaatcaaagtaaattcagcaaaaaaggctcaaagcaaagtaattaagtgacgtattc

SEQ ID NO: 56200 - DNA, 5161 bp, Cannabis sativa
acaaattttaacaataaaagctttaacattcaacataaattaacaaacataccatacaggtccatcactccttcctgctttttcgagaggcagaacaagacttaacagcataactcattaatcattccccctccgatttgaattcgaatccactcgatcagctctccacgagattgaattagtggatttcgacagcaaaccaattgcagaagagcatgttgctctaacaactgtatccgatgagcggctcattttacccaccaacactccaaacatctgaaacaagagagaacttttgaaactgctatctaggtttatctacaaaataatcaatgaaacaacacgaatctgaaaaatacctgcataaaatgaggagccaaaatgtgttcatcatctgaaaaagacagcatactgctaaaaaagtatatagcatttgcttggatcactggccaaggggcatcgaaaacctgccacatcgacatcaaaccagtcaagttggtgcaccttgcagtggcagaagagagcacaatgctgtttgatctgagattctcaaggaacaatgtccccaagggccttcactccagatgataaaagcaatatattaacagtaattgttaagaacctttactattgatgccatgcaagtatcaactctagaaggaagatgttgaacgaattgctttgagaattctctaacatactcttcataattgcttcgcgaaaaatataaggtagagttggttacttccatcactgtgaaaatgtcattactttagatatcgttctgtaatgtaactaggcattatataatgtcaaggactacctatgaatgatcagaattgaaacaatgtaagctcaacagcacacttaaatcccttcattccaacaagggggcaattccttttagtgtgtactctattcacaaaagaatggcaaacaagtgtaattaacacttccaataacaaacaaaataaaagaagttgtaagtaaatacccaacaagcctgttgagcaccaacatcatcatcatgcaggtgcaaaaccaatcgaggaagagcaatatgtatctggttatcaaaaaaaggaagcagcatgcatcacatcaaatatcaagttgcaagtatagagtatatgaatttgagaagcaaacatgttcagtgaaaaaattagagcaactaccctttattgggaacctagaattccaacaagaaattttgcaacacattatctgaaaacgtgagcaccaaatacacaagagaatgggcctttaagataataaaaaccaataaagtaataacagaaaatggttagaggtgacaaattgtgactacctgtaacaaataaacaaatgaccaaactaacatattcacctatattcgaataaactctcatttctaaatttaccaaaaacctctgcaagagcaacacccattttcaaaacggtgaaaacgattagaatctctcaagattattgctctcccagatgttttggaaatgaacttagccatctcatgacagtccacacaaactctaagatttttggtgactcttatggtttttccgggtggcaagctcagtattccgaaagccatagctaatttctcactgtgcccacagagtgcaatctctttctccatgtcatctgcattaatcaaggcatacttcagtttgggaaagtaattttcttccttcattctcgctcttagcatcttcagtagtgactcaatctgttttgccagcggttgtgaatcaccagaggagaagaatatattaactttgcctctgatctctatccaactacagcctggattcttctttagccttttcctaccaattttcattcttagcttcctcacttcctcccacttttctgcctcagcatatatattggcaagaagaacataataacctgtattctcaggctctagttcaaaaacccgttctgcaactttctctgctagtttaacatcatggtaggtcctacacccacaaagcaaagcaccccagattgtggcatctggtttaattggcatagttttaataaacttataagccattgataaattcccagttcgggaataaagatctacaatacatgcataatgttccaacattggctcaatgttgcattcatttctcataatattgaaaaacttccgcccctcatcaagtaatcctgaatgactgcaagcataaagtatagatatgaaggaaaccgcatcaggttcaattcctgaatttctcatttcagcaaaggcagcaatagcttccttgccaaatccatgcatcccgtatccagagatcatcacagtccatgagaacaggtccttttgaggaatcatatcaaaaagtaattgtccaagtactaacagcccagactttacatacatgtcaacaagtgcattagcaacaattcgatcttggaaatagccatttcttattatgtgactatggatctcgcggcccttgtctagagctgctaagctagcacaagcaggaaggatacatgctactgttctactgtcaggctttaaatgatgttgcatctcagaaaataattcgagagcttcatttggaagacagtttttggagtaacctccgatcatggtattccatgagacaatgtcctttgtaggcatatgagagaaaaccatgtgagcatcttccatgcttccacatttggcatacatatccattagcgcattacagacaaacaaatctgaatccatatcattctctctaatgtaattgtgaataacttttccatcatccagtgatccgctacaagcacaagcatgaagtatgctcgtaacagtaaagatatctgggctaattccatttgtttgcatttcatagaatatttcgatagcatcatctgaaagaccttctcggacgtaacctgccatcattgaagtccatgacaccacactttttttgccaatcttcttaaaaacttgaactgcagcactcatgtccccacattttgaatacatgtcaagtaaagtattgcaaaacatgatttccctatgaaaacaagcttttatcgcatagccatggatggctcttcccagccaactagttccaatatctgcacaagccactagaacgttcactaatgtggccaaatccacatcaatacccaaacaaatcatctgtgtgaaaatttcaactcccttctcccccatatcattagccgcatacccactaatcatagaattccaggatataacatctctatcaagcaattcatcaaacaccttctgtgcactttcaacgttcccatttttaaagtaaaaagcaatcaaagaattcataaccgtgttgtgagaaacaaaacccattttacaaatatatgcatgaacccttttgccttcttttacgtttcttaaggctgcaaagcacttcaaaatacaagacaatgtatgggaatttgcttgaacacccaactgttgcatcatcataaacaaatttacactctccttatgattacgaatctttgcatactcatttatcataagattccaaaggaaaaccctgtcactgcaaataatatcgaaaacccgtcttgcttctcgtaaatctctacaagttacgtacataaagacaagttttgcacccaaatgcccatcaacaggtaccccactctcacaaataaaagagtggacctttcttccatcttgtaatgattttttctctgcacagagctctaaaacatcgcagtaagtctttaactcgagctctgatttttgggacccgcaaagcaactccatggcctttttcaggttacccactttacataaatagctcatctttgcattgtaatcgataatttcatggctgacgactttagcagccgaagcagatgatcggattacgggaaaagaagaggctgaattgagagatggcaagtagcttcttggggacaattggaatggaagagaagcagttgaggatcttagcaagtctgtcttacagtcatggtcttgagtcggtgagactgagaataagtttggtgaggatttagccaccatgaacatggctgccaaaattgctgctacaatatgagagtgcgggacagaactctgagtgtaagttggaagaaccaaatgttactaaaagaccatatctatatttgcgtgaacacgactagacatttcttaatttttagactgaaatcaacttttgtattttgtttctaaaaatcacattatatattttttacaaaaatatcttttcattcctttaaaacaaatgcataacttttataggaaaatgattaggagaaactccaattatgcatatttttctatgagtaattaatggtgtcatctaaaaatataaatgactaatatttactaattgtagaatttaaatagtatctcatattactcatttttatataaagtaacgatatgtattgtgttgaccaaaacgcatgggtactttttgtcaagaaattcacttagagatttttatttttggtggggtttttctttttgttttttttcagttcttaatgcatctcttttctacataaattttttctatttatgcattaatttcttatgcatgcatgaatgatctatttatattgtagtgattagctgaggcatgtcttttattgatttttaattttagtctccacgtgccttatccagttgtgctagattgttgagacttttatttattcccttcttatgcttgttcttattttatgtgccttatccacattcacttttcgtcgaaatattttatctctcaatctctttacgtcgggatattttatcttggttaggggtttgaagtgacctaagctttggtcggagactgcctttagtatttttcaacgtgaattcgagcttatcctatctcaattttgtgtgattctatttttcgctcagaagagtagtcctcttgattctttttggtccgagttatattttgtctatatattcctagttatctcgactagcttatggctttaatctatctaggacttgggctccttagcctggcttgtctcagtaagtttaaatttgagttgctcttcctctgggcggtgggttcttgttttgattatttctcaattttgctattgttttgtcgtcataaaaaataaaaatatgaactatgtcaagcttttattataaaaaaaaaaaaaa

SEQ ID NO: 56201 - DNA, 752 bp, Cannabis sativa
cctctgaatgtgctggatggttttgtgaggagattatggaaggataagattgataaggtaggattactctcctatggtatttttttgattagatttcatgagactgttgatagagactctgctattaagggttgttacatcttcttcaacaaacgtcctgtcattatgaaagcttgggatccaaatgtggatttcaagaaggaggatgtgagtagggtaccgatttgaattactctagatgatctagaattgaaatactggggtgaaaagtccctattcaaaattatggggcagattggaggcccgataatggtggatgcggtgacaaagaaacgagataaacttaagctaccctagagtgctcattgaggtgtccatacaccaggagtttccacataccatttattttgaaaatgagcatggaatgaatgttctggttactgtgtcttatgaatggaaaccaatcctctgcaaaaattgtaaaggaatgggccatgagacaattgactgtaggaagaaagacaagatacagcaagaatgggtgataaaaagggatgcaaggaagccagctgaggctactgttattgataaagagaaaatggatgacttccaaccagtcactaaaggctggaaagtcaagggaaaagagccaccaaagcagacagtgatcattaattccttcaatgttcttgagcaggaaggagaagggcaagaagataaagtagcagaaggagttataacagatggaatgc

SEQ ID NO: 56202 - DNA, 771 bp, Cannabis sativa
atgcctatgtcctttcagcaaccccattttgttggtgagttgttggacaggaaacacgatgagaattgaaatgccattttgaatgagataaggttcaagggcttgaaactctccccccaatctgattgaacagatataatatcatggccaaattctttttcaacttgggttttgaagttgataaaggtaggtaaggcttcagatttggctttcaaaagaaaaacccaagtgtatcttgaaaaagcatcaatgaagtgcatgtaatatctatatcccgaggatgagagcatgggagagggaccccatatatcagtgtgaattagttgtaaaggcatatagtataggtagtttgtgagtttggaaaaggaaacttatgaatttttcctaaacaacaagcatcacaaaaatctgaagcacttttatttctgtcttaaatattacatttagccattatggcttttacaattgtggcagagggatgagctaatttcttgtgccacaaagaaaaattattacaagaagtggtatttaaagagtgtacattaacagtatgtggactagatgaagatgcaagagtgtgtccaagactggaagagggcatatgaaactgtgaggagtcaagaacataaagaccgtgcttaagatgtccttcaagaagagtttccttcgaaacctgatctttgacagcacaatggttaggatgaaattcaaagaatgcattgttatgatgtgtgaatttagagacaaaaattaaatttttggtaatagtag

SEQ ID NO: 56203 - DNA, 1484 bp, Cannabis sativa
  modified_base (266)..(270): a, c, t, g, unknown or other
aatcaaataaatatataaatgatcacatgaaacaaatgacatactaaataagtaatgagaataaatctatttctttattgataattgaatagaaaagattaattgaaataaaattttatttagtgcacaaagcccaacaggtggtaaccaaacccgaaggggagagagaaatctaagttcagatcttgatcatgctctgtgatagaaaggaattaagggctacagatttgaatggaaggagtcattatattctgctgcaaccaatnnnnngttttcttaaactcttatgtgttgtatttcattgttttagagatattcaaatataggatgttaattcaacatacttgttagtaaattgagatcctagtaaaatattcccaacatttggcctcggagccacggtaatgatttgctttcatgtaatattgattcaaaacaatgaatattgtttattatgttgatttggatgtgttcatgttcatttatgtgtttgatgaatgtatgtgatttacgaagttttttcatgaaaataatttatttggattcctttataaaaattaagcaattttggtttttacggaacttgatctcgataaaaattgagagagatatgaaggtttgaaaattcgtgtgcatatggtcgagggatgccccaatcacacgcacagcactcggacaaggtgaccaagtgccctatctgaagcgtgccttggatgcttgtctaaagggcatcactctgtctgaagcccgcgcatgcatcctgctgcacgcatacgaggtatgcagcaccattctttgatttttttggatttttttccactttttttggatttttccaattttcgaaccctaatttcaatataaaatataattttaaaatatttaaacttaaatatcaatttacaaattaattatattaaattttttaatagattattatttattttgatattttgaggtttaaatttaaaaattgattattttattttttatttatagtcagattttaaaaatttgttaatttctttaatatttatatattatttcattataaggttatatattttaatattggggatattttaagttaattcagagccttatcttttaatttgaaatattctattaaaattatcttataagataaattaaataattaataaatttgaaattaaccttgatatttttatagatattctaaccataatattttgaaattcaaaaataggttattttgtgaaatatttaattgtttgtaatttatgaattaggaaaatgatattttatatcattttacttattagaagtttataaatagtattttaaatatattaaataacctagatatttttgtagaaatttgaaaaagtcttttttttttttaataaacttagcaacattattaactagcaatagttaataacaatagaacgcacttcgttggaacaattctcaaattaaagcacacaacctggagagaaaca

SEQ ID NO: 56204 - DNA, 1840 bp, Cannabis sativa
accacatgatctaaaatcaatggtcaaaaaaagttccctactggtagggaacttttgctaggtcctaccatagtcttgccctaaatatatatattaaaggagcaaaagcaaataataaaacacaccgaattatagcaattcgtctacttcatgagagatagttgatattattaatctgagtagataatatatatagaatacagatatagatttcctaataataacatctatcaagtatttcttaaagtgttcccaaactcatcaaagtgtttcgcaaagtttgactgtacaaatactctctctctctttgacaaatttcccaatgaacataaatgtacaaagttgtacccaaattgttgtttttcattgagatgcaaatgttgttctaagagctctatatttatagaaggaaaacctcaactaccaaccatatgtaataaatgaggtaacttatcctccaaccaaatgtaataaatgagagagcatgcttcttgataaatgcagcaaatagcaagtcccaaaattcttgaaagttgaaccatatttttgcaactccaagacaagttgacttttgagtcaaacccaacaatctccaccttggcaaaaaaaaaaactaaaaaacaaaagcgttgcctccacatgcgccctaggcactctaagtccgagagatgttgatcaagttcaagcagtgttgaaacttgatccatgtaaccacttttgtaagcatatcgaccttctatgcgacatttgcatttgacttgtccttgtctggacagtctttcttccagtaccctttcggatgataataggcacactcgtcttttgtaagatttcttcttgatgattctcctctagactttgatctggatttccctctattattcgatccacctaatttcttgttgttcgatcaacctctagtcacatccaatgcatctaatattgagtctctgtgatcatgttgatccttctttagatactcaatatttaccaaagcattagaaatatctataaaattaatctcatccttaccatataacaaagttgtggttaaatgttcatagctttcaggtaatgaatttagtaacaacaaagttttatcttcatcactaatttaaacatctaaattttgtaaatctaccaaaattttattaaaattatctaaatattcaatcataggggtacctttcttgaactggaaacatactctttgtcatgtacttgtcctctttatttttttccaaagaactgcagtaacactttcaaacatgacaaagtaattccgatcttttcccaaacacagtcggattgtgccacaagcttgacgattgataaaatttcaatcttcgtcggaataatcttttggcctggactccaatgcaatattagatccttctcgaaattatagatctaatacttcacattaccacatgtcaaagttattggttccataaaatttctccacctcaaactttgcatttgataacatggttctcctcatataacctcttgactcaccaaaactttttatgtcaacttgtgcatctgttttaatatctctgttgtcagccataagtggaaacagataacaaaacttttgagcttatgacttaagatcatatttttcaaaatctcattaccttattttgaaaaacaaatgtcgcagttgaatttagaacagtccaaaatagctaggtatcggtctgactcggttaaaaatgggtaaaaatggaatcactcagtcccataaacacagttttactgagctaacttggttattggcaggaaaactcagatggctactagcagtgcatcagaccttcgattgaggtgattcttg

SEQ ID NO: 56205 - DNA, 1913 bp, Cannabis sativa
  modified_base (75)..(78): a, c, t, g, unknown or other
cccatgattattgccggcggaacccgccggtactaatccgccggtaatagttgttttaaattttgggcggtcaannnnccgcccaaggaattagaggcggaattttcgctggtaatagtgggttccgccggtattactttttttttaaatattaattttttttttattttcaaaaaatcataccggcggattaccaattccgccggtaataaccaattaataccggcggtttggccccgccggtaataatttcgccggtaattaataattttgttgtagtgtatgtacgtattgttgtataaatttattttatttggtgaaaatgctctattcaaaaataatttttaaacatgtgaaacaaaataatagattgtatattattgtataaattgattttttattaggtaagaatactctattcaagaataatttttaatttgttataaataagaataacctaaatgtaattagttttacattttctaaatctcgtttttttttttcttataaattaaaagttcattgcatcacaatctcatttatacaacctatagcactccgaaagagcctgtgtgttatctatataagtattaaaatattataataaactaaatcattttatatctttttgttttatacattttggcattacacaagaaattttacttttaactagccattttgcatcttggacaagaacattcgagttggtagtttcttggttccaaaaattattgttccttgcctgccaaagcttgtaaaccaaggctgcaatcgctgctgtataacagctcttcctgaacttggttcttttagccctttcgatccatctcaatattgtttgtaggttttgtgatcgaacattccacttcaaccacaccttcatctgagctaagcaatcttatgagaaagcacactcaaagaataagtgttgtacaaactcttcagtatttttacaaagaaggcaagttgcctcatctgtaacaggaaaacgcagtagtctttctctggtttttaatttgttctgcactgcaatccaaagcaaaaaactatgctttggaacattaagcctgcaccacacctgtttgccaacataaaagtttcattgttcctgtgttagcatcttataaactgaggaaattttaaagttatttgaagaaaacagatcaggttccatgatctattttactatctttttgatgctcactaatttcctccaataccagctgctttaaagtggggccttgtaactccactagtcttcatgagcaatgtaaacactatgcacccacttcacccataaattgtccttctttgtggcaattgaccaaacatgcttcatcacagcagcttggtttcattttgtgatatccaggaagcctattcctcctacttttttaggcttacaaagcctataccaagcaatactaccagggccatttatgttactttgacctttccataggaaacttttacatatgccctctatttcttttattactttcctagggagaatgaagatttgactctaataaaggtggatagtcattagtacagagttaatcaaaattgtccttccagcaaaggacaaatttcttgtgctccatactttggttctagctgtcatcttctccactagggtagtacacttagatccaactatcattcgagtgacctacgggagtcctcctatcctaattgacggagtcactaggaagattcccccgtcttcgaggcttgggtactggcgtggttggtcctctcagcacggttttgcatcgagggttagaagggcgtccaggctcgaaagcactagtggccttctgtgtcctcgagggctgaccagccaaggtcgcgtctttgcgatgaggcttaggagttgatttttgtgggagctcatccatctttccttt

SEQ ID NO: 56206 - DNA, 1360 bp, Cannabis sativa
  modified_base (718)..(725): a, c, t, g, unknown or other
agaagctatttggcttctttggttgaccaaggagttatgtattgtttaaaagaacgtggaggttttctgcgacagccagaatgccatttttttggcaaacaaccaagtccatcacggacgcactaagcacatcgatgtttgatttcattttgtttgtgaaatcattgatgaaggaaatgttatacttcagaaagtcaggactacagataaccatgcagatatgcttacaaaagtggttataggaatcaagtttcaacactacttggacttgattaacatctcagacttagagtgcctagggcgcatgtggagatatcgtttttggtttggttttctcgccaaggtggagattgttggatttgactcaaatatcaaattgtcttgaagttacaaatatatggtccaactttcaagagatttagaacttgttatttgccacatttgtcaatgaagctattgaatagcttttggcttatgctcttttatttattacatatggctggaactacctctttttattacatatggttggaactatgtctctttaattacatatgattgggagttgaggtcttccttttataaatatagagctctttaaagagcatttacaattcattatatagaaattcggtgtgtatgaattcagggtgaacaattcaatgtacaaattggtacaatcgggttcagtgggtagtcagagagagagagagagagnnnnnnnnagagagagagagagagatgtatatccaaactttgagaaatactttcgcgagtttggggaaacactttaaaaaatacttagagatattattagtaagaaatctgtatctgtattttgtataattcttacttagatcaataatatcagttgcaacccgtggagtaggcaaattgctgaaccacgtaattatgtgtgttttattatttactgctttgatatatatttattattatcttttgctatttattgcttccacacacgacaaagtgatcagaaacataaggtactaagtttgtattttgaaaaaaataaaaaacacatggtactaaatagttatttaccgcttaacaattttttttctagaatgggtattttatctaaaataaaaaatgagattttattacaaatattataatcaaattgtttgaatattaaaaacaaataataatagggaaacttacaaaaatactgaattttgacccaatctttacaaaaatactgtcatacggcaaaaataacttttatactgcattgggactttttttttcttttatactgtaaataccaaaaataaaaaaatgaggtctccatcttccccaccaacagacagatccacaacagcaacaccaaaacatc

SEQ ID NO: 56207 - DNA, 1569 bp, Cannabis sativa
  modified_base (876)..(876): a, c, t, g, unknown or other
tataaagatataattcatatatatgataaagatgatcaatagtagatcgacataaatcttgagtaatcatgacctcttgtttatgttattagtttctttgattcactcgttaaagtttcagagaatatgattcttccaatttttattttgggaatctaataatatggatggataggaacatgatctacaattacggaattctgacttttctaacggatcgaatgttggttccattaaagtgttaattctggaactgaaaagttgtgcacaaatttagattggatctaaattatactttcactggtgaattaacgatactaaaaaataaagaagtaattagaaaggtaaaacagtaatttgaccaaaactaattatgaatcgacacaaggagggttagtcattggaattaattatatcaatggtcactataataaaactcagtaaatataattctatactaagagcccaacttcatatttatagtaaagtaatcatacaattaataaacatgattatttgattaattagattcaataaataatctagtttattagagcttataattatagatctatgattccagatcgccaccttaaaatattatcaagagtaggaataaaagttatatatagaagctcaaaaaatctattttgatttgtttatatagtaactatttattttgtaataaataatttatttttatttttgagttaattaattaattaatttagaagaaaatatttatttaaatttgaatttgaaaagttgttatagatatttttatcagttgatatattctctcaaggtagttgagagatctcaatcgattataggaaataaatatgtaacagaattcagttatattatttattcaantaattaaatatgatttaataaaaaaaaattaatttaaataattaattaaataaaacgtttttatttaaatataacgaataaatcatacgtattattttttgtaagcttaaaaatgattaatttgattaatcttttctctccatcataactacataactacagaatacctttgctcatgtgttgagaattgaataaaaattttgtatacactttattctaatagcccaaactagtccttgtgtatagtggaagatttagaagactactatgtgagtattttgagatcaaccaataatacaacatataaaaaggatcaaggatacttgataagcttcaagaggtaaattatcttttcatttatttacttttaggagtataatatatatacatatggtgattatgaagatgtggtacgatgatagaaacttttattctgctcgtacctgatttaagagttgcattgaacataagtgttccacttagtctattagtttgcaaccttttgggaatgtgcttaaaattaaaatcgtgagggttaaggcgtaaaacgggcaatattatactaatgtgggtgttaaggtgagctgaaaacctaacaagatggaagaacggggtccaacattaatattgtcattgattgtaatcaggaccggcccttaaattgagtgggtcatagggaaaaaatatttttga

SEQ ID NO: 56208 - DNA, 1308 bp, Cannabis sativa
gaaacctcttccatataattaaatgtaattttgtatttttattaaatatttaaagtagtttataaagatatttatttatgatttttaattgatataaagtaaaagaattcatttatacataaattctaatttaagaataagtgctagactaataaaaatttaccaccttcttgttttcattaataattgtatgctatttattatttaataaatataaattttgtaatttatttaaaaaatcaactaattaaaaagtattttctaaagaaaaaaactaattaaaaagtatactttaaacataattttaatcatatcaaatctaatatatatatataatataatagatcatataatagattgaatataatgttgatacaaatcaaataaataaaaattatttatttattttaataaaagtaatttattaaaggatagatcttcaaacttatgcatttatgaataaaaaataaataagagacaatattttattataataaaaatattttattagtcatattaggtaaaagtaaataatatttaaattcaatttaaagagttgaatgaaaattaactaaaaatagagttgcatttgatatatttagtttgagttaaaaaaaaaaaaaaacaactaaataaatatttatccatatttcaaaaatatgacattgattaatttttttttcttgtttcacacgctttgcgttttagtacaaataaacaatgttaaatttctgttaggttctttcgaacgacattattcaatattatacaacaaaaaagaatatttagcataagttatgaaccgaaactaattaatatcgctagcatcaatctgataatcaatgtcattggtcatatattattatagtgttggtatttttgtgctaacactcacaacaaaaatattaaaaatacatttatgacaatcaatacccaacaatttttcatatttatagtcatggaagcatatatatatatatgttgcttaattatgtgtatttattaatgaatgaatgaatcattgttgatcacatatgtatataaatagactagctaattatatatatcggccatctcaataattatcatccaaattaatctaccatatatgaaagataacatgattcaaatgatcatccttgtcatcatatatacaagataacatgttcctgaaattgggaacatttaacctctctctttataaaaatacatatagtaattattacttacaaatttacttattaccttctttttatttccctttcgtatcaagtgcttcgcaaatacaatagattctacaagaaacta

SEQ ID NO: 56209 - DNA, 1420 bp, Cannabis sativa
tgtacaattttagaaaatacatggtctattttatcatttaacaaaacagaaagtaattaataaattttataaaatatagggtccaaaatagttttactctaaaaaaaacacaaatttgcttatactagtgtcttttatttattataaaaaaaaaacccagacttataaattttaaaattattaaaatttatatataaaattacatttaatttgatacacgtgcggagcacgtgtgtctctactagttgaaaaaaagaagaagaaaaattggcatttttgttgatgtccaaagcaacccaacctaaaaaggtcaagcctagcccatgaaactcattatcaattttctctcttccaaagaatgtgatgcaacgatgataagtctaggtcatcatcaactctgtttctctcttcctcattcaatattcatccaaatattagaagacaaaataacaatgatactaatattaattttatttttgattttaaatgtcaaatttaattaatatatattttttttataattccaaactttcttttatttatttttagacattttacggctctataaatagaaactcattttagtagtgaagtgtgtaatttttagtgtaaaaaattgtagtaaaatctctcttcactttttttctcatatatatttctagaatttttatgagaataatgagcataatggcctaattaatcttccttgaaaagttagggatgattctatatgcaaagtgaagttattttgtatctttgattcagttattgtaaaatttatttgagtaatgcaaattttgattccacttttgtttttatgttcttcacccatctatactactatttatgatattacatactaaatatatatacttggtcaagctctttctgcatacttttatttagtgattatatagtaatggtagtattgctcatttatattgtttaggctcatttttatttacttttagttaaatggtatatataagtttagtcatgctttctctatgtgtctaaaaattaataaaagtaatattaatattcatttccttcactgtcactatcaccactatctccatctcattatcattatttttagtaaaaatatataggattagtcatgctctttctatgtgttactatttagtaaaaataatattgatgtttagttttatatttaatcttttattatactattgcttgatgtataatgttatttctaggttctacataagattaaactatttttttttattattattttaaagaacttgtatactcaaaatataatgaactttaatattattacaccacttgtgtcaactttgtgaatcaaaggtacaaaatagctaaacaagcatatggatgattcttgaagcctttctctcttttactattgattatacatttatttgctttc

SEQ ID NO: 56210 - DNA, 1103 bp, Cannabis sativa
ctcttgattttcatggtaagaagcacaactatggtattgtgatggttgatgattcgggtagagtgaaagctggtatagccaagccttgtgttggaagtatccctgctgtcatagctgaagccaaggcaatatatcatgctgttcaataggttcaattgcttcatcttccagtggatgttttaaaaacagattgtaaaactattgttgataaacttaactcttgtaattggaatgttagtccactggatgatattttagctagtattaagcacttgttatccttccgtcctaatcttaagaatgagcatgtatatagggactctaatcaattggctcatcagattgcaaagttagaattaagattagataatgagttggtttggaatggtcttttaccttctatttaacttgtttgctttgtactgtctttgcatattttaatgaagcaaaagtttctctaaaaaaaaatagagcactataataatattacaaaacaacttaaaaaagataagaaaaaaaattgcttgaagatgctctctttcttttaaactaataaagaataaaattcttttagtattttattaaatatatggttggtgtgcttttatgtatacatctaaaataaattaacttagaaaagaagaaaaaaaaaatcacataattaatgggtaaaataaggaaattaataacaaacaagcacaccaataatagtattctgataataacattaaaatttaaacttctattcattcatgtaatttaaacaacaaagaaaaagaaaaaaaaaaaaattaactttcaaatctatgcttaacaaaaacatcaatggcaacaaaataaaatttgaaagacaagggagtagttaagacgaacttcaagcatgggatagcaactgaagatgacggctagagacgataatcactattggattagattgaatgacactctactctgcgcacacgataataaaagttggagatgaattcttcacacaattagaagattaaaaattggttaaatttgtcatctgttctacatttcccttaattttgcgttacagaggtttatgttaatgttgtgtgagattagccaacaatcgttag

SEQ ID NO: 56211 - DNA, 1048 bp, Cannabis sativa
tgtaaaataaagcttagttctatactgcaatgtgaactttctactatttatttatttaatgaaaatgtgtggatctgatatgtttgttaaattctacttataaataactaactgtgtcatataccaaagaagaagtcagattttatagagttcaattcttgaagaatttccttagccttagaattagattacttaggtagctttggaaggagaaacttgttcttcttggagggttgtaaatagaaggcttgtgtatttgatcaagatcttctaagtgtgaggtttctgtgtaaggagttttactccattgctgagagttgctacctctgttcttgtaatctaattctcaagatgagaagtgccatggctgctgaaagttttctgcaactcagatccttctttaattaagtttctcttaactgtaatttttgtcaatttcaattctggtttaccatttatgtttagaagattgattcatgttcttgactctttttttttttttaataatgaacttatcatttaaataataattagagactacaaatatgataaaaaaatctatcaaattaagtttcttatccactctgctgtaaatatgcacaactaatccataattagagagtacaaatatgatacaaaaaatccttcaaattaagtttcttatacaccctaaatatatgcacaactaatctataagatatcatggaatagggatgttggaagttattttactagtatttaaatttaccaacatgtatattgattataattctataatctaacaccttaaatatgaattcctaaaacagtaaaaataaacacatataaaatttagaaaaacttatattgatggcagcaaaatgttatgactccttctattcaaccttgtaataacaagatctgaacttggatctccttcaagtgttggattcttcacaatcttccacactataattgggtacttgacttgatatgagtgggcatgtactcttcactaggaattcgaagtttaatgaagaagaaaagggagaaggatttcaaaatagct

SEQ ID NO: 56212 - DNA, 762 bp, Cannabis sativa
tgagtcaattaaagcgattagaacaaatgataattttttaaagaaattaagcaataagaacacatagatttatagaggttcaaccctgtgattgtggaaatagcctactccactttttgttgtattacttgtgagaaaagaatcagaaagttcttaatctctttcgaaagcttacaatttttatagcataaagagctcttcttgaacaattgatttcagatccctgaatagtgaaatagctccactatctataagaaagaattacattaattagtttcccaaataaataagaaaataacaaagaaaattaggaatgtttcccattttataacacgtgtggatatcccattaaaataagaatttaattaataaaataaataaggaaagtatttctgaatatattctattcacgtttactctagctatcatatacgggcttattgcgagatcgacgttgtttggacaatatcatttatcctgtccagatgttccagcttaatcttcaactaaactatttccaaggaataacttactcttgatgacataccgagaatggttccacccgtccaggtcttaaaatgttcacgtgtcacttggatggctgacaagtcatcctgtgtggaatttgggataacaataagtatgatgagctgagtcagttctggtatgtatactgtgaggggctacgaatgagcaaacggtctaaaacgccggtggagccttggttttgtatttagtcagtaaagtaatctgagctcagtg

SEQ ID NO: 56213 - DNA, 1473 bp, Cannabis sativa
  modified_base (327)..(329): a, c, t, g, unknown or other
cttttctctcttctactgaatataagtctagggttcaaaggggtatttttattttgttttcttcttctaaatggcagtaacgaaaatggtgttgtagggttttctaggttttattttcttactcctcttttgttctacccgaaaaaacaaacccagaaaacctaagcttctacccgaaacactaaacccagaaaactctcttcaattttcggccaaatcactacacacctgaaaatagcaagaacacacaatacacacacaaatacaaatgtaaacaatatagggattaagatgagagatacaaacagaaatggtaaagatggagannncaaatttgatctcggagttcgcccaaaacaaccggctacttctccgtcaagccctcagcttgattccattaatcatcaaataacaggttacactcttgatttacaactatatgtatttctctatgtttttctctctttggatactaacaaaactctcttttctttttacataaacactcaagagattctctaagaggagctcacatggaggggacaactctcagccaaaaggctctcttttttctctttcttatttctgctgttgtgctctactgtatctctttggctctgtatatctctttgttatgagaaaaatatttccttttatagactaatatgtgattctgatctagggcagagccctagtgatatttgtaactgtttcagttgtaactgatttaatgttctttagtcttgatctttattgtatttgatgtaagggtatatttgtcaatccatgtgagtggtgttattcaacgtaaggataaataagtgaatctgtaacaagactatgttttcagaattaggttatgatgctaaatctaaacttttttatttccagcacgatctccaaaacaattagaatagaaagaatgtgataatgtaagatcataatagcctctggtgcaggaagatctctaagtatggaatattccagctcaacatgcaatgtgttaggtatactttaccgaacgatataattccatgacttgggaaggaactgtctccacccttggttcaattcctaaatgaacctttcgtagatttcaccacctattcgctcaaaatagtggtgatgctagatcttgggttccagagaaccactactcaattcaaaatcactcaaacagctgcctgatgagctctcacaggaggaactggctgagcgatagtcttcatacagaatacttagtaaatcctcatcaatttggttgtcacctccctagtagttgtacaagttcatctgtgcagaaaggtagagaaaggtaaacaaccagagatcataaaatacacatggataaaaccacaagctaattaaccaaaaattaagggtattaaccggacagcctgaagatggtgtatcattaaccgattagcctagatttgataggccaagaatcgactagtttaaaattggttctac

SEQ ID NO: 56214 - DNA, 790 bp, Cannabis sativa
tactcgagcctcatttatctgaacagatagcttcttgaattgctccttgttccatttggttaggtgatccttggtgtgcttgatcttgcgataaagattaaccattggatgttgatgacctttctctatccaagctctttttaccacccaaaacactctaggatctctttcccacatcatttcgtacttgaattggggcttggtgcagaactttccacctagggtgtccaaaagaataggattgtgatcggaagaagtagcagtgaggtgggagacaatagcattcggccagtcaactctccaatcggttgaagccatggctctatcaagacgagctctcttcaaggaagatcccacagagggatccatacttttcttgaaccatgtaaacttgacccctgtgtatcccagatcaactaacccggttcgatggaccattcttcttaagtcgaaggagtacctcgttgtattggaggcattggcataattcaagttttctccatcttttaaagtgccattaaggtctcccattaagagcagaggaaagttgcagtgatcaatatactccccaacctttttccaaaattcctccttttccccgaaagaaggaggcccatagattcccatgatgatccatggtcgctccggaggatcggaggatataattccaatgactttattctaatcggcatcctgtatattacaatccacacccaatttccagcaaagcgctagcccgcccccagttccctgcggagggacataacatattcctggaaaatgcagtttt

SEQ ID NO: 56215 - DNA, 592 bp, Cannabis sativa
cacaatttaaccaagaacatacaaaactgaaaaacaatggcgaaaattttcaagctcccctactatcgaaatcaaaaattttcaagttcttctctataataaacctgcattataacagttaaatagtctttgttatatatcaattgaaaagaaagggaatcaaaatcatacatcccaaatcatgaaaccctacaatttaataatttctctaattcaaataaaggtaagacgaaccaaaaaaaatatcaagctctctaacaatgatgaaaaatttgaagattgttttgtaaagatggactttgtgaaaatttttattagcaaaacaaccttacaaaaaaaaaattattagcaaaataaccatgtacagtcacttgtgcgatatggtcgttttccaactatagattaagtgtgcgaccatcatggtcgcctagagtaaattgagtgtgattattttgcaaatttgactatttcacattcttagtttgtcaaatttcccaaatttgaagctgcctactatcaaaatcgaaaattttcaagttcttctctataataaccctaaaatttaataattaaaatctcaagctccatacca

SEQ ID NO: 56216 - DNA, 1312 bp, Cannabis sativa
  modified_base (1260)..(1287): a, c, t, g, unknown or other
cttagaattgcactctcagactttatgcttccaagaattgaccagcttgtagacgccacagtttgccatgaaaacctaagtctcatggacgtgtattcaggttataaccaaataaacatgcatccaccaaattaggtacatacaagcatcatgataaacttaggcctatactgctacaaagtcatgcccttcgggctaaagaatgcgagggccacatatcagaggctcgtgaacaaaatgttcaaagaccttatcagccgaaacatggaggtgtatgtggacgacatgcttgtcaagtccaacaaggcaaggggcatgtgtaggacctagacgaatgcttcaaaatcctccacaactacaaaatgaagctcaatccccacatatgttctttcagagtaggctccaaaaaattccttggctttatagttaatgctaggggaatagaagcaaacccagacaagatccaagttcttttagacatgaagtcgcccataacaatcatggaagcataaagcctaataggaagctttactgtactaagcagatttgtatccaagtctacagataaatgtgtacccttcttcaatattcacagacgtaacaaaaaattcgagtggacaaaggaatgtgaagctgcattctaggagctgaagaagcaatttgctcaaccacctattttatcaaaacccctagacaatgaaaacataggcgtgtacgtagcagtcatagaacatgttgtgagtgatgtcctcacaatagaagaaaaaggtgtacagcaccctgtatactacatcaacaagagactaatcgacgtggaaagtaggtacccactcatggagaagctgacctacaacttgctcttggcttttagaaagctaaggccacacttccaagcgcaccctataaaggtgtacaccgatcatccattgcggcaagttttatagaaacctaaagcatcaggccgactactcgagtgcgccattgaacttggccagttcgacctcacatatcaaccaaggacggccataaaaggttaagcccttgtagacttggtggctatgtgcacaaactcatctcttgaaatctctcgagatctaggagaaccgcaagaggcaaagaaaaagtaagaggaagagcaacaataaaaacatgaagaaccaacatggaaactccatgttgatggaagttgcactgaccaattgtctggtgcagacattgcccttataacactggtggcagctgttggaatttattttaccnnnnnnnnnnnnnnnnnnnnnnnnnnnnttattaacatcctaaataagaactt

SEQ ID NO: 56217 - DNA, 1021 bp, Cannabis sativa
aataacaatagctagttaatcgaaataaaaataaaattaataagactacccgtatatgtcattaatatgttgtcaaatttcgtacatttttttcttgatttttgtacttcttttttcttctattatcttccacacgttaatatatagaaataattaataaaaacaatataaaaaaaataatcaatggatatacacatctacacatcttcttacaaagagttcttcataggtattttattattattatttttcttgaaagcgttcatcataggtatttagtttcttctagaaagaaaaaagtctctagaatatctcatttttctccaagtataaaaataaatgatcaattttttgttttaaaaaagtattaccatgtattcatatgagatttagcaattatttttataaacaaattgcttttctaaaaaattaaataaataaaattacatatttcttcaaatagttatgacttttataaatttaaatttgatcaaaatttcaaatataactctaaaatagtttaaaaaattctaccatacacttatttttctggtcatggtaattttttttttcaaaatttaaggagatcacaactcagaagttttactatcttcaacttcattttaattttttgaaaaataactaaaatagtattattaaaatttgaacttatttttatggtggtgtatgttgtatttaatgttattataaaatatcctaaataaatatatacataagcatgtacataattatagaaaaaattaaattaaaaaacattgtgcacactccattttaaaagctgcattgtagaaacacttaaaaattttgcacaaaactgggtggcccaaaccaaatgacaaagttgcactttatatatccttgtaaataaggattcatattccatgtgagactctttccacttcacacactctagaagactcttatattttgttaaaaaattcatcaaaattccaacaataactgtacataaaacctaagaacaagaaatatttatattaaa

SEQ ID NO: 56218 - DNA, 1448 bp, Cannabis sativa
aaagaatctacctctagttgtaaaggaaaggattttctccacagtcaagaagaacagtgatgtattagcttggagtcatctgatatgattggaatcagtcctcatgtgatttgtcgtgcattttgattataccccgaataggcgtccagtaagcttaatatctcgtggtcggccgttgcatccacgagttgatctattcttagaagtggaaaatagcctttggggcacgccttgttgaggtcggtgaagtatatacatactcgtcattttttgttccacttgggtaccaatacggggttagctacccaggccgagtagaaagcctcgattatgaaattgttgtagcgtagcttttctacctccttttttagtgcttgggcccgttccttgtctagcagtcttcttttttgttgaacaggtcagaagtttagatcgatgttagggcgtgtaaaattatagaagtatcgatatcgaccatgtcttcatgtgaccaggcgaaaatgtctaggtttgctcttagaaattttatcagagctgattttacttcgagcaacaaaccttttccaattttgagtttccttgtcggaacacttgggtcaatttcaatttcttctaattcttccaccaacccaacatttatatttggctccccaagtcggggatccacatcttcatccctgccttgggctgttccctatttggcaatgcttttcctcttgtccgaactctgatcgtaggattcttcctttttggccttggttagggcaaggttgtaacattcccgtgcaacttgttaatttcctttcaagcaccctaccccattctttgttgggaacttaatgcacgaatggaaaattgatgtaacaacttttaagtcatataaggctggtcaattaacatgacgttaaaggctgatggaacatcaagtaccaggaattgtgccatcacagttatgctctatggagcttttccaacagtgaggggtaggcgaattttccctagaggtgcaacactctggccaaagaaaccatacacgggctggatacagggaatcacatctttgagtttgagccccattttttcatacggtgttttgaacaggatatttggtgaggctccattatctatcatagtttgggccactgttttgttggctatttgtacttccacgactaatggattattgtacgggaagtaaacattgacatcatcttctttagtgaatgttatagtgggttctcctacccgtggcatttttggctcgctttcttctacggccagaaccacttctttttgttcatgttgtaaggttcgggcatacctatcccgagctttgctcgaatctccaactatatgtgcattgggatttgtgccctaaataaaactctatttcaatgtaatcttttctattcaattatcaataaagaaacagatttaatttcattact

SEQ ID NO: 56219 - DNA, 1934 bp, Cannabis sativa
agaagttcaattttaggttgttaaatcaacatacttgtgagtagatctaagttcttggtaaaatatatttccaacaggttcgacactaaacttttggccatggaggaagccaaatatgttagcacaatgaaggtagaagagttaacgggttctttgcatacttttgaattaaatcgacaaatcaattaaaaggaaaaacctaagtccattggtgataacggtaaaagtatcgatttaaaagttactgaaaaagaaagttctgataatgaatgtgaaaatgaaattactttattaaacaagaactttcaaaaatatatgaaaaagatgggtaataaaaagaataatctgaaattttcaaaagtaaatacaccttttaaatcctttgtgactaataaaaaggtaattcagtgcagggaatgtgaaggctttgggcacattcaatttgagtgtgcaaacactctgaaaaagaataggaaaagtttcaatgtcacttggagtgatgatgaaactgagagtgatgaacaaaattctgagaatgttactctaacctcatttattcctagtttgttgtgtgattcacaggggaaacagaaattgatatgtttaaataataccattgaaaaagaagattctgattcaaatgattccaaaatttttgaagagtctctcgttgaatcatacaaggtcatgtatgaaaagtggatacaagttacttctgaaaatagagtcttgtctaaaatgaataaacaattgtctcatcaaattgaaacttttgaattaaatattaaagattttgagattgactttttcattaaagatgaaaagattactctattaaagaaggaataacttgaaagtctcaagaaaaatgtttaaatgcttaaccctggatcttctatttttgagaaagttcagaatgcatgtcaaagaggctttgctggtcttggatcagatggtactgaaagttctggaatcacaaaatttgtaaaatctagtgttccaacaagttttcctgatgttacaaatttaaagtttcctgctgtaaattcaaagtatgtcgctgcaaaggcagaaacagtagaagcaaaatctccagtaattacaaaaagagtaagatctcaggtaagtatatttgtccatatttgtcatttttgtggcaggaagagacatattaggcctaaatgttttaccatggagaatatgtacaaaacaaatcattttgataatttgaaaaattttcaaaagaagcatagtgttatcaaacagaaatggattgaaaaataaaaatgtgtagctggtttttctgataaaagttttgcttcacaaatttggtatttgacagtggtttctctagacatatgacaggtgacaaaatttttttgataaacatcatgccaatgtagtgtggcgaagtcacatttgggaatgacttagctagaaatgtcattggaatggaaactctcaatttttaagggttgctcaaattgaaaaatgtgatgttggttgagggactaagggctaatttacttagcgttcgtcaaatatgtgaccaagggtatactttctcttttgatagtgatcattgttatgtacttaatgatgataatcaatgtgtcttgtaaggatttcgatctaatgatattttttataccctaaaccctgtgttcacttgtcattcagctatcaacaacactgatttgtggcatgcaaaacttatacatattaattataaaaatttgaagaaaaaaattgtccaatataggtgttattcgtggactacccaaactgggtaaagaaagtgttggttagtgtgaactttatcaacttggtaagcaattgaaaatcactcacgaaagtatttcagatattaatactacaaaagtattggaattgcttcacatggatcttatgggtccaattcaagttgaaagtat

SEQ ID NO: 56220 - DNA, 3089 bp, Cannabis sativa
aaattacttgggggcatatatgtgcataataactagattccacctagaaatatatacaaaaatgctaaacacctaaaaattaaatttttttcacaaaggaaatgatgattgattaaaattatctttgggcagtataaattcaagaattgaaaaactttttctttaagagaaaattaaattagtagttgtaagtgagattctttctcataaagcaacaggaagttatatacaatctgagtaaataacggcttgcatgactagagcatgtattataaacaagatacaaatgtatcttgagaaataaaacataagctaaaatataaataaaggattaactattcatataagtaatcaaaaattattcaaaattattttttaaaaaaactattcaaaatatttgaaatttgctctaaacataacagattaatgctcgcgaataacatagaaaattgcaaacttcttgcagaaaacatggtagattattaactgctcgtctaaaataagataatgacgatggaacacatataacccaaaaatatcctaagctaaattgaggagaatgttttgttgtgaataaaaacgcaataatcaaacgttgataactcgaaaatagcaagataaaaagctatatatataaattagcaatgttggccattcaacaaagcaaaggtttaaatatattacaaaaataccacagggggcaaaccattgtctcggcctaagggccactattcaaaaattaaaatgataaaaactatacatagttagagatttagtgggatcttcttcttcttcttcaacttcctcttctgcagcatcttcatcttttttggcttgttcacaaaaagcaagcatctcctcggtgccatcctccaagaaacttaaatccatatttagagttccaaccaagccctttagatggaacgctaggcaacataattacatctagccttggcattggccttggcctcttcaagtttctctttggcatcatcaagctcttcttgaattttttgatgggccttgaggtgatccttggcagctttttgggcattcttgagctcagccttgtgggattttctctgctctttagcttccccgttcaaccgaagaatctcagcttgagaatcggtccattgcttcgcaataacttcacgttggtcgttggactttcaaagctcatattccaactgcttgattctttgaagacccatttgatgatccaagtaagacaaaaaagatgtctgcaatagaactaagtcaggaaaggatgactaaaagaagaagtatgaaatcaaaatacaaaatgaagatgcatgctaaccgagagagtaagattggtgctcctctcagataaactttcaaaatcgccattatttatcaaatcccaatcatcatattggaaggatttgtaatgacgccaacatgcggtggcatactacaaggaaacttccgaacccttaatgtctgcagaactaggcaaggggcaagaaggctccaagagcaccatctcaggttgtgaacctaagaatttaacctaatgaacagaccctaaagtatgttcatcagtgctctcagcagcaggaaccgaggaggtcacttgaggtgcctctagcttcataaccatatgggtcgaggcgcatctttgttggcagttgatttttttcaatctcttcaatggttctgggtttgtcccagaagaggtttctaacacaacggcttgcttcatgcctttcttggaacccgaggtggacaagagatttttaaagtccatatctgcaataaagtgtcaacacttgtacaaaataaacaagaaaattatggtgagataatcgtccactttagaaaattaccatagtcatctgacaaggaagaagaactataataacaactagactccctagaacaagtaatcatgaaaaggtcaaaggtgtttagaggagatatgtcccaatctagatggctcgccctatcaaagttagggccatattatttggcaatcccgaagtatgaactattacaacctagttgaacgtgaggctcgggataccaactgtcaaacctatgaacgatgtgatctacacagttccaaatataaaaattgcactaactatccctaaacttaactaaggttgtatgctcggctctaagtacagtaggagaccatccacaaactccaaatttattacctcgggcttcgtcttcagcttcccgaggggttgtgttcttcaaatagtgggtgtgagccacacaatctctatcctcctcgtatgtaggaactggaacttgttgccaatttgagaattttgggaccttaaagtctccagtagattgtttgcttccaagaagagcacatgctttcaagttgttctcgtgcaacaagaaatcagctgctcgcaatctaaaaggatgaccaagaagaatcatgtgcattttttctagtgatcgctatcaatacatcacaaataaaattagtacgataaagcctacatttattaaaattaaaactcaaaaccaagtttttgagaaaggcaatacttatgtatgagttggaatgtagttgtgttgatgggggagagacctgaagtccataaattgggtaacctcacaataatcctttgatcattggcatgggtcgcaagatagtaaaaaccacctgctcctcacttccttgagggacaggccttcacagagtacaaataaagaatttctagtggggtcgggcactcccacttccgaatatgatataaagattttagactggccagtattctgtacgaatttggtaccagttggaatggaacaatgccaaggtagttgcaaaactccttaaaataatctttaagagggattattgctccagctcttatgtgtttaaggccccaagcgcctattctagatggctcactagtgttacagccttcttctcgaaccactcattcagggaaaaaccaattgaactcccccttagcaacagacctaactcataatccttgttcatatttgatgccacatgattttaacaaatcaccaacataagatcctatggatctaacttcaaactcgatcagttcagcctcgaaggtgac

SEQ ID NO: 56221 - DNA, 1397 bp, Cannabis sativa
ggtctaaaatttgatattgggggttttattagggtcaaataatgaaatttcccaattaaaatctaaaaataggtttcataaatcaaaagaaaaacatattcttatttactctcattgaaacacaaaacaataattttttaaaaactctttttgtcccaaacacttacaatgatgtaaaagattttttattttctgtaaaagttgcttaaaaaaaatcagatatacacaatcatacaaaattagagtgcaaaatcatatacaaaataatatatttatgcaatgcacatatacttaattttattaaaaaaaaaactatctatctaaagtggaacgataagaaaattaataaaagaaatcattattgtttattattaattggttgatacagattgtattactgaaaatcttttcttatgtatacgaaattcattcttgaagtaacattagaaaatagaaaaatcagcactatatttcttttcttgcatccatatgttatccaaagcaatatcaatatttatctcaaaacaatcaataagactatgcataagagtataattaaaggggtaaaaaatgacccctttaattgatctcctagataagaaaatttgccatattataatttgcaatactcaaacttctgtacaccctcataaccaaaataacatataagaatctaatgaaatacatcttagatgacatatatcttagatgtcaatcaacaccatctaaagatgacatatatcaaaattccatttttgttccttttaaaaaaatacataaaatatctgtctaaataccaagaatactacattaaaatcgaagtagattaatggaacaatatattgccaagcatactctaaaaagttgaaggaattcaaattgataattgatcctcgatatagacttggagatttccattgagacaaaatcaaattgacacaatgtatcataaagagttctatgtttcacaacattattttctaaaattttctcactccaacgcaccaagataccctttcaacgtcacttagaacagcgttggtaatgaattttgccaaaatcgacactgaaaaaccttaaaaaccgcctctaaaatccaattttgtagtagtgacatatatctaagtttaaacaaaatcaaaactgaagaagtctaaactctttcaaagaactcgccggttgtagttgcgaccttctaaagaaaacttgtgagcttttttttacctccaatgatttcaaaaccagtaaaagaataaagagtgatgtgagagtaacacaaccatgatatagtacctacctagtcccactcggtataatggaaacaacaagaaaggtaatgtcaaattaaagttgcaaaatttactattaaagaatgtcaaggataataaatagtttgt

SEQ ID NO: 56222 - DNA, 1047 bp, Cannabis sativa
atattttttgtatttttaaaattgattttatttgtacatctattatttttgaaaatatgttttctcttttttagtgtgaaaaaggctttcaaatcaaattctattcagtaatttttttaaaaataaatatgagtttctttttaaaattatttgatattatttttgtatttttaagaaaattcttaatcatatttatttcatgtttacttaatttcttaacccaaaaaactgtatacaagttgccttatttatttataaaaaagactatatagtataaaatccgaacaagaaaaattgcccagtttagaagctcagcccaattaaacatctgtttagaagcctggcccaaatgaagaaaagcccagcccaaacatgaaagcccataaacaaacataggctggctgcttcctttctttgttgtcattctgtactatactctctccaatccatcacggcctcaagaagtctctctctctctctctctctggtacactgactgaggtgaggttcttactttcttcattccatttattttctcgatttactaattgtattcttcgatctgggtttgtttatatactgttcaattttgatccattcccatttgagttctttgtgtttgattcaaattaggatatattctttctgttgtttggttgcagagaaatatgtctgaaatgaaattatacatattttatggtgaatattgatgtattatagattatttgatgtgataattcattttggggatttgggttgggcattttttctgatagtaaatactgaatttgatcacttagactgttgatattggaatcatatagcatgtttatgacactgtatattgatttattacaacaacagatgtatttcaattaccaaaattatcttttgtttaagctgaaatataggttatgtcaaaagtcttgcttagtaaatgattagggctttcaagtagttaatagaccatatgttcttacagtcacaaacagtaatttaaaatttcaggcaatgggtttcaagtagttaatagaacatatgtttaca

SEQ ID NO: 56223 - DNA, 1103 bp, Cannabis sativa
cacgaattactacatgtcaaatttcaaaaggaaaaattattaattagcctttaacaattctaacatattaattaatactacactaatgttacattattaaatttcttcaaaaagaaaaagaagagaacatattagaatgggcacattttcaacatttgttatagttaataggcactattagaaaaaaaaaattccttttaattccatcaacattggactagatacaaagacatagaaagagttatttgtagtaataaggagatttttactacctaaaaccacaacaagggcattagttcgtgtgaaaaagtaaaaattaattacatatttatgggattttctttttgtgtcttctaaaaaaatgaattttcttttaattaaattttatatggtctttttaaaaaatttaattttttatgagattttttcactttagtttttatactatatgtttagttttttttccttcaagaaatcagtttctcaatatttatgaatgcgtaatagtaacttgattctttttttggtgatataagtgtattttatttgtgttgtttttcaattggttttttatttaattattttaggaattggttcttgatttagttaattcaagaaatcgtttgtttttccatgcaacttgtttttgtgggttagtcttaatttagttactttatgtaatcagtttctttgtatcatattttttatttagctaatacatgtaactagtttttgtatttttctttatttaaccagttttttgttttaatttatcctttcattatttagtattttattttttcatttcaatttttactatattgtattaaatatctagtttgtgtgtttaattattggctttttttaacataagttagttttaagtttcagattttgattttgttattttagatgactggtttttgtatattagtttttattttggttgttttacagaattaattttttttgtctctgataacgtacgtccaacttcaacatctaactctgctgatttttcagtagcgatgacagctccggtgatttttctagccatgatgataatgtcgatgactttttcaacaacaatgtcaaattcatat

SEQ ID NO: 56224 - DNA, 593 bp, Cannabis sativa
agacgtttgaaaccactctcagacgactggtcgtcattgatcggcgacgccggccgactaaactgaacggaagcttatcgacgtcccaaccaatacgcaatatcttctctctccaatacgcgtgtgatatttctctctccagtacgcgtgcaatatttctctctttatataacttgattttttatcattattacttagaaagatatctttaattatataatatgtgtatatatttatgatcacaatttaaatatttccttaaattgaaacaataaataagtagatacatatttattttaaaatttacatttaaaataaagtattatggtatccctcgttagaatttttctttcccataataatttagaacaaacaatagtagtatcttttttatatgtacattcaatttaataataataatagtaatagtgaaaacacgttagggtataaattaaaatttataacatacaaagagtataatcttacacaatacaataagttgatatatatatatatatactagtaaaaagttacgtgcaaggcacgtatactaaattttatatgctaggtattttctattatattaaaaggta

SEQ ID NO: 56225 - DNA, 783 bp, Cannabis sativa
tggatgacacgttatttatttctatggttgagaaattccatttcaaatgtatatattacatagacttgactagctagtggatattaataagctgtatagtctcaaaattaatcaacaaaattctaaccaaattaataatagaataggacaatatatattgtataaaaatcaagaagtccaccaggcttgacctactaatcaatgctatttattatttaaaaaaaaaaaaaagatgaaaaaaatgtatatatatgtgtctttttgaagtagaaatagtgttacatgtgtcaaaaaatcagatcaaagttcattaaatggcctcgtaaaattttggcagtgtaagtgatactaattatgataatgaccctatacatagctatatagctttttgcatcagaaaatgagacccatatattatacaacattgatatagaaaatggtgtctataataatttctaaagagattattttgtgaccagatttaatatttaactatattaatattgatattaatacataaaagaataataaggaccagactcaatcttgagaataagtagtatttagggcccacctacgccaaaaaaaataatcccatcttttaaaaatatacatttttcattaatttgaataatactacatttttttacaaaattatattatataccttttttttattactcttttatttatacctacttttataaattatattccaattatgtagattagagactctaatttaaataaattatgtggggttatatttgatactttaattat

SEQ ID NO: 56226 - DNA, 1639 bp, Cannabis sativa
  modified_base (857)..(862): a, c, t, g, unknown or other
tggtcggttcatgcctgggtcttgggacaaagcgggtagctagttttttgtcctgttttgacattgacaaaaatcttgtcatggccttgcaggcatatacatccttagtctctgacgtggttcccttagaaactctgtatgaaccttaatgatgagtctattatagtcaaatcctcaacttaagactcaatatttgttgaagttgttatacctaaaattgtacttcattgatacaccagccttgtacaatgacaatatctggcaagtacccttgagtacggttgaccagagtcttgtgtatggcttggaacctgcaaggaactatgccttttggcttggaaccagctaggaactctatcttgccttacagatttagcccggtacgtggttcctataggaactctgtctggttcttttttagatgtacggttctcacaaggcattaaccttatgcatttgaactaattttttattcatatttggccttaaggctttcatattctttcttttgtcctataggcaccctatttttgaacattataattgtttagccttaaagccttttactatagacatatgatcgtcctggctatcttcttattttgacatgtaagtatcaagatttatttttctttatgccaagcagaagtatgtatgcacatgagttagaggcacgtttactagtttatactaagaattaaaatttgtttgcataagttctctgtgctagttcaatgcattgtatagtgtgggtgcccctaagtgagcacatagacttacgatctgttggtcaccaagtttcataaaccttgcctaggaattttcatgggggtgctactgggtgtacgcatgtggannnnnnaaagaataactttaagaagttagtctttttagcatgtgctttagacataattggtcttatgtgtaacaaaagcttatatcttaatgtttgcttttaaaatcacattttggctacccctgcttgacatgttaggcaaaggccatcgctgaagagcgatgggaggccatgctaaaaagtgatgggtactagctcttttatatttggctacctttacagggcttaccgtgcaaaggtcatcactgtagagtgatggtaggccatcattgaagagcgatcggtactagctcttttctgaattcctgcacggtgaaatgttagaggaaccactattgaagagtacaaatttgctagtgagagtacttaccgagatgttttccattccaatatttttgtagaggagccaaccccaagttctgattgtactccctaggcttgtatgcaccttttcttataatctagaaacttggtgcaaaccttttcagttttgtccaaatatgcttgctgtaggatctttgttatcaagatgattctttagagcaataagtatcttatgaagaatttcctcttcttgacatgtttgttgaagtactagcaactttttgctccaagacatgctcctttaagttggcttggtctcctcctttttacctttcaccaagggattctactggcatgatgtggtttacttcttggacatagtagaccaaaagagcatgatagtagattgttggcagataaggctagctagagtatctaggtagccagccacattgaggg

SEQ ID NO: 56227 - DNA, 5925 bp, Cannabis sativa
tccaaacttgccatgtggcatctaagtattaagaatttatttacttttaaagataaatgctaaaagtagtcgtattactagcattattctattaatatctattgactcttataaaatttaatatagtaatttttaaagaattgttagctaatcacaaaaaaaatttaaattatactaatagtaatataatatttattttcattcatacacaatttatattaaatttaattacatgctccttataagcttaagattttaaatcaaaatagtttccaacacaaaaatccacaagaaagcttcttaatttgtagttttttataattaattttagagaattgataaaggatacttaagagggatgcagaagattaaatcaagaaagaagaaccaaaacattaaaaaaaattgaggtactcgtagtaatccttataagtaataattttgttactaatataatttaatatcgaatttaacttattttaatttgataaacatctaacaattataaacaatatgtaataaaatgagttcttttcttattatggttgacgaatttttaatttggtatttatttttatattgatttttttaatattataaaaccctaaatctaaagtaaactcatctgcattgactcattcactctcatctcatttcagtctctcactccaattctctcgatccacctctctctctctctcatctccattttttccggcgacggctttgacaggctctcctacctctgtatgactctccaacaggtattcaacatttttaccttctccgatctcgtaacaactaatttgttcatttaatttttttgtgttcattattgctatttcttgacagaaaatgtatgagtattaatgatttataatttttctgctcattattgtaattttaggatcagattcgttgtttttgacccgattttttcatttcttaaattttttattgaaagaagatactagaactagctagcttactatctagacgacgatgaggaagtggactattccttcggttcttcttctcctctgccttctctgccttctaccagatcaaggtaatcttatgtctttccatttggatctttgtactttttccgccattttcaaatttgaatagatcttggacacatttgatactgttcatctttctaatgctgtaattcatcttagatcgtatatagttaagctcatctcattcctgagaatcagctgttttttcttctcggaattaactttgaatggatcttgtacgcatccgatactgttcatcttcatcattttttgatgaaattcatcttaagatcgtatatagttaagctcattcgtgagaatcagttgttttttagaattaacttgcttaatgtgaatgttttggggatctgtggcggttcaggtcgtaaaatacacgtaaatgcggaggacaactccgatgagcttgtagatccaccgaagatcgaagacaaaatcggtgccgttccaaatggtttatctaccgactccgatgtcgttaagaggtttgtacaaatctcctttcttcgtctcgtttacgttattagctcactttactgtatttttggtttattttttgaatttatttaagtgataaattaaaaaaagttgcacttcgttttagggaggcggagtcaatttcaaggagatctcttcgcaacactgcggagaagtttgagttccaggcagaggtgtctagactcatggatatcattatcaactccctttatagtaacaaagacattttcttgagggaattgatctccaatgcttctgatgtaagtttgtttagttgttatcattcttatcaccttaattaattgctgcccagattggagttgagtttaatgttaaaactttgataactttggttaggcattggacaagattagattcctttccctcacagacaaggaaattttgggcgaaggtgataacgctaagcttgacattcaggttagttagtgttgtaagacataaaaattaatgcgtttggattggacataagtatggtgctatatataatgctcttaactgaacaactgaaaatgaaacaaaacattattacagattaaattagacaaagagaagaaaatcctttcaattcgtgacagaggtataggcatgactaaggaggacttgattaagaacttgggtactatagcaaaatctgggacatcaggtatgtatattaaaaaacattgacaattatagtgtaatttttaactattagaaggattatattgatttggaaaatgtccttatctgcagcatttgtggagaagatgcagaccagtggagatctcaatctcattggtcaatttggagtggggttctactctgtgtatcttgttgcggactatgttgaagtcattagtaagaacaatgatgacaaacagtaagtatcatgcattgagacaaggtttcaaaatcattacaaacacacacataaattgagtaatctgacaatgataaaaaaaacttgtctatataggtacgtttgggagtcaaaggctgatggtgcgtttgctatttctgaagatacatggaatgaaccactaggacgtggaactgagattagattgcaccttagagatgaagctggggagtacttggaagagagcaagctaaaggtgagtgtagtcagtttttattttttaaaataattagttactcgtcttatcatagtaaggagcaactacttctcggtatctcttatttgtattgctatgattatcttgcattatttcttgtgattctgacatgcagttgtaatcttgttataggacttagtaaaaaggtattctgaattcatcaactttcccatatacctctgggcaagcaaggaggttgaagtagaggttcctgctgatgaagatgacactagtgaagaagaggaatcaagtatgctttattctattcagaatctatttctttcattcggagcttgttactcatagcagaattccatatatgatttgtatttaaattttgctgtttgtaatttctgtttacatgttcttgctcctttaatcatttaaacagctgaaactaaaacatctgaggaagaagaggaggatgctgagaaaactgaagatgaagactccgagaaaaaaccaaagacaaagaaggtgaaggaaacaacttatgaatgggaacttttgaatgatgtcaaagctatttggctgcggagtcccaaggaggtgacagaagaagagtacaacaaattctaccactctcttgctaaggtacacatgtacagaagctgcaaatatgttatacgttgtgtttaattgttttaggcctgtcacacacatattcttagctttgaatcttctatgttttcatacaggatttcagtgatgataagcctttaacatggagtcatttcactgctgaaggtgatgtggagttcaaggctgtgttgtttgtgccccctaaagctcctcatgatctttatgagagttactacaacgccaacaaatccaacttgaaattatatgtcagaagggttttcatctcagatgaatttgatgagcttttgccaaaatacttgaactttttaatggtaatgcaggataatacttttaaagtttaagcattatgtttgagagattgttttctaattggcttccactttgaacagggtcttgttgattctgacactctcccactcaatgtgtcgagagaaatgcttcaacagcacagcagtttgaaaactatcaagaagaagcttattcgcaaggcacttgatatgattcgtaagcttgctgaagaagatcccgatgaggccagctacaaagataagaaaggtgtgttgtctgtctgttcatgtttgctggtctacaacctgtctgtttaataataagctaatgaattccttacaattctcttttcttcgaatcttgttggaatcagacgttgaaaatgccggcgatgatgaggagaagagaggtcagtacacaaaattctggaatgaattcggaaagtctgtcaaattaggtatcatagaggatgccactaacaggaatcgtttggctaaacttctaagattcgagaggtaatctatcgttaaaatttaattttcatgggttcgaattttacattttgtgaattttcatgggttcatgtcgttaatattgtttattgatttttcttacagctccaagtctgatggcaaactaacatccttggatcagtacatttcaagaatgaaatcaggacagaaggatatattctacattacaggaaccagcaaagagcaattggagaaatctcctttcctcgagcgtcttaaaaagaagaactttgaggtatcaattcatgtctttgatccttgaataaaaaacctttacctattcacattacgggtttctcactttcttcaactcttgcaggttattttcttcacagatcccgttgatgaatacctgatgcaatacttgatggattacgaagacaagaagttccaaaacgtgtccaaggagggattgaaactcggtaaagactcaaaagacaaggagttcaaggagtcatttaaggaactcaccaagtggtggaagagcgctcttgcgagtgacaatgttgacgatgtgaaggtttccaaccgtttggatgacactccttgcgttgttgttacctccaagtatggttggagtgcaaatatggaaaagattatgcaatctcagactctatctgatgctagcaaacaagcatatatgcgtggtaagagggtgctcgaaatcaacccccgacacccaatcatcaaggaactccgagagagagttgttcagaacccagaggtgtgaatgaatgattacaccagctccttttttttgcttttccactcatgcattttctgatatgttttccgtctatattttcaggatgaaaacgtgaagcaaacagcacaactcatgtaccagactgcactcatcgagagtggcttcaaccttcccgaccccaaggactttgcatctcgaatctacagttccgtgaagtccaacctgaaaatcaatcccgatgcaacgatcgaggaggatgatgaagttgaagaggttgaggcagaaagtgagacaaaagaatctgctgccaccaccggagacgatggtgatgatgccggatctctcaaggacgaattgtagtttgcctgaagagggcaatggagacgtttaaatttttattgatagggattttgttaaagtttatttgtgtttcatggttcagtcaatgagacatgcatgcagcacaaacattaacgagtttttatttttatagagacaatagacatcattgagttatacataataaacagcttattagttacctaattaacttatatggtctaattagtattaccactcacgtagctataattaacatatattattgatagccaattttttaaaagcaacataaaggaagaagaaaagaaaaaaggccaaataaataatgatgcatattaattaggctaattaagatttttgttctctcaaataatgccctaaggctgttaattttttttaggtagtcatgatttagcacatgtcaaagtttgtggggcgtgttttggtagatatcaaagtttaaagaacataatttagtacatagacaattattgaattaataataaaattaaatgaaattgtacaaaattcattcaatccaacaattttaatagtccaaataaaatttttaacgacaatgaaaattaagagacatgatttagtatatgttaaaatttaaggacactttggtatacatatctaagaccctgataaacctaattagtattaggagaattggatgagatggtcctacaaattgagaaaataaatttgaatatatagtagtagatgataacctagtttgggaaaattaaagttattggtaaagttacgta

SEQ ID NO: 56228 - DNA, 1031 bp, Cannabis sativa
tcagcaacaaatcgtattgctagaaacattaaggcaggaacaatgggcactgggagaagagttgcaacataagatccatgctgccataacctctgaattttctcaccttgactctgaattttagtttgtatttctacaaaatttcactcttgatcttgtagattatgtggcagaataacataacttcctccaggagccctccaatggcatctacttcggttttggaggtgaggggaattccaatctctccaaccgctacttcggttgtagattatgcactattcagctaacatattgttaacatgcttcctatcaaacatttttaatcaaataaattactaaacaagtaaaggcttactaaatcatgagccgagcttgtctctgacgatgattgtacacatcttcacgacttttggtaaacaacctagtggctttgatactaaattgtaatgtcctacttgattaggaccgatacagtaattttctaattattatgcacatctttactacaaaagattttcttaaaaatcgttgcaaatttaaacttttaaattaactttaaacttttataaataaataactctacatcaaagtcatcccgtcttaaatagtttacaatattactcaaaatacattttacaaaagtatcattccgcgactatatagaatgacggcccaagtcgtctcaagaccgaacactccaagtctaaccattcttataagtacaaccattttcaagtgctatttttcctttccttgacttgcacatataaacaatttatgtgagccgacagactcattaagaaaagcatgcataagacatataacatattactgacttgtagctaggcgcccatacacctatctataaggcttaacaaattaatcaagaacattcttaatagaagtacgacctttgtaccacatgcactaagtactcgtcccgtgctaacgttggtaggactgaattgcacctcgagtaccactgagtgttgtaccacatgcactctttgttggattttatgccctaa

SEQ ID NO: 56229 - DNA, 980 bp, Cannabis sativa
caaggaaatactttaattccccaaggtctttgagtttgaacttgttgttcaaccggactttcaaagcctctagttcttgtgtatgattactcaccaaaattacatcatcgacatacacaagaagtagaatgaacttgtcaccaaaatacttaatgaagagagaatgatcggttgcagaatggtgaaaaccttcatgctctaaagctgtagaaaacttctcaaaccattgtcgagaagcttgttttaaaccatatagtgatttgtttaatttgcatactgcattgggtggtaactcccccttaggactatacccttgaggtatagtcatatacacatcctcatgcaaatcaccatgcaagaaagcattattaacatcgagttgatgtaaaatccacccattgacagcagcaagagcaagaatcaacttgacagtaaccaatttagcaacaggagcaaaggtttcaaaataatccactccttcttgttgatcatacccctttgcaactaatcgtgccttaaacctctcaaccgatccatcagcattgaacttaatcttgtaaacccatttgcaaccaatcacatgatgatgcaagggaagactaacaatagtccaagtattgttggcttcaagagccacaatttcattagccattgctgaatcccacacaggattcccccgagcttgaaaaaaattttctggttcttgcaaagtggaaatagccaaaataaaagctcgaaatctgggagacagcttagaataatcaaggacagcagacaaaggatgctctgtgaccaaatcctgatcctgagaaaacataccagcagaaaattttgtaagaaaacaatgataatcagtgagatatgaaggcttgtgatggtttcgggtaggtctggttctggaaacagatttggatgtagcaggatcatgaatgatagtggtgctgggagcagaattagatggaacatcactgctggtgttg

SEQ ID NO: 56230 - DNA, 765 bp, Cannabis sativa
aaaaaaaaaaaaaaacatgattttctaaatgttaattcttggtgtatgtgaagatcagtggtgttggcattacaatttcaatgattgctatacggtgaagagtggttatgcggttgctcttgatttggtgaacgaaaggattggttgttcttctgtgaatcaatctacttgatggaatgggatgtggaatttaaaaataccacagaaagtcaaaatctttctctggcgaatggatcatctggctctcccgactaattcccaacttatcaaatgtaagattcaagttcaaccgatttgccacagatgtggtgaggacacgatgactctggagcatgcgttagtgttttgttcttctttgcttcctatttggtcaaagcttcgggtttggagtcagttaaatcgatgtaggaatggttcgttagcggagctattggtttgcttatttgaggagcttggtcagagtaagtttgcgttgttgtctatgatttggtggtggggtgtggtatgatagaaactccgttttttttttttttgggaagaagcagtcaagacaagatctgctattagaattagcaaatgatgcattggaggagtttcaaggggcggcagtgcttactaatgctcgggttttggggaggctctcttgctagttttatggggtgggaattgaggctgctggtgtggagttggggcgggttgggaggagggaggtgtggtgtgcccaacacgttggtctccgccggagatgggtgagtttgtgttatc

SEQ ID NO: 56231 - DNA, 1120 bp, Cannabis sativa
tacattaaatatcaacattaaattataataaaatgtaaaagaataaatgaaggacagtttaaatctgtttcaataagtatagcagcgtatgcaacctctaaggtgcgagttgtctattcatattcccacacaagcttgcaggctttgggtgtgttttatcattctgaagaggactattgagccttgtgttaaggtgtttgtgttctgactgaatcgcatatatagacacctcatacacgtcgacaacataggacatgcgagccctatcgggttatcgaatacgctttgtcattcggatgaactcattatgtaaagaagcgatccttacttggtcgcagaagaaggctacttagtcatcgcatatgtctcaggatatgcgcaacttttatacatccttcttagtcctacttattttatattacgcgaagtgtaataatgcaactagactctgtcatggttacatcatctcgcgagttcagttcaggggaggcttattctcgagaagctccttcttgacaactcagcaattctctaggaatgtgagcccacgtgtcaattttataagaggatggtctcgagtttctaagtaaaaaatttacatataatacaaaaaaaatatcttattaaattaagaaaggtacttttgatattaagatagaaaaaaaagtgtgatttgtaaaaatcttgtaattttgtagctcatatgatatttctcatatgtgagctatgaaattaaaatgaaacgaaaattcaataattttaattactctacaattttaaaagctcaaagaacatactttagcacccgtaaaaatttaaagggtcaaaatctaatgttaattcctcttggactaatcttttccctaatgcgctcttcactcatcatgacttttttggttcggatcatcgtgccgtcgagcttgtcaccaccggtgctacctcttcgcaccccaagcatgggactaagcattttctctttgaaaatgtgtggctttcagaactgaattggcctaagaccttggagatgtcttggaactgttctgatggtctctcaggggacattcctcgcttggttgctactcaatcaaattgcgcaaaccagttaaatgcctagaaccat

SEQ ID NO: 56232 - DNA, 1048 bp, Cannabis sativa
tttttttttttttttctataaaagtttattttggtatatttcttcttttgaatagtggttaattcgatcgtttctggagtgggtaaaagaagacttgaatattgtaattaataagtttgaatggtgcattgtatatttttttcagttattcttagtgaggtcatgtgagaccataagtcgtatggaaaatataatttagagatgaaaaggtaaatgggtctctattttttccatgtagaatactaaaaggcaacttatacttgtgtagaaataaacaaacaaatttggaattttgagtttctacgttattagtgtgcatctctttattttcttctttcttttgggtaagtgatcgtgcatcttcgctaatcattcttcaacattattctcagcttctatttctaaaataaaacctttcatgcaatgggaatgggcaaaataggccacagtttaattaatttgaagacaaaatgcaatgattgattctctcaaataagaagctaatttttctatcttacaaaagattataaaatgagttttagttttaatctcaaagcttgttttggcataagaagaaatttatgacttgtagttaatgatattagcaacaagattagtttgagaatgattattagaaattagtgtctcggtcaaaatttttgcaacatggacgcattctattcaatagaaatattgttagttttggccattttatcaagtttgaagttttgtattattttccattttattgacactctagcttttcaaaatattgttattgaagtaaatcggattttatataatttaagataaattttttgaaagttattattaattaattatagagtgtcacctttaagtagtgttagattctactaatgtttaataataatgttttttgactaatgtattgttatcaatcttgcttatttgttgctaaagtaactttgatcattgaagactcttttgctactcatttgttagagaaatgttaagtaagaagtatgacatactattattggtagaatttataggagttttttttttt

SEQ ID NO: 56233 - DNA, 898 bp, Cannabis sativa
tcaagagcttgccgacgccttcaccaagcctctctcttccacaattctcacttctcacattcacaaaatggctgtatatgatgtatacagtccatcttgagggggggggtaataagtattacactactatgtaatagcagttgtgactgttagtgagtattaattagttggtttctctgttttatttctttttctactgttgtgacctctttctgttatgttagttaagaggatagtctgtgattagcttatatacatatatatatatattccctcattgtaatcaattcaatgaataataattccctttcttttctttgttttctcctccgtttcttccgcaacaaattttgaaatctacttggattgaatcgaatgatgattttccagatctaattactaattagattggatgagaaaaaaagtgttggattggattcccaccatatgatatactttgttggttattttattaaagtttggactctgtgtctgtattgtgttttacattactcataatgaccaaggcacacctaagcttgtttgttcaatctactctcaaacaaaagtctgatttttttaggttgaagttatcataaaagcttttgaattcaatccaaaataaattctaccaaagcattcactctgtatatcccaacccacattgatatagcggtttaataacattcaattttttctacgaaaagtaccagagtaaagattatagatgctatggccgatttgttaaaaggtgcagtccatcaaatagcaaagatcgtttactgtttatagtaattcgttttgccaactaaaatatcatcacgtcaaatagtcaaggatataccataatttctcagactattaacttatatagaactgccattattaaacaaaaggt

SEQ ID NO: 56234 - DNA, 1119 bp, Cannabis sativa
aaatgaaaaaaagtcagccaaaaaagaaatgagagaaaaaaaaagtcactaaaaaaaagataaagacatatatgggaaagaaaaagaattttataaaagttttaattaataaaaaagaaaagcgtaaatagtgagataaattttttttacagcaatgcatttttatttattttagtatttgacaaaaaaatttattttaatttttttttatagtcatatacgtttctattgtacacgtacacgtgtgaaagaaactgtttgaatattgctttctatattgtaaattattataaattttttagaattttacaatgtgtcttaaataactataacgtatacaactatataaaaaaattagactagaattttttttttaaataccgagatagataaaaaaatatattggtacactttttttagaagtatattatagaagcacccaataattagcattcctataatatttaacatagaaattaagatattttataatgaggcatttcccaattcccataatatcatgagttagttagtgtgtccagtccgtactaccacttcctgtggactcaaactaatccctccatcccacactacactattctaattatatatcttcggatttattattatcattattttattaaaaagaattataactagaaagtttttttttactcgatgtaggtatgctaagtgtatattcttttatcattatcattagtattatttgatagataaagaaaaaggtttgacaaattctagaaatggaattatgtatatagttacattattacatacaacttattcaaatatgttaaccttaaactatgtccgtttgctgctcaatgtatggtcagggtctattggggttggtttgccaatggctggagtggtcgacttttgtgattggtttggtcaggtggggacttggatgggaaaggagaaacaagatgaggtcgcggtgatttattgggttattttgcgagcacgaaatgagtttgttttgaataaaaaatattcctagtatgaataatattgtagttacctcagtaaagttgtatcttgtgttatataaattaacaattaacccaagatctatttgtatataacatagaacac

SEQ ID NO: 56235 - DNA, 652 bp, Cannabis sativa
gctctatactctgcctcagcagaggatcgaaacacaatgtgttgcttcttgctcttccaggacacaacagaatttccaagaaacacacaaaaaccaccagtggatcttctagtgtcaatgcaagatgcccaatctgcatctgtgtaagcttcaatcttaatttcagatttgacagagtagaataacccctgtcttggcgttcctttcacatattggagaactctttgagctgcatttaagtgtttggctttatgtgaagctagaaactgactgagcttattaatagaataagccaagtctagtcttattatggttaagtattgcaacttaccaatgatttttctgtagagggtaggatcaacaagcttatcatcaccatcttgactcaattttaaattgatctccatgggtgtattagtagacttgcatcccaaaaaccttagtcttccaacaattgcaaggcttaagatctttgtgaaacaaaaatgcctttgtttgaccttgaaatttcaagcctgagaaagaatctgagttctccaagatttgtcaatttgaacttgtcatttagcttaaccttcaaagcttctaagtccttgatgtcattactagccaaaatgacatcatccacatagactaacaacaatatcaaact

SEQ ID NO: 56236 - DNA, 1197 bp, Cannabis sativa
aaggtacatctgaaatctccttagcatgctacaagttgatggttgtaacagttgaaaatttatattgactagtttgctactttaatatcaatatttattttcatctttcatggtcattattatcatttccttactctgatgttactacaatttactctaactttagtgttgtgaatacagtatgacaactactcgtgcaagaatagaaacttcaattccacgcaagcatggacctggtattgctggttatgaatctgtatgtcgctgtttttatattggatgaacatattttagaaaaaaactatattgtagcataaagtatagatttcagattcaataatttcatcttgtcattttacaggcattgaataaattcttcgagaatgtcttacaggttagttcattttcaattataaaagtatattttggtattctttagaatataatacaaactacaaagggtcttctgtctgagatccggctttctttttcaggctttcctgaagaatgttgattttaatgttgttcgatgtgctgtgattgctagcccaggttttactaaggtatgaaataagcctaacatagtctctttccaattgatttagaatcagtgttggttactaatctctctattagtaaaacttaactttaaaacttatggaattatatttagaaatctgactaccagaactttttgtttctttatttctcttaatgcattttaggatcagttccatcgacatttactgttggaggcagaaagaaagcaactgaggactattattgagcataagtctcgcataattcttgtgcatacaacctcaggctacaagtatgctcatttaacattttatttcttttggtgccgtgtgttgtgttcttgtaatttgtcttctctaggttctcattttgtgaatttcttgttcacgccattatagatttgaaacctatgtttatttattctcggtctggcaatgtcacaaaatcagttttagggcatttgttagtcataatgttttcttgatatcatcactttgcttctaaagataattttatcacctttctatacacaggcatagtatgaaagaggttttggaagctcctaatgttatgaatatgatcaaggatactaaagcagcacaagaggtatttttgtttatcagtggggtttacattttttgccttgttttcttttgt

SEQ ID NO: 56237 - DNA, 799 bp, Cannabis sativa
ttgatgtgctacgttagtgaaatttaatttaacgtttttgacttttcttgatattttttatttttttacatttttaaaagtaattttttaattactaatagtgttgataagaaactaattaattatctttatataaaaaaaatatttttatattatataatttgagatacattttagttactctctaaaattttatttgtatatatttttgtaactaattaattatttttaaattatattatggtagattataatttaaaatatatttacctatttatataaccttaaaaaatattttcgaaactaataagttgtcagtaatagaacaagttactatttttatataccgataattttatatacctttttgttattttgaaagctaattagttatcatataatataattcaattaacaaaattctaaaataattatttactaaaatttaaaaaatatatatacatataaaacagtaactaatcaatatattagtagctaaatagtttcttttatagaaatagcgtaaaaatgtatatttctcacatcttgaaatattcatattaaagagtagatcacattaatatttttttaagttcatccaagtaacgatgtgatcagaaactatttttaaagtttaaaaaaagagagaaataagaaagagagaaagaaaaatgagggaaaaagagtaatgtaagaaaaaaaaaaaaaaaaagaaagcaaaacaaagaaaaaaagagaaagagaaagaaaggtataaacaagattattgaaacgtatccaaataaataaaaacattatt

SEQ ID NO: 56238 - DNA, 1223 bp, Cannabis sativa
  modified_base (475)..(490): a, c, t, g, unknown or other
cttgattctgctctcaatgaaagtgttgacctcgcttttagccaacaacagtgagtctaatttagtaagcgacaagtagtttataacgattgaaataaaataaagaaatataaggacataggaattttatagaggttcatcctagaacagttcggtaatagcctaatcctcgttatttgtattaactaaagaacaaggagaaagattcctcttcttatagctcttacaacaatatctctgaatacgaattcttagacaatatctcttaagtaaaatcctttgaccctttgcccagtgaatatgcatcactatatatagggctatgagcttggagaggaagaatttcccttctcgttacaatggatataagtagaaagattgcataataaatactgaatacagcaattgtgggattttgacaacttgccatatctctgcaatctgatccccgagttatagggatttctttgatgannnnnnnnnnnnnnnntgaattcgctaagtgttggtcgttctgtgcagattgttgattgctttgcctcgagcatgcatatgaggtatcctgttcggactatatcttgcgagcagatactcggagtcgattccacgtgtcaccatcaagtgatgccacgtcagagtgcaaaaattgggataacatagggtattacagccttgttcagagttgtttccatgggataggtattcctcaataagggttgaaatagaaagatcaaaggggctctttttgaattgggatatggctagggcatgcagagtctccttgtagccgagttcttgaggaactacaaagttatcgcatctcacaaggtatcttccacacttgttataagtatggtcaagtgtagcacagaaataacaacagttttgtaatcctttatatttaaaactcagccatttagttttggctatcctacagaagcggatattcataccacgcctgagaagcttggtaacatcaaggagaactctgatacgaaggtaagggccaaagctttcaagaagcgaaagaggataaatttgaataagatctcctagctcatcaactatgaactgggcaagttggggggttttcttgccaaaaagggtgttgtgggcttggatccagaaaggaacaaagcgaaattggtctggggtgagtgtgtcaaggccttctgggttggcaaatatgatgagatttttatcaaaatgccatggttggtcct

SEQ ID NO: 56239 - DNA, 2495 bp, Cannabis sativa
ccagtaatgctaggctcttcgaggaactgataggaaccaagttcgctttatcacttacattactgctttccagtcaagctaacgcgtttgcaatcgtgttttcttcccttggaatttatatgaggccgtagcttttgaattgtgcgagcaagtcatttattttgctcagatacgctatcatcttttctccccgagcctcgtattctccagatacgtgatttaccaccaactgtgaatcactgtagattttaatgtgttcgactctattttcttgggctagttttaggctagcagtcaaagcttcatattcggcttcgttattggatgccttgaatccaaagttaactggtgcgtggaggtgctgcccctaggtctgacaaggtcgattcctacattggatagttgattcgtagccaacctgcccttatgtagtttctaggtcgacctgtcttcacggttgcttggctgaggtgtttttactggctcggggttgccttccaatatgctttcttctttgcttgtgcactctaccataaagtctgctagggcctggcctttgattgctattcagggttggaaagtaatctcatactgacctagctccactgcccacttgagcaactgtccagaagcgtccagtttttgcaatgttatgtgtaattgttgctcagtgtacacccgaacaaggtgagcttgaaaatagggccttaactttcttgttactagaatcaggcaataagcaagtttctctatcaacgggtaccagccttcagccttaatgagtcttttactaatgtaatagacccggtgttgtatgttgtttcatctctgatcagcacggcactcacaacatgctctgtgatagctaagtatatcccaagttcttctccgtctacaggtttcgagagtacgggaggcttttagagttgcatttttagctcttggaaagctttttcacattcctccgtccactcaaattgcttatttcctcactagatgttgaaaaatggaacacacttgtttaatgactttgaaacaaatttgatgagtgcgacgatccgaccagtcaaactttgtacttccttggctcttgttggcgatttcatatctaaattggcttaaatcttctcttgattggcttcaactcctcgggcattgacaataaagcccagaatctttcccgagcatactccaaaggaccactttaagagatttactttcatgttgtacttcctgaggactttgaagcattcgtccaggtgatctatgtgccccccagccttcctggatttgacgagcatgtcatccacatatacttccatgtttttccggatctagtctttaaaaatcttatttaccaatctttggtatgtggctccagcatttttgagaccaaatggcatgactttgtagcaatatagacccatatctgttctgaaacttgtatgttcttggtctggtggatgcaatttaatttgattgtaccccactgttgcgtccacaagctgatcgattcttggtagtggaaaacagtcctttgggtatgctttattgaggtgtgtaaaatcaatacaaactctccattttttgtttggcttgggtactagtacaggattagcaacccaagccgggtagaaagcttcaatcatgaaattattattgcgtagcttttctacctcttccttcagcgttagtgctcgctctttatccaatagccttcgcttttgttgaactagccggaagttaggatcaatatttaggacatgtgaaattataagaaggatcaattccgacaatatcctcatgtgaccaggaaaaaacttccagatttgctcacagaaattttatcaacgctgattttacttcgagcaacgaaccttttccaatttttagtttcccgaccgggatatttggatcgatctcgatctcttcccgttcttccacaggtccaacattgctgcttgggtccccaagttgagaatccacaccttcatccccgccttgggaacattcctacttaggaatattttttcccttttctatgctttggctagaggatacttcctttttagccttggccacgacaaggttataacattctccagcaatctactggtttccccttagacaccctaccccatactttgttcgaaactttaggcatgaatggaatatcgacataacaacttttaagtcatataacactagtcagcctatcatgacgttaaaggctgatggaacgtctaataccaggaattgtgccattatagttatgctcgtcagagcttgcccaacagtgaggggtaggcaaattttccctagaggtgccactccttggcttgagaaaccatatacgggccgaagacaggggattagatctttgagatggagccccatcttttcatatgtggtcttgaataagacgttggaagaggctccattatctatcatagttctggctaccatcataatggctatctggacctccatgacca

SEQ ID NO: 56240 - DNA, 630 bp, Cannabis sativa
ccactttatttttggactaatttcttcattgcagcaatttgttcttccaacctctttgtgtcactgttcgagagatctcatccacgaactttgtcattcaagtagtttctgaggtcattaccacgtggcctcgccttctcgctttttactttctcgtacttggcgtctaaacaccttctgagatccaccatagactagctgtcgtcagagtactgtccccctgtcccatcgtcctagtttactgaatcatttgggcaatttttccttcccttgggcttttggtatttttattgctacagtatctttctaggcaaaagggcgtcgagcccggaggcgtcggttgccttctgtgcctgagaaggcctattggctagatatgcgtttctccaaggaggtatgggagcattaaggttcttagggtcaccaaacttcgccttccccttgtcttgtgcaggagcagaggttccagcattggttgggtttttcctggtgtttcctccgatgcattccattgagagatcatcgttagaatccccctcatctagatctccaaacttggctcgaaggcaagccatcattttctccatcatttgagaaaacttctcttgatgggctagcttttgtttggtc

SEQ ID NO: 56241 - DNA, 1145 bp, Cannabis sativa
taatcaattataattttaaattagactatttagatcactatatgtgggatctgagataactctcttaaggatacaatataggaatcaaagttggtaaatctcaagttagagagaagcaatggtgagcgtgagagagagttcagacttaagagttttagcttaggtacttcacttagcacttaatgacttagggttttagggtttggttagggccctttatataggagagcttaaacccttatttcacataaaataagaagatatttacatatgaaattagtaaaatataaatgactaaaatgccccttaaaatagataactttttctctattttcgtgggttgttaagaccgaattcgcagtctagcctgttgaccacgcatgaagttgtacactgaagtcccacccaaccaagttctagctagccatgcaggctggcttgccttgtgctgttcagaagctggccggcctatgctagccatagggccaaccaacctcctttaggtggtttgtttgtcattcgtcatcccgtttgagtgtctggaatcttcgttggttgaagtgctaagtagatgacttgaccttcttgtttgtgagctgtactatcacgtagcgttaatattgcctacgttgacatgccacgttaggtggacaaaaattgggataacaatgctaaaggactatacatcccaaagaaagaatgaaatagaaagtcatctattcgagcaagttgtttatctatccaaaaagcatgtgcatccaatccatgtccagccacttagtcatccaatgtacatggatcagggacacttctatctaaataacatacttgttacatcctttaatgatccaaaatcactaaaaaaaatgactcctaccaaaagcacaccattgctaaggagtcaaaatcaatatatattacaaattttaaaggggaaattatattcaactcacaaaaattgcaacattctactttaattattgaaaagctctatcttccactcttaagatcaaagttgatacttgtttcactctctccaaatacaattttccaaacagcataaaatataaaaaaaaaattagcaaaacaaccatataagttgaagttgtcaacactaaaaattctattccaataactctataact

SEQ ID NO: 56242 - DNA, 948 bp, Cannabis sativa
gctctcccaattgtccaactattttgaataatgacctttctccccaatacttcaaatctactccatggggttgagtccatgtgggaatcacatgaacatcttccttctcaaaatctgtcataggatcccatttttttattattattatcggcttcttgtcaaagaataaaaacccagcttccataatttcatctttagtacccaaagcttagaacctgacaataaagatgcccagtttcagcaagctgaccttgtccactcctctttccttccaaaccctcctagtaaagccttcaaaagctcctattggtggattttcccccaatacataacagaccatagtcgattgccaatattcaacttcatcatatatatcatccagttctattttaatcttcgatttctcagtagtagttgcactaaatttatcacacaaattctgagtaataggttcgaaaataggaggcttagcaaacttacccagtttcactttatctttggttctgtttgatacctctaggaatcttttaaaatcctcctgaatcccctcctcctttgtcaactgcagaatggtagatcttggcaaaataacttcagtttcctcctccattgtttggttcatcttcctcgcattcggctcctcctcattggtgtttggatcggagacaaataaggtatctacccctaaattctcagccaccgattttgtcttgagcactacatatgacaaagttgggccttcttcctgtttgcgatctttcgtttcccttgcctcttagctccggtcgccttattgctcggagatcctagcttgcgtggccggtcgtgacccgccatgacaggcctaaaccgaagaaatcgtccttcaaaacagggcaaaatcctagtagagcaaacagtagcacgcgtactaattgtgtgttccaatgtgagactttttgtttatat

SEQ ID NO: 56243 - DNA, 886 bp, Cannabis sativa
tcgcattatccttaggctaggtacctttatctgcaactgtcatacaagacttcttacttgtcgacctgccctcagcttacaacatattgttgggtcatccagcactaatcggactagggacaatcagttcgatcaagcaccaatctttgaaattccaaacaccaaatggcgttggagtagtgcggggcgacttgatgttggctcgtaattgctatcgcattgagctatagcataggaaagtcgatcatcagctgatggcaaccttggtagaagaaaatgagaagaaagacgaagatcttaacccccgagttcaagatgagagaaacctattaaaaccaatcaaggaattggaagacgttactctcaacccaagaaatcccacaaactgtgtatacattgggaagtacctggacgagcagctcaaatagcagctaataagctttttgaaggcgaaccaggatcagttcgcctggacccatggagatatgattgggatcgaccctaatattatctaccatcatttaaatgttgatccaagctacccagtgaagagacagaaaatgagacccttggattccgagaggcaaggggcactaaaacaggaagtggacaagttgttagtcaacgactttatacgcaatttgttttatccctcgtggataaccaatcctattctagtctcgaaacctaacgaaacttggagaacttgtattgacttctctgatctgaataaggcgtgtccaaaagattgtttcccacttcccaggatcaaccagttagtggatgaaactactgggcacaagcttatgtcatttatggatgcatattaaggatataaccagataaaaatatatgtcctagatgaagaacatacaagcttcataac

SEQ ID NO: 56244 - DNA, 1668 bp, Cannabis sativa
aacctaaattgcaacaaaaaaatcgtatggaaactcctattgcaactagcgctgcaactattttagattcccaaaaccgtaaatttgaaaaaaaaaatagtatatgaggtaattccttaaaaaaaaaaaatctctccgagttttggctgtttttttagttaatttccgacttttttttttctttctttcttttctctgtatttttttctttttttctttttttaattctctcttttatttattgtttctcaaactatttttttatttttgtatgtatatatatatactagaaaaaggttacgtgcaaaagatgtataattaattttatattacgtgctttataattaaactaggcaatatagctcccttaaatgatgaaatagaaatcaaaatttaaaatctttctgatagtatttaaagttttgattcattaatagaaattagttttacaaaaaaaaataaattgattttataattcaaataaatatgaggtcaatataaattatttaaatatttttaatagacttttattgtgagatttaaattattatcataaataattttaattaacatatattatgtccagtttactttaataatttttttttctttgccttaattaacaataaaaaaaacatatcaaacaaactgtaataaaaaaaaccagtattcttagatgtgatttattagaaataagttgaatactataaagtacaaaatttatgtggtgtgattaatgaaattataatataattaaggaaatatctatattttagctatgtaaattagaatacgaaaaaaatttaaagtcgttatcatcatatttcatttgtagttattattatattcaaagtcattatcactattgtatatagttattattatattcaaagtcgtcattactgcgcatctcatttataataactattaaattcaaaaaagttataatcaccgcatatcatttgtagttctatattagtattcattgtcattagtcattcgccatcactatatattcaaagctatagtaaaaaaataattattataaattgaaaaattaatagttaaagtgattttgaaaaattaggtgtagatatttaattttttttgtttgattattaatttatttttatggacctcacaaaataattacttttatggtgatcatttttatagtttgttatacatataaacacattattatataaaatattgttttttgtttagatagatctttaaaaaaaatcagccacgttgttattgttattgttattattgttattattattattattattatatttttgtttttaaaaatatcagccaagttatagactttacctttttataaggtaatactattttagattattttacaaaagttataaattagaccttctgttttatcaaatgacaaaataaacactctattttttaaaacacagaatctaaaataatatttactcatttttatatgaaaaacaaaaacaaaagttatatataatttttttttaaaagaaaataacagttatcgaattataagaattttatgtacatatatatataaaactaagaaattatctgcgcttcgcgtgcagttatattttatttaataataatgtgataagttcataaaaattaaagaataaataaataaataaatttgaa

SEQ ID NO: 56245 - DNA, 1113 bp, Cannabis sativa
ttatctattaatgaaaagtatatatattttgggttgttttgcaatcttgtaactgtggattatgagttgggatatgactactgttattatctcttttcattttgctaaatgatattgtaatttggaaccctttttgtggtgaactcatttctcttctgctaagcccctatcatgcaataacagcaaatcgaaatcggacacatttgaatcattgcattttctctgttttatttggttcaaaatgtcaatgatcattggtaattattattttgtgtattgccttttctctgttttgagtggtgaaaatagtttttaagtgatgttaatttgaaactaagtgcattgcctcagttggggcatacaacattcattatcattactcaaaccagctcatagggttttacgactcctcgttacatatcttatatatgacattttattttcaaacctaatttttattttgagacaactattgtttggtaattatagttatatataaattagaggtacaagggcacttgcgagcctctccacttgtgtcaccaaaattactttactgtttaaattaatttcacacgtgtgtttacagtctctcttcacttagttaagacttaaaattaggagtatttatcaaaccgtttacactgcaccgcataaaaaatataatatgaaaaagcattaaataagcatattatcaattaaaggagataatttatgtttcacttgaaaaaacatcacttctactgtggccatgagttagttcttaaaatttgttcctgatcagtgatgaagaaaaatgtgcttatcagccagcagcaatcgcagtctcgctatgacgagatgacagtccacgaaagacattagagttggcacgagatacgatacattactcgaataacatgatgagagaaatgaaagcaacttctttggctagctagtcactgacaatgttgttctatctcatttaaaataagagaagaaaactgaatgtttctttctcatacttggattttactggatttatatatcaacatgcttcaatcataatcacaaaacagatataaaactttcatatagaaatcgaaagtcaagagcacacaaaacagaaaaaaa

SEQ ID NO: 56246 - DNA, 544 bp, Cannabis sativa
tcatttcctattttggaggaattagaattgtggggacttgattctgtagagatgatttgggcagatcaacttcaagaagtatcatacatgcagaatttaaaagatttaactatttctagatgtcataagttaaagtatctgttttcttctgctgtggcaagaagtttcattcaacttagagaactggtagtacgtgaatgtgagaatatggaagagattgtagtgataaaagaaggtggagaagaagaaggtagttccaatgacaccatttccttccctaaattacagtacattcagctttggtctcttaaaaacctcaaaaggttcagtggcggaaagcatttggcagtggaatgtgaaggattagaacctttcttcaatcaaaaggtacgctagctttatattttatttagtttcaatatgtctctaatatgagatgcatacattgtttcaaaagtggtcaataacacaatatgttttagaaacctaattaatgatagaaataatataagtgacaaaataaatattctttttaagtttttat

SEQ ID NO: 56247 - DNA, 584 bp, Cannabis sativa
gccatttttgtagtagtgtagtgaggttgaattgacttatcgaaattcgaacacccatttcagagttcctagagtcaacttgggcacaaggctagggacccctcctaggtcaactgtaatgactcgagactactcaactccgagatgttatctttcttgtcgcgtgtcaaacattgatgtccacatcactaaggaatatttttggggttaacactaactccatcgttatgtaaggtggtcgaacgacaatagcacaccgtcaacaggtggtccggtagagtgtgggtgtggtgtgactatcctagagagagatgggaagcttggtgttaaatgaaaatgaattgtttgttagttttttttttttattttttttaggagtaaaattagaacaaaaatttaattataacgtattttggatgatgtaaaataatagtagcatagtttaagtgcgaactcaatttaagtatggattctcaaatttttttttagtaaataatataaatatttatttttttcttgggctgctgtaaatatttattgggtaacttacaaaaatactggattttgacataatctttacaaaa

SEQ ID NO: 56248 - DNA, 2031 bp, Cannabis sativa
  modified_base (88)..(97): a, c, t, g, unknown or other
ttccttccaagtttgaatacacaaaataggaaaccatattaaagcataccatccgaaaataataataaataataaaatatttttgtcnnnnnnnnnngccaaaaatggaattaacaaaactgttgcaacaaaactaatagtaatcactaactaacagctgacataactaacttttacaactaagaggaagccctatttatctttactagcagtgtgacactttaactttacaaaaacattatttaataaaataattattttttattttattattttagttatttgaaaaaacatatttaattaaaactaaatacttagtcgtattttttacgggacacgttcaacaacacctccacaattcaaaaaagattcttcttcccattatattccattggtctatataatgccattgaattaacgagagaaacatatatttttcatacaaaaaaaaaaaaaaatacaattttcataataaaaattccatctgcaatatcaattttttgagggtgtgttcgacgggtttcgacattgcagtggggatccaatacaatgtacgacttggctattttatcttgagaatgactgacaattttcgactgcttgcatatttttaagcagtactgcaaacgttttaaaaagagcaacttagtccgcaactcaactcaaaaatttcattcagtaataccattcctaatttttggtagaagtctgtataacaaatactcactagcaagatttgctcagtatgcagcaacttcagttctcgttagattttttattttcaataaatgattacagcaactttactaggaatactgctggttatcagaagttggagccaacagtattggtcgtaggaagaaaaaagacttcgatgtaatataaaattttgaggaaatataaaattttctccgaattccaaccaagtccactctcaaaatattttcacttccaaataattctcagtatgctgggtccagttctaataaatatgatgcagttcatctcgttcaactgcacatgtatcgtaaggattggtgctcaatgactagagatgcctttggtttgatcatcaaattgaggcaacttgtcaaatttatgacagtccactgatgtaagtattcaccagatagcaatagcactcaatcttggatgatcaagagaactgcagcaacaattctttacaaagatcgataagatgacttcaatccatccattgatgtctatgtttgtgattatggcaccaggagaaatccctagtctggaactagtttctcaccagtagtcattacaagagcatattccatctttgaaatggtggaagcggtttgaatctctcaccattatttccctttgaagatgatttgctgctagtttcatgaaattatggcaatccacgcaaatcctgatgttctttacaattcttatgacactcccacgagcatttaaatgaccttcatttattacagaaaacatcaatgcaagtttctcactatgatgatacaaatgctcttccttttgttcctcctctaaatcatacaaggccaagttcgtctctggaacataacccatttcctttaatttccctattagtctttcaagcttgctgcatataatctccctctctggatgacgttgacctcctgaggcaaactcatgaacccgattcccgacttcaacccaacttaatccaggttcttttctcactcgatagtccttcatttcgttccaaacagcacctgcttcatcaaagttaccactgtagcactgtatgtttgacatttgtacatagcctaacgaatttctaggctccaattgctttagcttaaccgccgcaaacttggccaactgagtattcccatacttcctacatgatgcaataagtgcactccaaatcacagaatctggctccattggcatctcatcaataagtttctcagcctcatgaattcgccctgcacgcccgtaaaggtcaaccatgcaggcgtagtgatcaacttgaggaacaatgctataacttctttgcataca

SEQ ID NO: 56249 - DNA, 1075 bp, Cannabis sativa
aaaataaattccaacaattagaactcggtattcatgaacttttctcacaagcacaaacggattctcaccttccggttcaaatgtcgtcatcttcctcttgcaatcagtggtagcattatactttgctaaccaattcattcacaagatcacatcaaaatcttctaagtttaactcaatcagatccattgacaattctctatcttccacacacacagaagagatctaacccacctgctaaagataattgttctccaataggtgacaacgtaccaaaccgacttgtcctcgcatggcctactcaaactatcaattactctacttgacacatatgaatgcatatcaccagaatcaatcaaaataatcaacatagtgacatcaatagaaatctcacctatgatagtggaaggccagcgttagcatctgtttgggtcaaagaaaacaccaaagcatgaacaaaagtatcatctttcttcatatatgatatttgtaactgtgggcagttcctctttagatggcctactatcccacattagaagcaagcttgaggttggcatttgcccaaatgacgtcttctacaccttgggcactcaggatagggttgccaactctcatttggcttcctcttttggtcaatagggttaaaccccctacttgaaccagtaccagaaggtagcttccacgaatctcttctaatgttactcttcttttgaattcaatcctcaatcccttcaacaacaagtgtcaactctattatttgagcatacaacaaaaacccctggttacttagccgtcacaataacatcttggaccatgtgttcttcaaaaacccaaataaactttgtctttctctagacttcagtagccacctcattagacacaaacttggccaaccaattgaacttagtggcatactcaatcactatcatgccacctttaaccaactgtatgaattcttccgctttggcagcacggatagactcattataatacttctcataaaacaaagttcagaatgtatcccaagtcattgtattcaagtcctggctttggaatacaatctcccactaaatacggt

SEQ ID NO: 56250 - DNA, 1234 bp, Cannabis sativa
ttgtccactcttgacaacgaggccaacctcgaatgcttttccaaagcaatctacgtatacaaggcccaacatgagactaatggcgtcgaccctgctgagatgatcaagcaagctctctgcgacgcactggtctactactaccctcttgccgggagactcaaacggctagaccacgatggaaggctccagctcacttgcgacgctactggtgttccctttttggtcgccaccgccaactgtcgcctttcctcccttaattacttggacgatattgatttcgagatagccaagaactttgtcttcccttctcccacgactgactgccctattgtcctacaagtcacccgattctcttgtggaggtttcaccattgggtttggaatatctcacatggtctccgatggtttcggtgctgctcagatctttaaggccatggctgagctctccaaaggcaaagaactctcggtgaagccagtatgggaaagagagagacttgttgggacacccatcaaggagcctatcaatttcaactcgtgtcctcctgccacgtcaccttacatgccctcatcagacattgttgatgaaatcttttacttgaagagtgataccatgaagagactcaaagaggatatcatcaatggtggttctcccagtaatattactacgtttgaaatacttgcagcctttgtttggaaagccagattgagagccttagagctcaaccatgacgggaaaacatgtttgtattttgctacaggggtgaggaagctcatagacccccctctacctgaagggtattatgggaatgcatttttgacatctgcagtggaactcactggcagagaactcgaagagaaatctctatctaaaatcgtgaatatgataaaagagaagaagaaagacgttttggacaacaactacatcaaaaagtctattgatatttgtgagacaaaattagctcacggtgataatccaaagattaaagctacgggagcactcatggcgttgactgattggagaaacttagggttggtttcggatgagtttggatcaggatggaatatagaaaatgtgacatcattgccatgggactgttttggatcagtggatttgtgcaccttcttacctgctccaaaatctgatccttcattgaaaggtggggttgggatattggtctctcttcctaggcaagccatgcccgtgttcaagcgagagatagatgctcttcaataac

SEQ ID NO: 56251 - DNA, 973 bp, Cannabis sativa
  modified_base (529)..(539): a, c, t, g, unknown or other
tcttagtgggaaatattttagagatagtaaaatatcggaattgaacggggttatagaatttgaccattttacccctagtcttgaaagtaccaaatttaagattatggagggtattttagtcatttgttaataaggttattaggtggctgcctaattcgatgacacctagcaactaatatattcaacaagagtttaattattcaatctcttttcatttgaacaaaataaaggaaattaaagaaaaaccaaaatagagaactctttctctctttctctctttcaactgggggaaaattagaggagaatcccttaattcaaccttttttttttttctggaatttcagtcgagattcaaaggttcttaaacttaatgtaaaccctagtagcacgcttctttaatttttaagttttatggttgattgagcatgtgattttaggttttggtggctgttagggttagtgatacttagggttcggtttttatgtttaatttagactgattaaaggttctagtagctggttttaccannnnnnnnnnnatttatgcaagtttgagctttaagctcaaagctttgatctttaatggcatattctgattcagtgagactttctgtgaattactggttggaaaatattgtgtataccctaattaggtgctctggaaggtttggtggcatttggaggagttttgagcaagaaatggagttttagggtgaattggtgtaaactggctagccggttttaccagtacctgtaaaacaggctagccggttttggcagggttcccgaatgctccattttctcaattctcgtccattccagtgatgtagttaggtgtttccctatttcctgagttagtgtaatcccttgtggatatagtagaacctagggttgtgggttcgggtttcccggattagggttttaatcatgtgatttacctggtttcattttgtgattaggacatccatctagc

SEQ ID NO: 56252 - DNA, 1056 bp, Cannabis sativa
  modified_base (404)..(405): a, c, t, g, unknown or other
tctagatacaaagttataatttttcgatctcttttcttctctaagatttatcgtccattattctgtataatctgccaatatttataggaatataggttggtagttttttacatttaaatttgaattacataacagtttttcatgaaatcgtgggctttgctcacgttccacataaacacgtgtaaataacactgaaaaataacataaccgtttatcattcttatcttcaagcggttgactctaacgtaggtagagacatctcgatttgtacatagattagaggcatctcgctttgtacatggatgaccaatgatgacttggttggttcatatgccttccagcaatgacatgagcaccagtgtgctgagcaaacttaagaattgctctttgaccataaggccttnnagactggacaatcatgtccttcatattcccaagttgatacacttagttattataatgtagaaaaatacgctaagtgtttcaagggctgattccccttgtcaacatttccttatatgtagcgaggtggatatctcgctataccctatccatattctcctcggaattatgccttctgaggttagatggtctctcgttaatacaagaattgatagtttgtgtattcttgtctcgcctaagactatacagtcagcgagttacgaatatactctattaattctatatttaatgagttattccattttgcattaaatgatataattattgttatatctggtggttcatactccacttgattgacacgtgtcactctctgaaataccgtcaaattttgggtataataacatctaatcacaatattgttgaaaactattttgatctaattcatgttgacgattggggtccatacaacaccatgacaactaagagatatcggtactttatcaccattgttcatgattgttccaggtacatcaggatcaatatcatcaaacacaaatttgatgcacaaactgctatacctcagttcataaaattagttcaaaaccagttcaacaaaactattaaaggagttaggtcagataatgctaagga

SEQ ID NO: 56253 - DNA, 556 bp, Cannabis sativa
ctatttgagttattaattaaaagggaaaagagtatttataagtaaaagtattgactcagcaaattgagtcaaaaaaaaaaaaaaaaaataatcatgagtcactcactctttaatacatataagaatgatggcatgggaccctcctatactacagatgaaatattgctattgctaaagggcaacctagcatttttataatttttaatattttttcaggttttaattatttcaaatgaaaaaaaaatagaggcagcagtttggccatggtaaaaatgcaggaggtaaaaaaataatataattattaaggaatagttatggtgaaacttttttaatatttataattgttacacatattatcttaattaaaaaaaaaagtaacagcaaaagtattttatcttacgattttgttacagtcgtactattttttagtcattaagtattagtttagaaacatatagcgatatattattggatcacgtattaaataagcttaaaaaatagggattatttcacaaatacacaaaaataacaaacaaattacaaaaatacagtttta

SEQ ID NO: 56254 - DNA, 1345 bp, Cannabis sativa
agtggtaaaaaattcaagaaagaaattaaatttaaaatagttatagaaataaagtggtcttatatatttttaaatcaagatacacatattatcttgtcaatgaaatgtttgcatactccaatatgagaagtttagacatgtttggtgtctaaatcttaatatgtgtagatatataagacatgcttggtgccttaaataaagtgtaactctgacatgtaatttgtgtctaaagttataagtgtgtaatttagacatgtttagtgtctaagttagtgtttaattttgatattctcggtatcaaaattattgagaatttgaattgtgtgaaaattaatcttttatgattgaatttttaaagcttaagtacttaaggggaatagtggttaacctaaaggtggatactatatttaggtagcaagattcgcttggaattaataagagtgtgaggttagcaaatcgcttaatcttcatacaagattaaagcatgaatttcgagagatggcacctaaactctcttagtgttttactcattgattgtaacctaatcttaacactagtaaaaattaagttttatgttcaataggtaataacaagtcaataaagtgattatggtactcaattgtccaatctatagatgagtacatgtagtgataattagagggttaaaactaaaaggttttttttatggagcttaagcttaagaaaactcacttaagtttaagaaagtggtaaagaattgtgagacactaaaacttcacctatatggactaggagtgatgctgcctcttatgagaattaagagttattctctagaaagtctataaattggatttgtgcacatggccattattaacggtgcaaaagtaatccataaggttctttactgtgaacataacaaaaaggtgtgtgtgttatcaccggtttgttatcaagaaatagtagttcaatgctatggcaattaaaattttgacaaactttgtaataattacattaaggtaaaattcatgtcaaaagacaatttacattatgcaccaatacaatggtttctattagagcggagttatttaatcaagtgggagaatattatattactttataatataatttttgattgatttaataaaatattgtgttacaaacttatttgctgcaaatgagatattatttaaattagtgggagaatgttatattattttatatactataatgtttagattaaataattaagtgtgacaagttattaattttttcaattgtaacatacattatggagttacaaaatgtgtgtacaatgatctcaaaataggagttgcaaatcctttaatttgatgatcacttgaatatg

SEQ ID NO: 56255 - DNA, 1043 bp, Cannabis sativa
aatccgcttagtctacaggaggtttagctcatgcttcatagtcatgaactcagattaaaacaacactcaactgaaaccctctcaaatgttcaagcaaatttggctaatctgtcagccaacaataacaatcgaggaggttacagtggccgtggccaatgattcaacaatagagggggcagaggttattcaagcaatcgagggggggagaggtaacagaccaatttgtcagctgtgtggcaaagctggacacatggcacaaaagtgttatcataggtttgatataacctatactggacctacaccttccagcaacacaaacaatgaaactaatgctaaaaatcctcaagcaaatcttgcagaaaccccgtccactagtgatctttctggagcatggtttctcgacaccggggctactcatcacatgaccacagactctcacaacctacagaacccaatggactacaagggtaaagccaaagtagtggttggtaatggtaattttatgcctattttttgaattggttcaaattcaattagttccaatattccacatcaatttcttgtttttaaagatattttgcatgttccaaatgtcaccaaaaatctgttgagtatttcccaattcactaaagataataatgtcatccttgaatttaatgatgtttgttgtcttatcaaggacaagacaacgaggcaagttcttctaaagggtactctcaataatggcctttacaagcttcaagttcaaccagccaagattccttctcagccttccaattgtgtcgaaaccagcaacaacaataaatgcagtagtttagtagcccttaactgcaccaccacaagcaatcctgtccaagataagtctaattctgtttctgcttggcattgtaggcttggacacccatccaagccaattttagccaagattcttgtacatcttaatcccaatgccaaatgtacaaatgtaactttctgtgatgcttgccaaattggcgaaatgcatcaatttagtttcaaaaccactgttaataaaactactgctg

SEQ ID NO: 56256 - DNA, 1234 bp, Cannabis sativa
acaacacttcttgagtgcaaaaaatagggcccagcgcctacgttgacacctgcagctggggccctatgcccaggctggcatttttcaacatgggccattttaagtggagtttttcaagaaaacttctaagaaacttctttgtttttagaaaatattaagattcaactatttcgggggactaaatggaatttttaaaggggaaaaactaggacccaacgcccgggttgacacctagagctgggcccaacgctcaggttaacatattatcaacctgggatgattccgatcaagttcatcaaaaattattcgtgacatttttttcgtcatcaaaatttatgaagattcgagtaaatatggggagaaaaccacaaattcaagcacttggaagtgcgacccaacgcccagtttgataatcaacatgggacactgccttcaattgttcaaatgtcaaatttgatgtgaccattgaatttgaaatggtcaaaaagaaggtaggagatctcatcctcatgtttgaaagccttggaagtattaaaaacgagatcacaggagctcgggagtaagtacccagcgccctggttgacaaaaggcctagtgcgctgggttttgcttatcaaattttaatgttgtttcgatcgtccatctagttttccacactaaaaaaaaatccacaaagtcaaaaaagtcaaattcacaactttaaatttctcatttccagttcacccagaagtaaagagttttgagtctgtcatttcggtaaaacaacatctttgagaactggtgaccaattttgccaaaacacggattctgactaagcgatgtcaaaaatatcacttggcatcttaaagtacatactttggacatttttcacttacccagcatcttggttgacgtcatatgtcaacttgggcgctaggtcatgaactgccttcagtaaaacaaccataactcactcaattttgatccgattgatgtgattcaacttgtgttttgaaggtaattcaatgctctatcatgtcatgtctcataattcaatcgtagttctgaaaatatcgtcatcaaaatttccccaaagggagttacgaaaataagcttcgagttacccgtagcggacccgtggggctccaaaaaatgaccatcaccaccaagagctaattttcaccattagatcatcataaataatcaaagacgtcttatttttattttttctctatttttttgggcttccttcacc

SEQ ID NO: 56257 - DNA, 1368 bp, Cannabis sativa
tattgaaagaactaattttttattagtattgtcaattattttatcgttctaattagtgatagaaatttgattcgcgagaatgggtacccgcgaagataggtacccataggtacccatcttaaatgggatgggaattacctacttttatgggtaatggggcaggatgaggtataattttatatatccaaagcgagtttggggcagggtcggaggtgatactacctatcccatattcaacccagatatatagtttctaaactttccaagagatgtcagcctcattctcggcctaccactgagctctacagaaacaggtgactgctggtactggactggtgaagcaaatggcagcttcagtgttagcagcgcctacttgctgctggaaaaggaaaaagcacctcaacctgcagcaaataattttgggttttggaaagatctatggcaactgaagataccgccaaaagtaaaaaacatgttgtggcgagcctagacaaattgtctccctacctgtctaaaccttgtcacaaatcatgtaaacatttctaccatctgccctatgtgtctttcccaacttgaaaacactgcccatgcttttattaattgctctttggatgctggttgttggcaccaacttggtgtgctttgtccaaatcccttcgccacctttgcttcttggctcgaacatgtattttcatctgctgccatcgaagatgtgtgcaaaatagccatggtctgttgggcgttatggaaagctcataacaaaaaagtttggaaaaatcaaaccccctctttgaatgaggttatggtattggcaattacttcttttgatcattggagaaaagctcaagatattatttcactttcatctatattccttgataatataggtgatcaaaatgagttttgggttaaaccagagatagaaaccatcaagattaatatcgatgccgctttatttgagcaggaaaattcctatgagtttggtattattgctcgtgatcatcatgcttccccactgcacattcaagccatgtatcatggaggctattttccagctgaaacaattgaagcaatgggcataaaagaagctcttagatggattaaaacaaacaactggaaaggttttatgatagagagtggcagtatgctagtcgtccaagcaattcattctactcagccaatgacttcggtttttggtttagttgttaatgattatagaaatttattatcttctctttccaatgttcatttacgttttgttagacgatcagcaaattgagctgcccactttgttgctaggtacgctcgatccttatctggtcgtagcattcttgagacttctattccctctgatcttcagactatttt

SEQ ID NO: 56258 - DNA, 1022 bp, Cannabis sativa
acaagttagagatcgagaggtaaagaactttattgaaaaactaatatgcaggtttggaattccaaaggagatagttacggacaacggttcacaattcataagcaaggacttccaaaacttttgtgtagaatgggggatacaattatcattctcaactccacgataccctcaagcaaacggacaagcagaatcaaccaacaagataatagtcaacacgctcaagaaacgacaagagaaagccaaagggagatgggcagatgagttactagggatactgtggtcttactggacaatagcaaagacctcgactggagagaccccatttgcattgacatatagaactgaagcggtcatcccgggggaaattgaaataccaaccattagatatgaacactcgacggatgatctaaatcaatagagcatgaatagaaaacttgattcgttagatgaaaagagagaacaatcgctcatcagaatagcagcataccagccaaaggtggcccaacatttcaataagaacattagggtccgacaattcaaggaaggagaatggatactacgacgagtgttccaaaagacgaaggaagaaggagcaggcaacttaggacccaattgggaggggccttaccagattacaaagatagttggcaaaggggcatacaaactccgagcaacagatggaagaaacataggaaatagctggaacgttgtacaccttaagaaataccatttctaatcacatgtgtggcaaaacaatgcccccccttgtacactctcattttacgtagtggatttttgcatgctttgcccgtggttttttcccgaaagggtttccacgtaaatacctgtgttaattattttaagtgtctgttatattttaaagctcaaaacgtaaagtaaaagcaatatcaaacgaggcacactcaacccaactatttacttatgaaataagtgataggagctacgctcgacccaaatattcacttataaaataagtgataggagctacgctcgacccaaat

SEQ ID NO: 56259 - DNA, 1281 bp, Cannabis sativa
caagtaatataatgataaattaagtattattccctcgaggattgactaccaattaccaattatttaactttttatttctatttgattaattaaaatatttgagagaaaaataattaaagcaaagtaaacaactaaaatttagagaaattaacaatgagaaaaattaagattattatgattcataattatctttttttttacttgataatatgcaattacccaatatttctttttctagtttactttactaatgccttaaaaaaaatattccacttattctaagtataagaaaactccatcgctgattatcatgttagtgtaaatctagtgcacagataaatcatgtgactattaaatccataagtttaggatttaatagaatttatatattaaaactataatcacgaaaatatcatgtgaactacaaggtaatataaaattgacttatatatcatttttattgatcagctaataagattatattgagatgaattttatttaaggcataaaatcacaacaccaacttcaagatctgtagaaacatttggaataggctcagaattgtctttcccttcccccttgccttttccctttgctgaaagaataaaatggtttcatccaaaaaataatcagagaaactcaacatgtctttcttctcagaaattcgagtgatattcttttgttgcaactataacaataataataaaaaaaataataagaaaacaaacaaacagagcaacaacaacagtaaaacaactataaaatactagacacatacatgcttcaatggacgaataaatatcatattattcatatgatgcaatttcaactgtttaaccttcagctttgatattttactccaattgagaatttaaaaaatcccaatgtttgaatacaaagtaagcttgaaaacaacataaggacaacacccgaaaaactatatttggagagcatatgggaacccaacaacctctaataaccttcgttcttattatgctccttacattaattcttaattcatgcatgagtcttatcctttatagactcaatagtcatttcataacactctatactctaaccatactcattatattgaccactgtggataatatcaagctcttcaataaaaaaaacttttctaagaggaccacccatcaaatagtaatgtacaatacaaccaacttgacaacaagctcatcattgttcccaaagtacctacctttgaatgcaacttgaatataactttttgtaattttatcgttgcccttcaaacactgttct

SEQ ID NO: 56260 - DNA, 765 bp, Cannabis sativa
tgacaaaagtccttttaccgaccgagattcgttgacagcttttaccggcaccattatgcaccagtaaatgtttttcggcgtgttgtgactactttttccagcgtaagaatgcttcggcaaagtcacattttttgtagtgagtttacaatatcaaaattaggtttgaaatattttaaaaatgcattgtagactaaaatatgaagaactctattttcggtacggtaaattattttgaattttttaaaaatttatagaaataataccgttattataaacaatattatttataaaaagtaatttctggcatgaaattaagtaaatgattgtagtataacattcttcaaaaaacacaaaattaaaaatgcacacccggtgggactcgaacccacaatcgcctgattagaagtcagacgccttatccattaggccacgggtgctattgttgtgagtgagaaacgtttatttattaccttaaaaaaaatgctaaaatatatagattttttttttctttagggaattaaaagaaagttttggttacactggaaatatcatgaatctttgaccgtgaaaagtttttctaagaaaaaaaaatgttgacgtaagggaaaaccttaattacataatttgttggtgtaaattacaaaatcacataatagaaaattacaaagagtatgagattgtttgattatttatatttttatgaggttttttccccacttatttgtaaaattatttgtttacaccagatttaaggtttttcatttt

SEQ ID NO: 56261 - DNA, 2139 bp, Cannabis sativa
  modified_base (1734)..(1736): a, c, t, g, unknown or other
aataataattcaattaaataatgtgacttaatattttaacatattaagattataatttttagtatttttttatagtacattaacatattaattaacaataatgattttaatatatataatataaattttatttttacaacataaataaaaagtttttaaacaaccgcgcgaggcgcggtatcgtcacctagtatatatataaagaagggttttaaagcattgagttgacactctataatctatttactttatctatttttttgttaaaaatttacatttttatctattttatatttatttgtaaaaagtataatttttttttttttttttgaaaaatgtaaaaagtataattgataataataacaataataattcaattacatgccttttcacttatttataaccttcttattattattgcatatttatcattaatataaataagtaaaataaaaaaaatcagttacgactttttcacttccctacaattctttgattcttgcatattactcactatatatataggaatatagatttgaagaagatgtataatagtaagtagtaacaataaccacaacaaaaattaaaatacaaaaatacgtatttctatcatttttttaataaattattatacataattcatatatatatatatataatcatatcataacaaccaaaagttaaatacgaagatacatatatgcttaggtataattatttcattttttttttctttgtaatgtctttctatgaattatataaaaatattagattttaaattttatttatgtagtgatctataagtaaaattatcaattttttcttatttttttttatcactattcttctctcttacaaacatgatatgttatgcatgtcatactaattctaatatatatactcttattttttttctttcattgtctatacactttattattattattatattttattccttttataatttaattttgttgtgtagaccaacttttttattttttaataaaatatcacaaaaaaaaatataataaatatattaataattaaattacatatatggttatttttgaatttatattaaaaaattatttctataattttttttcttatacaatcatatctctaaattatttattttctaatttctatttttgtttgattattctctatttcacgatactttaaatatccataatattatatgtatatatatgtatatttttaactaattaagttgactcatttattttaatatgtgatataattatatttatagatacaattacgaggtgagaagacattttatctttttaagattgttatttttatttttttgtgattttttaaaattaagttattttacttatgcctttattttaattattaattatcagtattaataattattcacttaaaaataagtggggatataataatttatataagatatttaattaatatttttttgttaataatagtactccatcataagattaatattttcttcattttgtttattcattacattgtatatatttttttaacttattctattattatttgtggtacatacttttaattcattttgttgtcatttatgcttacgttttttttgttaatattaatagtaatttttttttcatttaataataagattatgaattattattcatttttttttaatttttctgcattctcttatttatttaatatttttgttatttttatcannnctattaattgcaccaatatttttacttctcataagaaattcaaaagacatgttgttatttagtgtgtataatataattatgtctcttgatttatttaaatattatgaattatgtatttaaatttatttagatatgttatggaattttaaaagttattataaagatatagtttatcatagagtatctcttttgtatacatagcaactttattcattctattttttttaattaatgctattaggagaaggaatatgaaacgtgtgcaagttgttatagaagttcttaattaacaataaaaatagattaatctatttaattaatataataataagggtaaatactattttgggccttgtgttttgcaaaagttacagattagaccctgtgttttgttaaatgacaa

SEQ ID NO: 56262 - DNA, 1015 bp, Cannabis sativa
tttgtatttttcgtcgagtttttcagtttggattaggcgagttattcggtttgggaggattacgaaaatttatgtacagctctaataaaaactagacaatatagcttttgcattggaataaaaaaaaaatctagctcgtatagatacacaatattgtcaaccaaagctaaaacaaaagatgatgaattagagtagaaagttttgaatagtagaccaataccttgagcctatcttattccaccaaaagagtaggtttttctgcctgaaaagctgacaaactacctgtattacaaaaaactagcacataagaatctcctttcaaataattttaatatgagatattgtttcatcaaattctctaaccagaggaatgtcgttcgttagactttaggcattataattaaaaatgagaaaacaagatgaaggatagttatgttatgttccgggcaataagtaaacagaaccaccttaaaaaaaacataaaaggtgatttctataaatatctttgatctaaaatttaaaactagaatcaatgcttatatgctagaaacatatagttgactcttagaatacattacacaccccaaaaaacgcacaagactacctcactaaagctctttgaattatatcataaaactcggatccatttgtaatggtaaaaccattaatcataaaagtgcatcaatactaaaatgttgacctataaaatgatgtaatagacaactatacctattattactctgatctagcattcaaaaaaattattactctaatatacagtgtaaccgaaaacaaggccaagaaaaggcaataaacaaagccaagaactgtaagtctgtaacacaaaactgagccataaaatatcacaaaaacaaagccagaaaaatttggcacaaaaattagcaatgatttagcactaacaggaaaatcaacaataattcagtaaataaccttgtaccaaaccagaagcaagaaaaatacagcaaggaatgaagatgaaaaacacaattgacaa

SEQ ID NO: 56263 - DNA, 977 bp, Cannabis sativa
caacaagaaatagcctccaccaaagtccccgacgaatcacgagccacacagacaaagctgtgcacacctgaaccgcaaagagggctgcatcgacgtttattttcaaggtacctgctgctggtttgtgccatacttcagccgcatcaacatcagtaaaaatgcagcctgaggaacatgttgtttatcttgtgccttatcccattgctccaaacaataatgagctaagattaaaacccctgccaccgtaggagcttttttatttttaactacatcatttcttattctccacaatgcccaacatgtcataaccaacactttcttctgctccccatccaatttttgtagcatactgtcgagccaaccaagaaaagtaaccacctgcctattatcaacatcaatgccggtttgcaaccaacacgatttggcaaatgaacaatcaacgaacaaatgaaatgtagtctccttgtctaatttgcacaacggacaacaatcattcacatttacatgtttcgtcctcaattgaactgtagtaggcaaacaattggctggtgtacgccaaaggaaattttttcactttcggaggtactcgaattttccacactttgttccaaaaaccagtagaaagaaactgcatttcaccctttcgatcttgttgcagaagccgataagagctcttaacagaatggaatcctgagctttccaatttttaataccacacatcattgtgtctccttgagtttaatggaatactaaggataagtgcagcatctcgagcattcatcacatcatttattaactcaacatcccattgactttgttctggcaccattaaagcttgaaccctttgatcagcaagagcaggatgtgtggagattattcttggattgtcctcatcaagcagccattgaccagctaagatcctattgggttttatgccctaaataaaactcattccattataatcagatttacttatt

SEQ ID NO: 56264 - DNA, 1534 bp, Cannabis sativa
  modified_base (1259)..(1259): a, c, t, g, unknown or other
acaattataaattatctttttaaacaaatctgacaaaaataatcgtatattttgccctatttaaaaatgtgaagaaaacaatcccctatttaaactattaaaaaatctagaagaaaaaaatataaaaaagaaaaaaaaaatcacattaaaaatcacgttattttaaacacaattttcttttgaaggttaaacacaattaaaactattaaaaatgtgaaaaaatctaaagaaaacaattattttaaactattaaaaaaatcatgttagcaaatagtctagtagaaaaaaaataaaaataatatccgatttaaaaatgtgaatttaaaaaatgaatatgggagggcattgacattatgtaagatagtaaatatacctgaatgaaacttgctactaatagagagtgatatgataataaacttaatcgagtgttattgttggagatttgaaactatgagaatttaattgggaaatacactcttatatataaaacttcagtagagagatttataataaacgtattaggagtaggagatatagaagtttcctaaactaatatgattaggatttagtttcctttttagattttattagttttgactaagttacctttaaggattattacattttttaattttttcatcttttaaatgaagattcaaatagacatgtgacgttatttattatttaacttttccgtgatttaaatttaaaggataaaacaattataaatcatcattttttaaaaaattataatgtaaatatttgtatttttctttcaaaattattatatatatatgaatatattttaaaatattaaaaaaccaacaaaaaatattaactatatattgaactttagaaaaaaaaaccgtctaattgcaagagaacggcagtttaaatttttctttttttcgataggcaaaccatgactctgatctgtggacattcgaacacacgactatagaaaagaaataactattaggggcgtatagtacgaagtgttcaaaataattttattatagagaatattataaaaaagaatatgattgtaggaaaatgtgtaaattgtatttgcctctataagataatatgtaattatattcttattaattaaattacactatttggttgagtacataaatcttatatattattgtaagaaattaaaataaaaatatttttttattatatatatttaatgttaattatatataaaaatagaataattattattaaagaaatatatttattaattagtaaanattaaattttattgtatttttttaattaaaatgaacatttctatatattttatcactatattatttatttttattcgctatatcatttatgtacaccatccgcataaaatttatgtacaatgaatttatatattagggtgattctacaatgcatctccttaaaagagatgtactgagacacccttacttgttttggcatctagaaaaaaaatttagtctaatttttttttttcatattatgtatgttataactatttaagataacctacaaaatt

SEQ ID NO: 56265 - DNA, 1146 bp, Cannabis sativa
tcgatcagaggatttcattatcagtattaactttcctgaagtttcagagtaacataggaaaaccagacgcaagtgccatatatattaggaatacatgtacaaaatttataacctcatttctttttatttctttttattatttaatttatattagattctttttctagtcattagaatttaaatagtattaagttttagtccattttacgattccttttgtatttgtcgaattttagatatgttttggtatttaagtttattatttttttcgttctatatatactaattagtataattgatttctacctattctctatatgttattttatactttttaatatttattaagatgagttcatattattgtactaattggtataaaaaaaattcgtaaacaccctcaactacatattagtatctaaataactgtgcgggtcaattatcaacgaatatacgtctaaattttttccaccaatatactcataatagttaggagagactctgaattttagccgaccataaaaaaaataatttagaccttagaatgaaatgtgatatttttacaattaataaaaaaaaaataaaggaaattttttttgagtcccttaatttaggtggactctaaacacatgcctatgcgcttaaggctgggcttctgttatggccaactacttgtgaaaatccaaaaaaaatatttgttgaatattatttggtacttttttttactcacatattcacttagtttgaatagaagtagtttatttttatttaaaacttggcatgggtctatgtttatttcaatattcaaattatttatttggatactgtatttgttattttattttttattttgttaccatacatacttttgtgttcaatctgtgcatgtgagttagatcatgaattcttattgctatatactagatttatgaggaaagttatagtggtgttggttaatttgaaagggcataacttgaaaattacccctttttataacacattaactaaacataactttaaaataattttaattgataaatactctcttttatattcaaagtatcaaatataactttgcataacttattaaaattagagtttaatgcacataatgcggatacaacttataaaactgggtataaatta

SEQ ID NO: 56266 - DNA, 1132 bp, Cannabis sativa
  modified_base (30)..(48): a, c, t, g, unknown or other
  modified_base (928)..(930): a, c, t, g, unknown or other
atctatattaataagtaaatttgattatannnnnnnnnnnnnnnnnnngggcataaaacccaacagaactggccgaggctaaaatcagtgtcaaaaatttgaagtttcctcgatttagcagggtattatcgacgcttcgtcgatggattccctaaaatctctatgccactgactgagttaactaagaaaaatcagcgattcgtatggtcaaacaaatgtgaatcaagttttcaggagttgaatcaaaatttgataacagctccggcgttagctttgccatcatatcaagagaagttcgttgtttactaagatgcatccaaacagtgtctgggatgtattctgatgcaagctgacaaagtcatgacctatgcctctcatcaactgaaggaatatgagcaacgctacccaactcatgacctagagcttgctgctgtggtttttgctctaaagatatggcagcactatctttatggtgaaaaatgtgagatttatactgatcataagagtctcaagtactttttcacctagaaagacttgaatatgaggcagaggagatggctagaactggttaaggactatgattgtaagattcggtatcaccccaagaaagccaatgttgtggctaatgcactaagtagaagaggcccccggcagatttgcatcacggttctgatagcccctcaactagcttctaagatggttagtgcaaggattgagtttgtggttggaaagttgcaacacttgacactttaatctgatctgttagaaagaatcagaaaggcacaattagaagatcctgagctagtcaagattcgagatgaggtatggctggtcgacctaaatacttttcaatctcgaataatggaatgttattgtatgaagctcgagtttgtgttcctagtgttgatgagcttaagaaagagatacnnnatgaagctcacaccacaccttattaactgcatctgggaacaaccaaaatgtattaggatttaaaaccctacttctggtggtatgggatgaaatgaaatgtggtagactgcgtgtccaaatgcttaacctgccagcaaatcaaggctgaacatcaaaggccgacagggttactgcaacctttagcccttcttgagtggaagtg

SEQ ID NO: 56267 - DNA, 1697 bp, Cannabis sativa
  modified_base (1617)..(1623): a, c, t, g, unknown or other
ttacctgtggatcccattttctcaattgttaatggagtttgaacggatgttcttttcaaaaaaaaaaaaaaggagtccaattttatgtttatagtagagtaataatagaattaataaaaatgattatttgattgaaaagactcaataaataatctaatttattagagtttagtattattggtatatagttcccgaatcaccactgtgaaacgcagtcaaatgtatggatgatacaaagtaaagtaaagaaagaaaaattcaaaggtgttcactcgatccaatccgcactattttagtcatagtgcatccaatctgtactaaatgcggattttatattttggatccaatttcatcaacacaataactcaaatccaatctaatccgcaaaagtgcagattggatcggttattttagattggctacttttcaatataatattatttaatatttattaaaatataattttttcacataactaacaacaaaataaaataaattacagttattttatgtctccaacaacaaattaaaataaataacataacaaatacaaattcaaaaatatataaaaaaaaatgtatgtatagaaaaaaatatttaattttttttaataaattagcttcagtttaatatattcaaccaacaatatttgtacagtttaacatcaccaaaaaaaaaaaggtctgaagaactcattctatacaaacagctaaagaaaaaactaaaaagatcgaattacaattgcttaagccattaattgcacatctatttccttcaactttttcagaatagccacttctattctatctttgacatcttgctaaaatctttgacaactaattgtgatagattgcacacattgaaaccaaaagactttacttcaaatcatccatatgtgaggcaactacaaaaacagtagaaaacttgcatgctttcgaaatttagagattttcgctctattattaatcaatttgagaatagtattcaaatacggtttgaggttgctatatgaattttattagttgcgatttaaattgttgtgttagttgttatgagagtttttatgtgaaattctataaaaataaaaaaaaaatattttaaaatataaaaataaaaaacccctaaaatatttccactacatatctaataattataatccaaatattctcaagttttcatgatatattacattaaccgtatgaaaaaaagggtttcctagaaaaatgtccccttccaaaaaaggggttaacttaagtagtatgagaatgtaactttgtacaaaagttaggaatttagaaaaaacaaacaaacaaaaaaaaaaagagagagagacaatttctgcaaacaatttctccaattacacatataatgattaattaacccatttcgatcttccaatttgaattatatgaattagacaatcacatagggatatgattttgtcccgtgattgtactttcacggaatgcatttcgtgatgtacggcagccgtcagatgaaggacttatttgatctgacagttgggattgatctatgggtaattagggttaaaaagtagaaacataccctgacactcatttaatgtaccccgagacctatctaatgtaccacggaatnnnnnnngtgaaagtacatcacgggataaaatcgtatcctgtatatataaatgataaactgtctctggcttgctttttttt

SEQ ID NO: 56268 - DNA, 889 bp, Cannabis sativa
aaaatataagccaacataattttggtttctagcacattccaatataactactaattcaaaattgttgtcatttgtcatcaccgtatctcatatgtgtagtcgtcactattattcataataaatttactttgtacataaaataaatgagacaataatgagttaactactcatttttatacataagtgaatcatattatgttataaatttataacttgcatataacaagtaatttgacatgatgaattaataaatggattttgattctcaaaagcaattttcaaacatatataaccatatatacaattaaactaaataaataaattgtttttttaattaaaattaaatattaaattacaataaatatatatcaatatttttatattttcataaaagtaaaatatatcaatttttttttaaaaaaaaaattaaagaattaaggcatgaagaagaagagagcaccataataaagtataatatcttaacaattacatgttttattgtaacatataacatcttatagaatgtttatatagactaaaacttataaaaaaaaagtaggaaataagagttgcataaaatatgtcagcctttaatatatattaatataaaaaaaactttggtagtttttttttaaataaaacattaataattgttgagagaatctacacataataaattattaaaataaatgagaaataaaaaaaattaatattattatcaagaaaattataaaaataaaattatagtattaatatattaatggattgatatattttatacgaatatattaacattcaactaatatattaataaagtataagcaacttaagtagaatttgtaatattaatatattaacattcaactgattattgattttcacacctttt

SEQ ID NO: 56269 - DNA, 841 bp, Cannabis sativa
  modified_base (514)..(514): a, c, t, g, unknown or other
aacagaaatagacataaagaaattaaagagttgaagaaagaaactagatggtgatttagctccggatcatcaagatagcttcctctcctccttcattcacttttcggtgctgaattttgatgcctttcatcatctgagtcgagtcccttatataagaattagggttgtgcctctaattggaaaattatcgtatttaggtcaaaaatctcgtgtttcgtatttggtcgcgaccataggcaaaagtggaaaaacatgcattctgccaatccacccaagtcgcgaccatagtcgcgaccagagaaaagggtcgcgacaaggccttgtcatggtcgcgactactgatacgtttctggcagtttcagcagattttcaccaaattgtcccgtcttttcgccaattgactaaatttgaactacaatgcaccggaaacctgaaacaaggaaaatcaagcataaaactactctaaaaggctaccataactgagaaaatgcttattaatgtgacccggaacttnggctaaaaatagcctaacactttgatagggtcttaaatagggtaacaagctgaaccaaatatttttaagaagctgtaatcaggtttcctactaagcaaatttttaatgggaaatttgcctccaagagcaggtgttggaagtatattaatcaagtagatagaggtctgaaaggcatcacgccaatattttaagggcatgtgtacttaagcaaggagtgttaagcccatttccacaatgtgcctacgctttctttcagcacgggcatttttgtctgtagtatgggggcatattctttgaaatagaatgtcatgagatcggaagagcggt

SEQ ID NO: 56270 - DNA, 2307 bp, Cannabis sativa
tttagggcataaagcccaacaggtagttaccgattgtcaagtcctcgcataaaaataagcaagaaagctaatgatcgattgaccttgatggatttggtgtggaagatcatagactctttatcccactttcctaatacctcggttcattttatcccaagggaaaggaacaagttaacacataatttggcccaggctgcattaggaactgataaagagtgtctttggaacaattgtgctccatctcctccttagaccttataaccggggtgttgtttgctttttctttgttataggtcttgttgtttttttttaaaaaaaaaaaaactaaattacataactcataaaaaaaaaaccaaataacatatataaatttaactacatagaatatatctaagggctatgacctctatatgtcataccatacggtccgtacctctgcccttagtacacttattttagacgtgcactagagaagctcctataatatattgctatataaaattattgttcttattattattttttttaaaaaaaaggaagggaattctaagaaaactctacattgcactctcttttacactttctttacaattaagtaacatgtgtaactttttaaagtatatttaagtatagttacaattatacctttttactttacattaataattgaaatgtgttatctcatttagttgtttattttttgggattattttattaatttttcatattttttttactaattaatatgcactattatgtatttttcttttaatttgtactattttatgttataaaaaaaataaaaaacactaactctttctttttttcaacaaattttgcatcattttttttttcatattgtatcattctttaaattattttttatttcatgtttgttatttatatatatagaatacttcagaatgtgtattactcatgaatggttactaaacaaatttaactatacatattaattttaaaaatattaaaccatcaaattttgatctaatgacaaataatgaaagaaaaatttgaacttctatgctgaatttaactacttaattaaaaaaatataaaaaatattttttttacactatatcaaatatatgttcatataaatatatttaagtcaaactcatttttttttcttttttttttttgttaatttttttttttctcagcgatggaacaatctcagtccatatgatgtaaaaatgagagattttttttttttaattagatagaaaaattgagcataaaaatttaaaattttctaattttacccatttatgggtaatacctaatacccattaagagtgcacccatatgtatataaagaaacaacaaaaataaaaaataaactaaatacgattatacctagtcaatagtatatgttagatcgatttacttttgttttatttttttaagtaaatttttctttttcatgaataggcaaaacaaaaaattaattgatttaacgtatatacatatttgattagagagaaatttgagaacaatttaagggaatgttaaaaaattttagaaaaaaatgatacgaagcaaaaaataaaaaacaaaaaagaaaaataataaaaaaaaattggtacaaatttataaaaaaaaatatttttctattttttataaagtaaatagccaatatttattataaaagaaattaaaagagtgatttattgtggtacatattatctattaaaaaactaaattttaataaaaaaatatataatttaattaaatttttttattgtccggaaataaaatcacacattttaattatcagtaaaaataaataaataaattattagttttaagaaaataaaaaaaaaaatgtctcattttaattatcattaataaaaactaaataaacacataattataattatttttaaatataatttaaaaagttagagatgtcatcaaattaaaaagagagtagttttcctaatacccctaaaaaaataaaataaaaaataaattaaatattgattttaattttttgatgcaaatattaattttaattggatgccaaatattgtagtatacagcttaccacagatgaatactaaataccctaacgaatgaaagtgaaaccctttctttctgaatttttccgcctctctcaaccttcttcccttcctcacaactcacactacttcagtcgattgcccagcgaccccggacggcagcttcaccacacggtaaacactaaacatataacaatgtatttgaaattagcataagctaatatggctcgcaacagattataatcactgagcattaacttcacac

SEQ ID NO: 56271 - DNA, 1133 bp, Cannabis sativa
gtgtcaagttttaaattctgcactgttatttctatttttttctttactattatttttgcactgctaatgaagataaaaaaggtgtcatgtaagataacatgacggtgaattgtggtcatactcaaaggagccacatataaatggttcaaaaggcttggaccaagaacaattacatgtagaaacaatttttttgaggaattccttcaacaagatcaagctatgagtgattacattatccttgtaacaattatcaccaatgtgaagcaaggggagaaagaaatcttaagaagatacgtccaatgctttaatgccgaagtcaccaaagtagggaggatatttgacgataaactcaagttcaccatagctgttggagtacgccctagaagtagattatgggagaatatgttgaaaagggaattggatggcattgaagacttctatgagtgagaaaaaaaatacatccgtattgagaagggtaatggagtcttagagacagacacaagcgagtgtactttagtaagctcgttagacccctacaacgtctattagacaatacccctaatactcataagctgatacattcaagtgaagtctctgttatacaacccataaaaattatatatccaagatattcctctaagtaaagttccactatgcgagaaggtgttccttgcaatggaagttcacattttctacgtcgcactaaattaaagagggcgctcatataggcctttgaagaaagaatgtgtatttaggtgattacatatttatcaatgaaatgttaagtttttactttacacatgagattcgtcactctccacgtgtctgcttggcttgctcactatacttgtcaattaaaattgtcaaagtgaatgaagcagttaaagaaaaaataagaggatgaatccgctcaaagagtaatgctccctcaaatgtaaatatgtttaccacagtgggaaaagtcacttggccaaagagtaaccgtcagagtcactcggccaacaccaattacaaatatcactcaacctcgtggtgaccaaagtcactcggccaaagagtaaacaaatgtcactcagcctcgcggtgaccaaagtcactcggccaaagagtaaacaaatgtcactcagcctcgc

SEQ ID NO: 56272 - DNA, 740 bp, Cannabis sativa
tttatatatacaaattgaaccaaggcagtatactgccgaaacaaaaaaaaaataaagacagtaaaaaagttaactttgccgtgtcacagtatatttgaaagaaaaataaaaaagttagtaaatgatgtaaatttccctaataaatagtctacaaaggccatttctctacaagttttgaaataaaaacattaactaacataattctatgatttgaaaccatttgctatactttccctatttgattttctaaaaatattaacttcatcgtgagttatatattattccatgctaaatatattatatattatgtttgtttgtatatacagtggatattatatttcaatatatattacatatattaatactttgagcataaataatgtaatatacaattaatgtaattactttaagtttcattttatatagatttgtacagttgattatatgaattattattagtataatataataatggtggaaggtataaaaataaaaaaaatacttttaatataatgaatgatgatattatttttttatgaaaaaaaaaaataaaaaaataaaaaaatatcattaatccattaatgaacaattttaagaaaaattctcttttctcgtgttttttctttgacaaaatattaaactctcatataaaataataaaaataaaaataatcaaaattaatggttgaatattatcaaaatactataaaaataatgaaaaaatatttatgatgacgaatg

SEQ ID NO: 56273 - DNA, 1884 bp, Cannabis sativa
tcaaagtagctttctatacctttctttcccaaccaaacatactccaacacaagagatcttcccctatataaaaccctaaacaatcctcaaacaccataaacacaacatcccaatcaatcattacacacaaatcacaaccattgtgcttgaaaaatcttgagttttgatttaaacaatggcctttaacaatcgtttcaccttagttttattcactattgcttttgcctttatgagcattgataatgggcttgcagctcgtaatcttctccaatcaacaggcccaaatttaccaaagcccaatatcccttccataccatctctaccacagcccaatttgccaactttacccaatgggctaactatggctccacttccaagcttgcccattgggcccactatcccaaatctcccacctatgccaagtataacctcgttgccaaacatgcccaaaatcccattcacaatgccaaacattccattcttttcttctccaccaccatcttaaatttcaaaatttatagtccttgaagatgatgaaaatgtttttataaagtcttaaatgttttctctaccttatagttagtagagaccatattattatttttctttgtactttttgttaattataggtatgcttgtgttattatttaattacaagaaaatgttgggttttttctcttgtactcttgtttgaggtgtgatttattattggtcttgtattgtcatatacatatgaaaaagaaatttgaaattatttggagtgttttgtaagcattgtatgctgtcccttgtactacatcaatatccatttatatacattaaattgaataatgccatttttgtaagtatttttataaattaaagaaaaggaaaaaaaaaatatatcactatcaaaaatatgactatctaaaaatatatcactgtttaaattaaaaaaaaaaaataaataaaagatatcactgtctaaattacaaaaaaaggacaaatatatcactatcaacattagtggaggtacatttgtggaaagtggtgtggtctatttttatgtgtaaattacataagtatgacctttttaaaaaaatatatatatattaaaaatttaaacttttgccaaaatttatgtaatggaattcgtactcccatattagtaattaattaaaaacttgtgttattatatattacctgtaacattttattggttaagaatttcgaaattcaatggcaaaagaactaagtattgtaatataaacttgtaagaaattaaaacaaaatccgttgtagtctagttggtcaggatactcggctctcacccgagagacccgggttcaagtcccggcaacggaatctgttttttttttgttaatttaacattttcaatgtattttaacaaattaatctgaaataaataagaaaggtttcaaaaattaagtcttcttttatcaaaacacccctacaaaatactttttcgcaggtaaactcttttaatcattatttcacttgcacttgaaattttaacggtaaaacttctaaattatttaattattattaaatttaagaagtcatctacttttcacaattaattgtcaatttagattgtttatatatacacttttgtacatgtatcaaatttatattggtacatctactattattatttaaaaaaatataaaaattatttcaaaatttataatatatttttttatttttttaaagtattttattttatttttataattttatttaattttaaaataaattttaaaaattatttttaaataataatatagatgtaccaatataaatgtattatatgtataagagtgtacacataaacaacccatagtaactgttaactaaataacaccttaaatttgtgatgagacc

SEQ ID NO: 56274 - DNA, 1140 bp, Cannabis sativa
tcccccttaaggtggagagtatatgttacaaattcccattttactcttgagagcttcaaattggctaggaagcaaagccttggtgcaaatatcagcaatctaatttttgctagaaatatgggtagtctttatcattccttcttgcactttgtctcttacaacgtgataatcgatctctatgtgctttgtcctttcatggaagacgggattggcagctatttgttgggatgccttgttgtcacagtgtaaaatggcaggtcctacatgttcgatgttcaagtccttcaaaatggacaagagccaaacaagctcacatgtagtattagccattgctcgatactccgcttcagctgaagatctcaaaattatagattgctttttactcttccaagaaaccagagagtagcccaagaaaataaaaaaaccggctgttgatctccttgtgtcaacacaagctgcccaatcagcatctgtgtaaccttggagctgaatttcagactttgttggataaaagaacccctgtccaggtgttcccttcacatatttcaaggctctttgggcaacattcatgtgtgtggctctcggggcaacaagaaattggcttaacttgttaacagtgtaggccaaatctggtctagtaatagtgagatactgcagcttccctattatttgtcaatacaacttgggatcagcaagagaatcctcactatcttggttgagttttatatttacctccataggtgtgttggctgctttacatccgagttgtccacgatcctctaagagttgtagagcatagtgtctttgagacaagaaaatgccctcatcacttctagcaatttcgagtcccataaagtacttgagctcaccaaggtctttcaacctaaacttatcattcaatctggttttcaaattctgaacagcagtcatgttgttgctagcaatgatcacatcatcaacataaacaagaaggattatgatacttgatcctttttgttgtatgaataatgaatgatctggagctagtgttgaaaaccttcagcaagtaaagctgtagagaatttttcaaaccatttcctagaggcttgctttatgccatagattgatttttgtagcttgcatacaacattaggtggcaac

SEQ ID NO: 56275 - DNA, 2462 bp, Cannabis sativa
ttttctaatttgacttggttgttcttgtcgttttcaaattatgatgtcgtttttatttccattgtcgtttattacattaagcttgtaataactttgaattagtcttatctttattgctttaattattctataataacctcactcataattttcttccttctttctcatcttatccatatacataaatagaaatccccctaaaaaaacaaatataatagatcaacggttggggtccacaaacaaggatcagatcaacggcgtggatcaaaagttgaccataaagagaaaaaaaaaacggccatatttacaggctgtgatccacacaaccaaaacctctaacggtcacttcctttaaccaaaaaaccaaaaaataaaaaatattattattattattaaaataaaaaataaatataaaaccctaaaaaaaggtcctaaatttttcaaatttttttatgaccgttttgtccctacccttctcctttttccaacgctcctctctcttcttcccctgttttcctttttcttcaatttctttctctgaaagattttgttatttgaattgaaaccatgaaattctaataaagatctttcttttacacaaagaaagagcaaaaaaaattacctttgagaaaaattaagaacaataactctgatgggttgttttcttgcttgttttggtacttctaaaaaggatcgtaaacctagaagaagacataggaatcaggttttgccaagaggagcccaacaacaagtatgtgttttttgtttttgttctttgatcctttcacagattcatcttcgtttttgtttttgattctgtttggggtttgagaaaactcatgaaaataagaacaacccattttagttttgagataaagtttccgtttttggatttgatttttagtttgtgattatgggttttgtttattatctggaatggaactaatgtgtttgaaaattattgcagaggaatgctagtttcaattccgtacaatgtgttgtctcttctgtaagagaagagtctgaaaaccccattagcttagttgaagagctttcgtaagtgattaaagtttttaacagtggaaagcttctatttttttttttttttgaatattaatggaagttttgagcttttttctctcattgtattttcaggcagaagcagcccgaggttcaaccaagcttgagtacaaggaaaaaggtgacttttgattcaaatgtgaaaacttatgaacatgtttcaactcatgatgatacagatgtttcaccagttagtgaagaagatgttaagaaaaaggagaaggagaaagagagagatcatgccaaattaagcttatctaattgttcttctgaagagagttcgatcacttcgagctccttgctatcttttcccccgaatcataggtatcaaaattgtagagaaagtgatgatgaagaagaagagttggattttggggacagtgatcttgatgaggatgaggatgatcttgatgatggggagttagattatgaagatgaaatcattgcaccgaaaagggtagctttcggggaagtggataatgagatacaaacaattgggttgagccgaaatgctcgagatagaagaggttatgttcattctgtcctaaatccggttgaaaatctttctcaatggaaagctgtgaaagtaaaaggaggtaaaccagtaatgatgttacctcagaaagagaataatttctcattagatcaagaaccaaattacaaggagttatctcttagtttcaagtcaaaaaatgaccaatccattaagccaaagcaagatatggcagttgatgctagcctctcaaattggttggttacaccaggaaacaccacacctattaataagactagctcatttggttttactactcctgatagatgcacatctcaaggatcaaactcagtgaaaagcaaagatgaagataggccaatattaggtgctttgactgttgaagagataaggcaattctcaacaacaaattcgccgaagaaatccccttgtcgaagccccgatgagatgccaataataggtactgttggaacctattggagtcattcaggggctactactactagcaatgattctggtacagatacttctttcaaaggaataccaaacacaactagcaagtacagtgaggtatataatatgatgaagtattaagacactgattatggggaacaaacaaacaagccacaatgtgtgatatagttttctgatttttgagttttatgggatttgcaggatagaagagtgaattggcacactactccatttgagacaaggttagagagagctttgaacagaggagggactactgaacctattggcactcttagctcatattagatacaacttgtgaaaatgttcatttgtgatgataagtttggttgtgcattttgttgttgttgttgttgtgtgttgataatgacattttttt

SEQ ID NO: 56276 - DNA, 3196 bp, Cannabis sativa
gtctcagtcccagtctaggttctagtgctagtccaggttcaggtctcggtcctagtccaggtttgggtcttagtcctgatcttggtctgggtttgagtccagggtttgagttcgagttctggtatgtgtctggatctgtgtctgagtctgggtctaggtctgggtctgggtccgagtttcagtctgtgtctgggtagaggtcttggtcttgttctgggtctgggtctgggttctggtctagttcccaagtcacgggtcctgggttcgggttttgggttgcaggtcctggcgcaactctaggtctgggttcgggtcagggtccgggtatagatcccagcctgggtccgggtccgtgttcggttctgcatctagatccagtttttgattgaggtccaattcctattctagggtcctgattttggttcttgttcaaattttgggtttcgggtctgagttagtgtttgtgtcctggtttggaaaaagttccaagttcgggtcttggtacgattgcaagatctagacaccgactacgggctaggtccatgccccatgtcgtaggtgaagatccatatccaagtctcgggtccctatttcgttttaattcagatcttgggtctcggtccgtgtccgtgttcgggtctgggtttaagaccgagactagggtcgggtcttgggtcccattcctagtcatgtttcccaattctggttctaattttgagtttgggtctccaatctaagtttgggtcctaggtccagatcttagtctccaatcccggtttgagtcctgtgtctgggtctgggtccaagtccgtgtttgggttcagattcgtgtcccgagtctcgatccaacttttaattcgggtctgcgtcccactccgggtctgggtctgggtcctagttagatcctagttaacagactcaaacacaaaatcggacttggacctaggtcaggggtacaggtatttgtctaggtcagggtttgggtccgagtccgggtctgggtttgaatccgggtctgggtttgaatccgggtctgggtttgtgtccgagtatgggtcccaaatccaagcactgactacgggccaggtccaagccctgggtccagatttggatcacggtctcgggtcccaatctagtttcacttcggttcccatgtcccggtctgggtcctatgtcaaggtctaggtccggggtcaggtcctgggtctcggtcccaattctgatgcatgtgtcctgggtccaggcctcccatctaggtccgagtcctaggtcccagtccaagtccaggacccggttagggttcaagtcttggtccgagttcgggctcgggttttgatctcggtctacgtccagatcaaggttcgagtctaggtctaggttctggtccgagtcatgagttccaatctgggtctgggttttgaggcccacgtctaggttccccatccaagtctaaggccttggtcccggtctgggtccatgtttgggtttgggtcctagtcctagtttcgatttcgattcagtgtctaggttcgggtttgggtccgggtctaggtcggggtctgagtcctggtccgagtttgggtccgagtctaggttcaggtccgaatcccagtctgggtatgtgttcgagtctaggtccgatttcgtgtcccgagtgcgggtccgagtcagggtctgggttagggtctcggtccgaatctaggtcctaagttttgatcccggtgtgggtctaggtctgggttcgagtctaggttcgtattcggatccctatttaggtttgagtctaggtttgggatagggtcccaggtctaggtctgggtccgggtctgggttttgggtccgggtctcagtcctggtctgggtaaacgaccgtgtctgagcccgagttctggtctcaatttgggtttggcgctaggtccgagtttggtactaggtctaggtttgggtttgggtcctggtcattgtcctagtcttgttcgagggtccttgtcaagcggtttttgttcaggttcctatttcgggtcccgggtctgggtcagggtctgatttgggtcttggtccaggttcgggtccttgtctgagtcccaaatctggatccttttcacgtgtcccgatcaggttctggtttagatttcgggtcccaagttcaagtttgggttcaagaccgagattgtggtgcagttctaggtcccggtcccagttttgtgtcttgagtcgggttccctgtttaggtctgagtttggtccatgttcgggtcccgagttcaggtctaggttgggagtacaggtcctggtctagttacggttccgtatctaggtcaaggtctagttatggttcgaggtccaggtccaagtctttgtttcttacccgttcccaagtcccggcctacattctattttgattccaattttaggtcacagggtacgggttcgggtctaagtttgggtgtgggactaggttcaggtcggggtttgggttcgggtctggggctgggtcccagatctagacaccgactacgggttcagtccaagccctaggtccagatcctaatcccgatctcaagtgccgatttggttccatttcgggtgctgggtcccaagctgggtcctaggttgaagtctgggtttagagtcggatcttaggtctcgttcctagtttcgttgcccaggtccttatcctgattctaggtctaggtcttagttctggtcttggttttggtcgcggtcaaggttcaggtttgggtgctagtcgcggtcttggtttgggtgtcggtcttggtttttatttgggtttgggttctggttttggttttggtcgcggtcaaggttcaggtttgggtgctagtcatggtctgggtttgggtctcggtcttggtttttatttgggtttgggttcgggtctgggtccttgtcctggtcctggtcctagtcctagtctggttccagttccagtcgcgatttcgagttcaagtttgggttctagttcaggtcagggttcgagtcctggtccgagtttgggttcgggtcccgatctcgatctaggtccggatcgggcttcgggtgtgagttaaggtcctgggtttgggtccaggttcaggttcgggtctgagtcccaggtttcgatctcgatctgagtccaggtttagttccgggtcgatgtcctaggttctgattctgggtctgggtctgggtctgag

SEQ ID NO: 56277 - DNA, 681 bp, Cannabis sativa
tgtgtctctactgagcaaaagcacggcctacaatagcccgtatttcttattgcccatgatggaggaggtttgtatgatcttgaacttggcccacgtcttcttttagcctggctagttcataatcatctcccaagtccacatgaggttcgttgaggccagtctggtcaactccaggccttaggggtgaaaatcggtcggtttttacaattttgtaaccgaccagtcgattacgatttatattttacgaaaactgtaaccgaccgtttagaaattataaccgtataaaaccgaccgtacggttttttgcggttttcagtttggcggttctgggcggtttttggcgattttgggcggtttttggcgggttttacggttttttggtttaactattttttttatttcaaaaaccgaaattgatcgccatgtcaaaaaaaatgaaactgactgccaaattcggtaatgacgtggaaccaaaaattcgattacggtctggtcggtttgatggtcggtttcagtttatcagtttttatgaacacccctaccaggcctgatttctccagggtacacctaggggatggttcttgcttggggagcttctgtggtactttgaacagtcggctgtccaccattgactgaaacctgtctggtatagaccaaaccttctggtcgggacattgcagt

SEQ ID NO: 56278 - DNA, 1148 bp, Cannabis sativa
cgcagaactcgatggtactgtaattcaaagagcctggaatggcgaaagcttaaaatgttattatcaatagtactcgcattgtatcgtttgtactcgctatgtaataatacttagtcagtttatttacataaatattctaagtatagggggtatataacccactcactttgtacaattgatcaataaaaagccatgaaatttttcgagattttgaaacttttctaccttaatgcttattacaccaagctgtaattaaaccgcaatcgagatattataaacagaaaaatgcgagtactcgtgtactgcgaagatgttctaacataaatatcaccgaagggatgtaaatttgttcaagagaaaaataaagcataaatttgtctaagtacaaattgcgagcacccttgtaccacataaaaaagtctagcaaaagtaaatattaaagtaaaaattaagcattgggagcagcaggggcagttggggtagtagatccatctgcgactttgctggcagcctcgtccacaacttcctcggtgttcgcagcatcagcatccttgggaaaaagatttcctccaccgccttgagtttgcgtgggcgacatggctcgaaaagcctcagccatctcaaccgcctccgccccaaggatcgagaagtcgaaggccgaaatcttggaaagggttgtataaatgtagttagagaccgcttggtcgtactacttctttccattctccttctcgacctccaagtcgcgagacatctcctcgatcttcatctaagagttcttggcttcaagttcgacttgctccttagacttgcaaagttcctcgagctctttgtccttggtagtcgcatcttgcttcagtttcttgatgtcctcttgacattgaacattctgccttttcaaaagtttgacttccttggaaccagcgacaaaagccctcgaaaacatagtaatgaactgcgaaactaattccacagaacgaggcagtagctcttcagcaggggtcctgtcgacctttgatataaactcatcacccacaaacttctcttgaagagttaggatgttgcgagctcggacagccggatcgatcacgacattcttccccttgtcttgtgtagccttagctagcttcttggaggaatccgtggca

SEQ ID NO: 56279 - DNA, 5463 bp, Cannabis sativa
aaaacagtttggcctgtttttaaggtgtactttctgagttatttcacatttttattccgagggtcgttgtatttaaatatgactttgctaggagattaataattggaaatgattctatttaaacattcttctactcaattttttttaaaagatttgcctttgtgttcgaaaacatattaatatttaaagttaaggaacagcaaagcgcaaaaaatagtcaacaaacaaagtttaggagaatattacaaatattccagtaccataatagaatattacatgtcacttgcaaagagaaataataggatagcaatgaagagaatctagccttacaaagaaaattttggtgaaatgactaacaaaaaaataataataaataaaataaagaaagagagaaggaatcaaagttaatttacaagactacaaactgtaaaaaaaaatggaacttgggctctgtttggactcaatttatagagaacatcccattccatacaattttctcttcaaatttagttttgggaactttttttagtcatccaaattacgttaagcttatgttatatagtccctctattttgttatttctattttcctcataaaatctgggttccaaacagaggtttaactaaaaatatacctgaaaattgtttttatttaagcttatgtcacgatctgtcttgttctctaacttgatgatatatagaaaccaatctgctgagaatgaatgttaattcaaagcaagtgtggttcaaacagggatcatcttcaaaccggcagcaacaggcatgcctagaaacccaatgaacaaactcacaaaccactgtgaaagagtgaggggagaggtgtttgcaaatgttccaaggaattcaatgataattatttggaagaccacagtgcatgcaaggacccccacgaacacataattatccaatatgcccttgaaaacatttatctcctccatctctcgtgagcttatctcattgaaaacctataagaataaaaggatgaagggaaaaacaactaagtcacctttgtgaaacaatatgtagaccaaaacactttagatggtaattggtagctttgcttaagatagctgtagaaatgtttacctggcaaaagacaaatgaattgaaaataagcgtgttaaggatcaaatcagaatccgagccacttagaccaaatatctctttccctttaacctggagaaaccatattatcacaaactggtaaatagattgacccaggatattcctccacatgacattgctgatgaagtttccttttcttccaactggtgttcgcttcattaagtcgtcggttggaggctcagttgcaagcgcgagagctccaagggtgtccatgatcatgttcacccacaaaagttgaacagctgtgagaggagcacttcctggagcaggatttttataggaaaaaaagaaagttagaagttgaaaatgatttctttgattatgaaaacttatgataggcttcctaacctgttagacaagctgaagagaagttcacaattaaagcaaccacattaactgtcaactgaaactgaacgaacttctgaatgtttatgtaaactgaacgtccccatttcgccactgtagcaatcgtggtgaaattgtcatctagaattatgacatctgcactctctttagccacctgaagataagaaacaaatataggttggacttattgcattgttaagatcattgatttacagcttgaaatatcattgtcactcgttgggacaatgcaattttagcaaatgaaaattagtatcacactcacctcagttccagcaatacccatggctaatccaatatctgcctcatgaagtgctggggcatcgtttgttccatcaccagttacagcaacaacttcaccaaatgtagtcctcaactgcttcaccagtgtatgcttgtccaaaggtgaagatcgagccatcacctatagaggaagtatgattcaaagtcagtaattagaattaattaccatcactatgcagtaagtaggtagagagaaataaaggtaggacctgaattttaggtataagttcaagccattcctcttgactcttctccctaaatacaggaccttcaatggcaattccatcatctgtaagtattccacattccctggctatagccttggcagtgtttatattgtcacctgtaaccattcttactgtgatgccagcagcacggcaaactgcaacagactccttgactccaggacggacaggatccttaataccaacaactcctatacaagtatagccagaaattggtataggagtctcaggagagaatccatcttcaagttctatgtaggcaaggcatagagttcgaagtgcctcgctagcaaattggttaattgttgcattgagatgttcaatagaagcttcatcaagtggaacaatttcaccatttgcattgatagccttgtcacagttagccaagactatctcagaagcacctttagtatgagctcgcaaacctccttcaggaatctccaacaccacacccatccgtttctttgttgagttaaaaggctcaactttaatgagcttagatgcttgtctctctgcctgaaagtctccacccaaagacaaggcaaattccagcaaagcagtatcagttggtgttcccaatatctcacgtttcccatctttgttaaccacaacttctccaccagtgttagtgaaaattgattgtaggagaagcttgacaacaaaatcaggtaaatcggaaagcaagtcattattttctttgcttacatccttgacattcatacaaatgcatgatttcacaacagtcatgtggttagtggtcagtgtcccagttttgtcactacagatacttgtggctgatcccatagtctcacaagcagcaaggtgtcttacaagtgctttttcattcatcattttcttcatggcaaaggcaaggctaagagttacagccaatggcaacccctctggaacagcaacaacaacaattgtaactgcaatagcaaagaattccaacatttccaatgcctcatcaccagaccaggtccagtgactcccctctcgcagcttacgattaactagtccttgaactaaaactgcaaaagtcacaacagcaaagaaaaggcctatctttccaataatggtggccactccattcaactttacttgcaacggggtttcatcatctccaccttcactaagagtggccataagtttaccccattgtgttctcattccaactgtggtaaccatcatcttgcatgatccatcttgaaccttagttccagaaagaagaaaagggttttcagcggttaccattactggctcactctcaccagttaaactcgattcatcaatcaagacagagaatcctgagacaaatagtccatctgcaggaacttgatcaccaatagaaagatgtactatatcaccaggaagtaaatcataaattgacattttctgcctgaatccatttcttgtaacctgaatagatattttctttttctccttgtccaagtccttgaactgcaaagattggcgataatcacttattgctgtgacaaagacaactagcaagatactcgccacgataccaaggccatcatgagcaccctttggccacccttccattacaatgccaactattaaagacacaaaagcacaaacaccaagaatcataagagtcatatcttgcaatgcttcccaaacaaataccaagaagctccttgtttgactctctgtgaacttattgagtccataaacgcctatccttcggtttagtgactcagcatcagtgttgagcccactatcaattgatgtggttagctttcctgcaatgccattaacaccaccatgaactttaagcttctttaaatcgtggccttcaacaatgtaccccaattcatcaccacaaatctcaaaaccagcggctttgacttcctctggtaccgtgtaatcacttggctgcactcctgtaaggacatcagagtatgtcacgagaaagaacttgcgcaaaatcaaactttataaataaatatgataattactatcaagattaaaaacaggaacttttaaattcaccttgaataaattgaaatgcagctttcgaaaccaaaacagcaactcgaagcttctcctgcagtttaggacagaagaccatcaatataatattcacattaataatcttataacatagtgaaattcttctttatcagtaaagtaatagatttagtaatttgtattcattatgaagaatcactaagctcctgtttgggaggtgttcagcaccaaatttttttcttttttaaaaaaacatcaagctaagaaacagtctgtgtttatgaatgcatggaaactgatttcttcatagttttacattttctgaaatttaagtaacgccatcctctatcacttctctaacttttaagagttttctcctatacttatggtagcttacctcaattgcctctaacaaataaagagggaattttaatcttactaatttacaatagttatagataaatttcatacgttacacttacacacatgttatatattaaagttatgccttagtgataaatttgtagtaaaatagacttactatgtcatagagaaacaatgttatgtgttagtaaaaaaaaggtacatcatttagaaattaattactatatcaaatgaggaaatagccatggttcctattttatagaatggttatttattcatctttactttttcaaagctgaaagtttaatcaccaactccagctggttttatttaaagtaaatctgttttaaacatttaatatcattatatattgttttattgatatatgtatgtataaaatataattcatcatttgtaaatatagcacatgcagatccaccaacatcctaccccacattcaaaaaacaatcaagtaaaaagtactaattaaaaaatcaagttgcctcaaaaatttgaatatctcaaaacaatacaatattacaatccaaacacggtcgaggcacgtcttctaatttgaatagtcaaactttttgttaggtttaataaaaaaattaaaattaaaaatgttttaaaaacctgattggtccggcgcatagcagcggcttcgaaacgcttggagagattcgcagtgaaacgaaatcggcgtttggggtttttgacgacggagcatagttgtctccatttctgcaacgcctcatccgacgagtgtttcgcctgaactgctctaaaattttcattcagataattttccatctcataagtcttataaaaccctcttcttcttcttcaccagtaactataactactactatatcgatttatatatatagatggagaatcaaatcaaaacgcgtatgaacacaattaattactgttggagaatatatgaataaacttgcttaaaattttaagaggaaatacgaggaaacaaagctctctctctctct

SEQ ID NO: 56280 - DNA, 603 bp, Cannabis sativa
tggtgaaatagagattccaggtatataatgattgctttttcatgttttgataaatgtcatagcttgaataaatgatgctttattggtccaaaaataatttcttgttgtttgtagaatttgatatttaaatggcatcttaaagtttcaataactcatatgcgacatggcagttctttcccgtctttgtcaaagtatcggactagtgtaaattagatatcgactaaagaaaattgtaaatgagaaatttctcttctgagttctgacctcactgtagtaatctttgtaatggagttgtgttgtcatagggcttaagtttatggctatgtgaatggtttgttgacattctccctttcatatgcagatagtatattgaaacaaattggctatgagaatcacttgaaggttgccacttgtgactattcaaaactatatttccattgccaagagtttggacgctttgctaggtgagtttttgactatcccatgcttgaattgatatgattatgttccctcacctctctctgagatgaagtctcacaccatgaatttacattattctttttttgcaggtgtcttaggattcaaaataatatatgtggtaga

SEQ ID NO: 56281 - DNA, 1449 bp, Cannabis sativa
  modified_base (793)..(801): a, c, t, g, unknown or other
tttagtagtaattaatctaattccctgtggttcgacctcacttgcgtgagtatactacttgattgcgtgcacttgcgtagtgtttataaatttccgcaacagtaagtttggttacgagcaattttcttattcataaaaaaaaaaactataaattatctttcaaatgaagtgtattgattttataggtgcttctataatgtatttttttaaaagagatatatcatttatctatttcgttatctaaaataattttttagtgtaattttttttttcatatttgtgtacattagagttatttaagaaattctctaaaattttgaaaaattaagaataatttacaatattgaaagcagtattcaaacagtcttttacaacgcgtataaaaaaaaaatagtcatgtgtgcaatagactattgaacctaatttttggcgtgttaatttttttaaaattttttaaaattttgcaggatgtcttaataactacaacgtacacgatcatgagaaaaaattaaattaaagaatcttttcgaataccgacacagatatgagtgtatcgatgcacccattttaaaaagtgcattgtagaatttttcgaatttatatatagggtttaaatataactctttatagggtattgattttacagggtgcttctataatgtactcccttaaaagagatgtactaatacactctctatttatttcggcacccaaaagaattttttggtctaattttttcatattagtgtacgttatagttatttaagatatcttataaaattttgagaaattnnnnnnnnnttacaatatagaaagtagtgttcaaataatctattttacacgcatataaaaataaaatactcgcgtgtaaaacacactgtttgaaccctgcttttggcgtgttaaatttttccgaacttcttgaaattttgcaggatgtcttaaataactataatgtacatgaccatgagaaaatttttgactaaaaaattatttcagagaccaaaatcaatagagttacattggtacatctttttaagggggtgcattctagaatttttggattttatatatagggtataatataacttctttatagtattattcttattttaaaagaaatatttttatggtgtttctacaataaactcccttaaaatgagtctactatgcacttcttatctgtttcaacatttgagagaattttttagtttaatttttttataatcgtctatattgtacttatttaagacaccctataaaattttgagagatttaaaaaaaattaaaatgtcaaaaacagagtttaaatagtattttgcaggcaagttttttttttatatattatacgcgtgtgcagtaaattatttgaactctattttcgacatgttaaatttattgaatttctcaaaatttgaagaatttcctaaataattaaataattacaat

SEQ ID NO: 56282 - DNA, 970 bp, Cannabis sativa
tcacctaacgcccaagttgacattcccaactagggtttcaattttcgagaccgtcttagtgaaaatgggtcaatacttgcattgggacatcaactatgcatacaatgaacatattaaggcataaaaattaaaattggagaaagttcatttttaagcactcgaggcctcggggcactaagcacccctgcacccaggttgacaatttgccaatttgggtgccttccaagtatcatatcaacaatataactttgtatcttccttgtcttcataaaaaacatggaaataggtcatttcggggaagaaacagcacttcataggtgtcagaaacaaggtccagtgcccaggctgacattttgtcagcctaagctaattttgatgttttttgagaactcttccgaccatcttctttgttttcagaacatattgagattaaactatttctggggaccaagcagaacttttaaagggtcataaaggggatccaacgaccagattgatgcctagtgctaggcctagcgcctaggttggcatattgtcaatctgggctgtttccaattaagttcactaaaaaatgttttgggaaattttatgtcattagaaataataaagattgaagaaaacttagggagaataccataaacatgagcccctagaaaaggggccaagcgctaaggttgacctggtgttgggcccatcacccaagttgacaatcaacctaggactctgccttcaattgctcaaatgtcaaatttaattcaacaaatgaatccataatggtcaaaatagggtgggagactttgtcctcaagttcaagaaccctataagtatcaaaacgagatcccgagctcaggaatagggtacccaacgcttaggttgaaaaatgacctggtgcgctgggctctgctaatctaattctaattttattttcgactttccgtctagcttgtttacaataaataagatccaggaa

SEQ ID NO: 56283 - DNA, 643 bp, Cannabis sativa
cctatgaaatatcaaaggaaccttgttaaaggtccatgggctgccatctataacactttgaatatcaatttcatggtaaaattgaaaaaggtatagattagtttccaattctttgatgtacactcccttccccgactgccacaatgaagccattagatgtctcatcgcgtcaaaatctatagatctgccagtcaaaaacttaccaactaggcaccatctatcatcgaaaacaacttcatcaccttcggtatcccctccaatcagcactccttcttcctcatcttcgatattgatttgatcatattgatcggctagaacgtgaatattctgactactagacgccataacactatcacaaacagatcaggaataaaacaaatccaccaaaagaacaaaaatacgatcaccagacttacagaaacatgtcaccagaggacaagaccttatattatacatttagttaataattattctatattaaaataaaaacaaacgtcatttcaatggaaaagtggcaccatttgttgtcaccttgaactttgaattttaagtttagttgaaaatttcttttaagcaaacaaataagtatcattgggatatatatgtgagagtctgcccctgttagtgctctgtggcagttgaa

SEQ ID NO: 56284 - DNA, 802 bp, Cannabis sativa
atctgatccttaccatgatattcattcttgttggtcattttctcagcttctgatgtgaggtgattagtagccccactgtctgcgtaccaagtgtcatcattcaaggtctggggagtggcaacaagagctgtcatctgtgagtttttatcctggttttgttgtccatctccttgcggtggttgtcccatgtagttgtcattgtatctgtagtaacaaacagctgcagaatgaccaaatttaccacacagttgacaagtcagtctcgagttatctctgttgtatcgtccccttccacgattgttgttgctgaaattgttgtttcctcttccagagtttccttggtactgattcccacgaccctgattgttgttgtatcctcctcctctgcctgaatagttgcctctgttgttggaattgttgggtctttgagccaagcttgcagaggggttaccaagagccttactggtaggagagacagcaccaaggcgttcgagtttactgtcaaagcttagaagagaaccctgcagttcttgccatgacagatctgttcgatgttcaagaaggagtacgatagagagagatactccatgtcaagtccagacagaacattagctatgaggtgtttctctggatacgggtctccagcaagtgcgagggagtcagcccaaactctcttcattttcaaataatcagtcatcgattgtgccccttttcttgtagtctggagcttagtgcgtaaatcatccatattagcctttgagtgagctccatagagctcctccaaagctgtccaaagggctga

SEQ ID NO: 56285 - DNA, 1536 bp, Cannabis sativa
cctaggttgacaatctgtcaacctatgccacttccaagcatcagatcgaaaaatctgactcgtgcatcttctttgtctccatcaaaaacaaggaaaacaagtgctttcaggaaagaaaacaccccaacatgggtaccaaaacaagggaccaatgcccaggtttacacttggtgctagcattgcgcccaggttgacattttgtcaaactgggccaatttcgatgagtttttcaaaaaaagtcttccatttatattctccgttttaattaaagattaagattcaactatttctaaggaccaaatggaacttccaggtggcctgaaacaagacctagcatccagattgacactaggcactaggcatagcgcccaagttgacaatagtgtttccaatcaattttctaaaaaaagtgtcctgacattttttccatcatcaaaaataataaagatgtaagtaaactcgaggagaaaacaacaatcccaagggcatcaaaactgagctcaacgcccaggttgacctggtgctgggccccacgcccaggttgataatcaagctggtgcgctagttttgatcactcaaatgccaattctactctaagaattctctccagaatggtcaaaaatggggtaggagacctcgcccgcaaattctagaaccttggaaatattaaacgacatcatggaagctctgaaataagcacccaacgcccatgttgataaatggcctaatgcattggattctgcttatttgattttgattctgtctcaaccatttgtttagtttttcagcataactgagagccattaagtcagaaaagtcaaatttacaacttcataattttaattttccgataaaggtgattacttggaaactagtagtttcatgtctcccaattccacgaaacagcaacatctccaagaactggtaactagcttcatcaaaacacataaatggactaagtgatgtcgaaatatcacttaggcatcaaaaaacacatcccatcgcattttcccactcacccaacatccaggttaacatcacatgacaaccttggcactggatgtcaacctgggcgttgggcccagaataaccttcagtagaatggttataactcgctcaatattgatctttgacgcaatttaacttgcatttcaaagctattttaatattagtcatgtctcacatttcaatcgcaattctgaagttatcgactccaaattttaccccaagagagttatgaatttaagctacagcttacccgaagcgggtcccacagacgtgactcaagctctaaaaattgacgaccgacttctagagttaatttcaccgttagatcacaatctatgggcaaaaataacctaaatatatttttccatattttttgtattattttattgccaattaataggttttctttcccttataaaaggagagctccactagctcattttctaagttcagaaaaatagtcataaggttagagcatctctctctagaaattagggtgtccaaaattaaccatttttctattgtcca

SEQ ID NO: 56286 - DNA, 1108 bp, Cannabis sativa
tcatagtgatgtagttttataatatatataattattacatgactctaattaaaaaaagtagtgagaaaaatattttttatatgattttattgcagttatattttttttttatcatcaagtgttaattcgcgatatattattagaccacgaattaaataaactaaagaaatatgtcgttgaatgctaagctgacacttaatgaacttaattagtacttaacaatcaaaaaaggatacgaatacaaaaaattataagataaaatacttttactgtcactttttattagaattatatgaataacaattaggaatattaagagagttttgctacaaatatcgcttttataaaattataataataagaaagaaaaaaaagcatgataaaaaaaacaaaagaatttgaaaataaatttaaattatatttggttgttattatgtgttaggttagttgaataaacaaaaaaaataaatttggatttaatttcattctctatagttgaaagtattttttttattattattgtttataaaataattattcctaaggaggaaaaaataaaaattaattaattttatattaaattttagtttaatcctatttttactattgttttctttttttttttcttcttttagtttctttattctcaaccagagaaccatgaataggaatgatcatattataataaaaatagaagcataactaaaatggaccactaaatactcatatggtatcatatgccttatcaaaatattgattcgcgttttttttttttttttgagagaaaacatgtattcaattaaataaaatcagctggtataggaatactaataaatttaggacaagtattcgtccataattgaactcctaccgaagtagtaacagacttcgctagtgcatggaccacacaattcgcatcacacgagatagcataacaagaaccaccaccaccaacagctaaaagagatataatttcatcaacaattagtttaaacataataatagaattaggattattaatccaagagctcacaatagattggcgttatgtttttaataatactcatttggcacagattaatttgaaattatacatatttaatatttt

SEQ ID NO: 56287 - DNA, 859 bp, Cannabis sativa
agcaagcggtgaaagatgttctacacacaaaagaaacatataagaaaaagagtatcacttccatatactccttctcggccggattcctccttttggagacttaaggttccaagaaaataaagaaaaattactatgacttccatatagacattgggtacgtaggaggttctttcatttccttttattttgatttttaagtaaatggagttgttctgcccgttttctatgcatgcattgtcagtaaatttagtacgtacgagaatcaaacgtacatgtatggtagactagtgagcagttactttatatatgtagtttaattctctggtaaataataaataataataaaagaaatgcatgtataggataatataattatagtaggaagaaagagaaagaaaaagagagacagcatcccgagaatgatagattgggattgggaagagtggtgtggagtcaaaaatgatgatgaaaatgggaaaggggaacatgccaggttccctagtggggtggacaaattaatcaattatctaacactttcttctcttctctttctaatcctaacccaagatttccttagccccacctctattctatacagtagtaacagtacctactaattaattaattaattattcatatcattatatatgcacattcattacttaatttatattgggattaatggtagttgttatcttcttgtacaacagttgtactgttatttttctgttttttgaatgccgactttagaatgatgagttttgttctatttcgtttcatctcacttttctacagtcaaggtagattaaatggtggattactcgtcgtaaaaaatttcaggaaaaaaaatttgtttaag

SEQ ID NO: 56288 - DNA, 1469 bp, Cannabis sativa
  modified_base (632)..(632): a, c, t, g, unknown or other
ctttcaaggagctgggaaaaatgatcttggtctgtattattcgagttttgaagtgcttcaactttttcatgagatagcttaatcttcttaggtaaatctccaaatttacttcgatgccaagattgtaaatggatggcataagtagagatgttgtctagagtttgagcagtaggatcacttgctaccgtactattcagtacttgtcaatgagttgtaaacaatcttcttccttcatccacaatttctcgaacctaaaacgtgatttaaatggactgacttgctgttggtgggattgagaaatttttgccatcaagactctatgatcagaggcatagaaatccaaatgttttagaactgggattgtcataacttcagtccatttgccattaatgaaaccataatcaaggcgttctttaacatttgcacctctcgaattattattatgccacgtgaatctctccccttcgaactccgattctgtaaggtgacaatgatcaatggtttctcgaaaagcatcaatttgagattcattacgaattgcaccaccaagtttgtcatcatgggagataatttcattgaaatctcccattacaagccaatgcataagtggagctgaatcttttaattttttnaaaagttcccaagtgaaagctctttgtgatacatttggagcgccatagaatccagagaaatgccaattgaaaccatcagcaacagagatatagcagtcaatgaagtttattccataattaataatggatacatcaacatcagctttccaaagaaacaacagaccaccccctaaacccacctgaggcacttcaatgccatttcgaaagtgaaaagcatttttaaatctagaaatagaacctatacttaatttagtttccataataaacattacatctggttttttttgtgaaatgagcaaatgaagttgacggaacgctctcaggttgcttaagccccgagcattccaactgagcagaatcatggtgattggcgaggctgagtaacagccttcgtcaaagagtctccttcattttcctctaccagtgagttgtttgaagaaacagagttagagtcaaggtttggagacgatacagtgatgttggtaacatcagtaaagggggcatttcttgtgcgacaacgcttgagcacttggcggacattgccacttgaagaaacaaactatgccattctattttctgcagtaggtgcaacttcagtttggtggattattcttgctgaggaaggatctggagccccgagcattccaactgagcagaatcatggtgattggcgaggctgagtaacagccttcgccaaagagtctccttcatttttctctaccagtgagttgtttgaagaaacagagttagagtcaaggttaggagatgatacagtgatgttggtaacattagtaaagggggcatttcttgtgtgacaacgcttgagcacttggcgga

SEQ ID NO: 56289 - DNA, 1205 bp, Cannabis sativa
  modified_base (44)..(57): a, c, t, g, unknown or other
  modified_base (494)..(498): a, c, t, g, unknown or other
agtgttttaggaactgatttctcctttattttttaattgtaatnnnnnnnnnnnnnngtgtgttacttgtttgtattcattctgttatataaccgattctaagttatgaccgattttgagttattttgtgttattgaattttatgcattataacattgttatagaaccggttctattttaattataattggtttgagttatttatgttatttatttttatttattatgttatagtttcggttatatttcaattatttttatttattttgtcttaaattcttaactagttgataaatataactggtttctttatattatgtttgagttattgtgtgttattatttgtgtatatttattttgttatgaaattggttcttttcatatttatgcctcaatattttttgaaattgatctccatttcttttttaaaaaaatttaatccattttatgaggtattatgtcttatgaggttttttattgtagaactagttttnnnnntaatttatgtttcagtgttttaagaattgatttcccctttattttttaattgtaatcggtttgaattattgtgggttacttgtttgtattcattatgttatataaccggttctattttaattataacaggttttgagttatttcgtgtaattggtttttatttattataacgctgttatagaaccgggttcattttaattacaactgatttcagttattttatgttttttatttttatttattatgttaaagaaccgattatatttcaattataactcgtttgagttattagtttttatttatagaattggttatatttttagttttatctgagacatttacttctggtaacttttttagtaatttttccaacaattttttcggcaacggtgatttttccagcgacactaacttttccagtgccggtgacttttccggcaaaacttagtgtagttttacaaatatgagatttctactttttttttacaaaaatatggtataaaaaaaaaccatataaatgtaaaaaacaaaaaacctcataacccaataattttatttatttatgtcatacatacaaaagtaaactataaccctgaaaattcctcatataatatatatatatatatatatatgggtatattcttaatgggtattacccatgtatgggtattttatttttgaccattggatcaaatatctaatggttg

SEQ ID NO: 56290 - DNA, 1379 bp, Cannabis sativa
atcacacaatgcatttatcccctccattctcttgatagtacaaggtatggtgaaactcccaagatctctgagtttgggagggagtttcttctgcaatatcgcactacacctcccagtcaatgccactatttcatagtcctccatttttctctttttggacaggatttctttcatgaatttcacatagcttggcatttgttccaaggcttctgcaaaggggatgttgatgtgcagctttttaaatacctctagaaatttcaaaaacagcttgtctaggttggtcttttggagcctctacggataagggatctttacatggtggtctatgctgactggtggagaagcttcctttggtgcaagaccctcagtagttttcttttttgctggtgtcggtgccggttgatcttgaacctcttcttccactggttgtctctcatcaggcccttcatacttcttcccacttctcaaggtgattgccttacagttttcttttgggttcacctgtgttgtgctaggcaagtttccttcagggtgggtagctatttgtgtcgccaattgccccatctgattcttcaaggctttaatggatgatatagtttctgtcataaactgtagcaacagatctgtttgtagactgggtcctccactagaaccttgtttctatggttgttgttgattctgttggggttgatttctctgctaatagaacccctgttgttgctgattagaagactgcccttgtacattctatcgtcgaccccctccttgattatacccattattgttttgagaataattcccgatgcttttgcttgatccattggcaaactattcacatctacaggacattggtcataggtgtgaggacccccacaaagctcacaagtaacttgagcctgttttgcttgaacaaccatcagctttgttagggcctctacttgggctgtcaattttgtgatggtgtctacctcgtccataccaactaccttcttcgtttcgcttctttcagttggccattattgattattcatggccatttctttgagcaaatcatagccctcgtttgtactttttctcataaatgccccaccagctgcgacatctatcatcgttctagtgttaccaatcagcccgttgtagaaattatgaaccagcattcactttttcaatcccatgatgtggacatttcctaattagatccttaaacctctcccaagcctcatagagagattcattgtccaacctcgcagcttggtaacttttgctggaggaaaaaaattggacaagaactttgttgccaaatcagtccatgttgcaatggatttcggtggcaaggagatcaaccaacttttggctcactccctcagcgagaatgggaa

SEQ ID NO: 56291 - DNA, 1118 bp, Cannabis sativa
tttgtaatgatgaactatcaattaatgcatatgtataatttttgttcattaagaagaacacatacatttattttttagaaattttgagggggccaaggccaccccaactacacacctacatccgcccctgacccccttgatgatgccttgatcattaccttagatgtggcccacgttcgtatgaagcgaatgcttgtagacaccggaagctcagccaatatcctagttgctgaggttttgaaggaaatggacattgaacatttataggcccaagagacacaagttactctggtaggattcttaggggaaagtgccgtcgctcgaagtttcgttcaactgcttgtctacgctaatggaataaacaagtcggtcaaattcctaattgtggattgtccatcagcctataatgtcatcctcggccgaccatggatccatgcaatgaaggcagtcgcttcatcttaccatcaggtgaccaagtttccatgcaaaggcgaagtaagagaaatatgaggagatcaattgggggctagcgagtgctatacctcatccttgaggagcaaaaacaagttataacaattaattaactccttgaccccagcccaaaagcaacaccctgcagtcgaagagtgacaagaggtacccatccattcgacagatccaaccaagactacttacatcggcatgggacttacgaggaatcgaaaggaccagattgtaaacttattaaaagaatatttttaggtttttacatgggaacactcagatatgcccagaatagacccagctataattacccataaattaaatgtgaatgcaaattacatcccggtcaagcaaaaaaggaggaagatgggagcagatcgaaacaaagccgtgaatgttgaagttgaaaaaatgctggaaaatgataccattgaggaagtataataccctacatggcttgccaacccggtggtagtaccaaaaaggaatgggaagtggagagtatgcatagacttcactaacttaaataaagcttgcccaaaggacagtttccctctactccacatcgatatgataatcgacgctaccgctgggtgtaacgtgcgtgccaagatggcacgttacaagctaagtga

SEQ ID NO: 56292 - DNA, 794 bp, Cannabis sativa
aaagctgaggagccgtgagagcgatcatgtgaagattgtacatgtcgggatggttaagcctggagcgtacgatctttgggacatcgaggcttttactgtatattggctgggcgacaaacttttaaaaagtattttgtaaacaggatcctgacattttatatatgtaatacattaagtttctaattaaataagcaaattttaataattcacaatttttaataacctcgttggttagtaacaagctgcacagtacgtttaaaatcacgctaacacgcctatgctagttaaggtgttacactattaattatcatcaataaattatggtaatatgtagttatagagataatttagtagtttcacatttctcctcacaaagaaaaggtcccaaattccatctccttgagtaaaaaaattatgttaatatatataacccacaatataccaatgcttaggagtgttctttggatcacatccaatgaattgtgatcataccgatccaatccaattatttattggatattggattttatcttctgatacaatccaatcgaattgagtcatccgatctcatctaatccaatgaatatattagattggatcggtttcaaccattgagtgcattaactggttttttgttagattgatccaatccattttagctactatataagttgatttcattaaaaaaaaatacatacatatatttttttttatttaaaacctaataatctaacatacataataaacattagttgatattgtccaatctaattctcattatcacataataaaac

SEQ ID NO: 56293 - DNA, 1499 bp, Cannabis sativa
gatgtctaccatgtacctgggatgaagaaaaacttactatcagtggcgcaacttaaggtgataggccaccatgtcatattcaaccctcaagatgtcaagatctaccaagttcttgaaatctctagaacaccgatgatgaaaggacaatttagagtctgtctatgtaatgtcaacagagtccgcttatgtagaaaatactcgaaagaatgaaacaacaaatttgtggcatgcaaggctaggacatgtcagttatcataaacttaaggtgatgatgaagaaatctatgctgaagggtcttcctcaactcgaggtcagaacaaagattgtatgtgttggctgccaatacggtaaggcacatcaattaacgtatgaagagtcaaagttcaaagacaaagcaccattggagttggtccattctgacgtgtttgggcaagtcaaacaaccattaatcaacgacatgtagtacatggttacattcatcgacgacttctccaaggtacgtatgggttttttttttatgaaagaaaaatctgaaactttttcaaaatttaaagagtttaaagaaatagtagaaggagaagtcggcaagaaaatccaatgcctccgaacagacaacggtggcaaatatacctcagatgaattttctgagtatcttcgagaatgccacatacgccatcaattcacatgtgcaaatacgccacaacagaatggagtagccgagaggaagaatttccatcttgcagaaacatgtcgaagcatgctacatgcgaagaatgttctagggagattttgggctgaaggtatgaagacaactgctcatgtaattaataggcttccccaagctaagttagggttcgtttcaccctttgaaaaattgtggggttgtaaacctgtagtaagtcactttggagtatttggttgtgtgtgctacgtattcgtgccaagccacctacgtagcaaatttgacaagaaagctatacgatgtatctttgtcggatacgacaaccaacggaaagggtggagatgttgcgaccctacaactggaaagtgttatacatcaaggtggtcttcgatgaggcatcatcatggtggtcatcgcaaaaggaagcattaccagattctaaagaaatggaagacgaactgtagaagaaaatgagggagcaaattgttgagttacctccaactcaagatacagatgaagaagaaaacagcgaggataaggcacctcagaatccatggtaaacatgggttcatcaaagagaaggacatgctgatacctaaccagaacttcagagatcaacaagaatgcaaaagccaaatccaaaatatgttaatgctgttgtagctgaagaagaaaagtttagagaatgtcatatgaagaggcataccataactccaagtggctaggagctatgaaagaagaaataagtgcactagcaaagaatcagacttggaagttggtgccaaagtcgaaggaagtgaaacccatttcgtgcaaa

SEQ ID NO: 56294 - DNA, 1531 bp, Cannabis sativa
tattgtctaaagaccaacaaatccttgcaacaacttcgttccaccaaaaccaacaattttcctcaacattattactcaattgaacaataactctcattgaaaagatccttaataatatcatcatccaaaatatatcccaaatattattaattttttcttcttcatttgagatttaaggaagtattaaagaaaaaaaaaacaaaaacaaaaaaatagagactaaagtataaatgtatacttgataggtatctctcatattttggcttaaaatactttctatccaaaaattttaatataggataaatagacccaaaattttatattgtatatacaacataaataaacacaatactgattgaattgttgttctattaattgaatatcacaatatataatgccaaaatagtcgtatatgtgacttaaaaatgtattatttcataaaatgaaagacacgaaagtcccacattagttttttcttaaaaaaaaaacacaaatataatactatataaaaattagaaggaaacacacaaaacatattaaattaaaataaaataaatgttaccaaatttaccttagcaacgaacatttgaacagttgcttcaatcagtaaactctttcttttggccttatcaacaataatatttgcaacaaaagttgacgctacattcacactactgatgcatcactcccaaaactgagtgtttgaaacagtacaggggcataaaacataatcacattaattccggtaaattgttgaaaaatctgtagtgtcacgattaccaaaagttggggtctgttggaacgatgcataagttttttgtaagagtgcttctcttgagaagctaattcagtggcatgtgtgatcatttcatattctttgtgaacatcttccaaccctcgaatttttcttaaaatttttaaaccttcttcaatgtgacctcgctcgataagtctagttggagtctctacaatcagtaaagatcccaccaataatattagaacggggactctagctactcctaatgagattctccatccgtatggatggattcgtgatgtaccataatttacgaaattggccgacaatattccaactgtaattaataattaaaaacaaaggttgagagttcctcgatattttgtcatgctatatggcaatgtcctcggctcaagtatgtttggaaagaaacggggctctgacatctttttcctaaaagtcttggactgatgacggatttgatggagtttctaatgtttatgaaaaacaaatgctctaatcaggagtttgaaagatttgtgggtatgagttggatggtgtggagccaacgaaataatcgaatcttccaaaataagaatccccctttgaagagctggacaccttgggctatcgactttgttaaccatgctcttacaaaggacacagacatcaaggataagaagatagataaaagtgtgaacagatggaaggcacctccgaaagatacttttttgatcaactgtgatgcagctctgagtccagaccagatgggga

SEQ ID NO: 56295 - DNA, 1230 bp, Cannabis sativa
gttgttaggttttccttatgcaatgcaagtttagttttttgagcgttatccatatgttattgggaaaattactttgtattcaaacattagcatccctaggcttcttagctggcctaaactggagaaacttaaagtttctcagctaaaaatggacaatgtgaacaacatcatcttcaatcggcctttaaagcaagtatatgtgtgttatttttctttcgttttttagttgtttcaatgttttcttttttttttctttttttttttttatgaattgtgtgtttattcaatttattcattttttttttggcttttttatgtttcaattacaacttgaaaacatttttcaagttctgtcaagagaaccagtttgaatttggttgattatttttttggcgacactactccttcctttattaaggataaatgtaaaggtaatcgagaattcggttctaaatctatgcccaatgctactctggaaggtgatcaagttggtccatcaatgtaaagaccgcttaatttcaatatggaaattagcagatgattagggtttaattcagaaactagatttttaattatgatttatgaattgatagtgatttatttaaattctaggtgtgttatttacgttatataagaaattttatatttttcatatcttatgcccaacaatattggaacgtgtcatttggtcgatagaatcacaattttcttatggtttagtattttagttatagcggggcaagttagttagacatttagaatgtcgggattagacgagatttaggttttggactattttacccctaagtcattttaccctatagttatgagtgagggggcattttagtcattttgatcttgggattaagtgacctcttcttgagctgccagctggccaatattgagttaattaaattaattttgtattggttttacttagataatttagtgtagaagatgacaaaataagaaaataaccttcttcctttcttttttctattttcagccctagaagattcatcaagaaaccaaagctttctccttcaatctttataactttcagctggaattcaagtgagtttggaagctgctgaggtaaaacttagaactcttcttcctttgtttttcatagttaaagttaggttcaagcatgaaaattttgagttagttgctatttagggttgatttgttttgctgatattttatgaggttaagttgagttgatttagg

SEQ ID NO: 56296 - DNA, 1237 bp, Cannabis sativa
taaggactttctcacagttgttgatatgtgtcgctttctctggtgcctcgctattcgcatttagcaatatatggcttcttcctaatatactaagtgccagtttgtacattgattcctcgcctaagacctttgagtcaacgagttacaaatatactctaactcttatgtaattaatgagttacccaataagaataattgcattgattcacattcccttcatcctaacacgtgtccttcattgagatggcagccgaattttgggtataacaattgtcccttaaaaagttcttttttagtaaaaaaagcgttttaataattatagagggcatttttgccaaaatcctttcttggaaaaaacacatcttttaattctggcagttgtacagtttcaaggatcattatgaatcatctcttcatattttgtctatcgtccaaccgttagatgtcccaatctttagctttcttgtcaatagattttgtatataaaaggacagctcaaacttattatttttcacaaacctgtggctttttagtgagatcccttttcagaatagatcatttctttccagctagaatgtcccttttgagttcagaagttcatccttccaaaattataatattcagatgcaccaaccgatttccatttgttcccaaagacttaaagcctcaattagagtcagaaataatggattccaaggttgaggagctttcgaccaatccaaaccaggagaatcctatagcctaccatggtcgatcctcagaagtgatccctgagggtatatatcttgtgagcgatcttaaaggtcctcctcaggctgataaagaattccagaagaaggttgacatggttgcagatgaacctggaaagaaagttggcgtggtttctatcaaagaatccaaccaacccaggacccaaacctgcgccagaagatttttgcaccatcctctttctagtattgaggaatttcctaaggttgggaaagagatctcgactttaggaaatgggatcctctgatgatgaggagaatgaggtctatgcagagatcaaggctctctacatgtagctggtctttctcaagctatgtgtagttggtctttctccgagctacgtgtagacggtctttctcaggctatatgaagacggtctttctccagttcatcagctttccctctcatccttcgtttaggcagatgacttaatggtttgcccctagtggtatttttgtaaagacaaatt

SEQ ID NO: 56297 - DNA, 2922 bp, Cannabis sativa
gagagcttggcctttggtggccagatttagttgacaagtggccttatattggccaagtctcggtcaggtgctacaggtctcggaaaaacttgccgcaatggttgattgatgtattcctttataggttgttccttgaagtagggccttagctttttggaatccaagagcaagctataggtcagcttctccatcagtggtcaccgacattcagcgtcaattagtctcttgttgatgtagtatacagggtgttgtacgccgtcttcttctcatgtaaggacatcactcacagcatgttctgtgactactaggtacaccccgagctcttcattgtctaggagttttcacaatataggttgttgagccaattgtgtcttcaactcctggaatgtggtttcacattcctctgtcctttcaaatttattgttggctcctagaatgttgaaaaagggtacacaattgtctgtagacttggaaaaaaacctgcttagtgaaacatgcatcttgttaggctttgtacttccttgatggttgtgggcaacttcatgtcaaaaagtgcttgaatcttgtctgagtttgcttttattcccctgtcattaactatgaagccaaggaatttatctgagcctactccgaaagaacttttgagggagttaagcttcatgttgtagctgcagaggattttttagcattcacctaggtcctccacatgccccctaccattttggacttgacaatcatgtcatcaacatacacctccatgatgttgccaataagatcttcgaacattttgttctcaagcctctgatatgtggcccctgcatgattaagtcggtcagcttgtatgctcttgatctggcagatgcatctcctttttccttgctttggacaaggccaagttgtaaaagtaacatgcatattgtttttatcctctcaaacatcctaccacatcccttgttgggaatttcaggcagaggtggtagatggatgtttttgccttcaggtcgtatagggctgatcagcctatcgtggcattgaaagccaacggaacgtcaattcatccaccatcaaagttctggtagttagattttctccaatagtgaggggtaatctgatatacctaattggtgtgatgccttggtcaaagaggccagacatcacttgactacaaggtgccaaatcagcgagttgaagccccatcttcccatatgttgacttgaaaaaatgttggaggaggctccattttcaaccatcttgccacagtcatattcccgattgatgctataatgactagcgggtcattatgagggaattgacttgggtagtatctccttttgagaaagagatcgttggctctctaagatttggctgcttagagcctcattcctcgaccgccaagatgtcacttttgggcttgtagcagagtgtccaagcataacgctccctagctttgttggtctcacctacaatttgggatctgcagatgatgtcacttaagtgtcctgcacttgaggttttggtagaattggtggtaacttctgtgctcttagcaagtcatggggatattggatgccttgtgactgcctgttgctgactttccctgtctaggccgttctgggcatgcatttctttgggagttttgtaggagagtgaagcatgtgtgcttctcctccttctcccttattcatggtgtaagggaatcgttgattttccctcttttaccattatattggtcagagccatcgttcttgcgcttgccaccaccattctcattgttggggaattgacagagatcgtctacattggccgacatgtcggataatgcttggtgcactataaggacctgtgtttcttcgtcattgatcttccctctcatttgggctttctagacagcttcttccaactttatgaagccatcaactcactcaaggaactccttcatgtttttcgttaagatccttttgatatctttgcaaaagtcactcaacggttggatgcctcttagtatgcgtgtatatcacccttcttctatgaggcctttgaccttcgtggcctcggccatgaacagttgaatgtattccttcaaaggttcattttatatttgctttattttgacaagatcatgcaatcgtgaagtgatttgtcttgaagcagagaactaaatatagaactcttgggagaattcttcctaaaaattaaatcgtccttgggccagcttgaaatattaatgttgggctattttagctagattttctggaaagatttagcaacgcacatctcccaatacttgttgatgatctaattggatttcaaagtatttgaggtgtactaggggttcttctttccccgtgtaaatcttccacgccggcatcttcaacttgggcaagggcaaggcatttacgtatgctgtgaatggtgatccccttgacctatctagctaaaggtatgaaggttttaatatagctaggcctttaatcaggtcccttattcgggccaactattcttgcacagaaggatctgctactactagggcctggtagattggcccttcttgattgagttacagccttggattggacagagactagccggacataccctgggcaaggatatattaaaggtcagctagctctaagttttccagctgtccatggctagccagccctgtgctgggcagggcccaaccgcccactccttcatgactagctggtggagcttgtacgttgacatgggctagacaacaccaattgttggagtttggtggatctaactgtctaaagtgattgtattcactcctcaagttgttttcttgggtggttccacccgttcttgggcctagctagttaaagatcggcctttaagtggctcgctccccttggggaaggagtgtaccctggccaaccagaagcactcatgcaggtggat

SEQ ID NO: 56298 - DNA, 1028 bp, Cannabis sativa
cttatatattgtattatcttttcatacattagcaatgtgagactctttaatatccccctcaagatggtagctattttatttgctcaccatcttggacaacttgatcgcgctcttttttcgctcactatctctgatcacaaagtggctcttttgctctactttttggatcgatatttttggatttttggcggctcttttttttttggctcactatccccgaatcacaagtgataactttttgacttttggctcttggataagtttctttgaatttttggtggctcctttttttggctcacttacttcaatcgattttttttcttggatcggatagtctctagagattttttttgtatgttttgttctggtaccatgttagaattttaggaaaaaataaatgaggttccatctcaaaactaattgacaattggaggagtagtctattcctcttatatattttattatcttttcatacattagcaatgtgagactccctaaaatcgcaatataaaatttttattttatttagagtaaatttatatgcacttagtaaaaataattataatatttttttaattaaatacattttttttatagaaatttaaagttgaagtggctgttaatatgaaaataaaaatataaaatataatataaataaatgtaaaataatttttaaagcaaaaaaaaaaataatgacttttttagataaaaaaaattaatgatttaaacattgattaattaattaattaattaaattttttttagataagattaactaatttattttaatatacatattttttgtaatatataattcctttattcaacttcttcaaaccctaccttgcgaaaaaaaaaaaatttcaaaccctagaaactagaccagaaagaagaacacaaagcttcaggggaccctactaccttaccttatcgccttacaaggttagatttgatttgttttggtttgttttactaatatttcaattttattagctatatggatcgtatgttcatctttggtttgcata

SEQ ID NO: 56299 - DNA, 1748 bp, Cannabis sativa
  modified_base (1196)..(1204): a, c, t, g, unknown or other
ccattgtagggaccagagttcgacaaggagaaacgagtgttctcatacttaccagagagttccagagagaaaaagacgtttatttgctaattgttggcttgttatatatttattgtttgaacttagacgttctccactaacaattattcgatacaacattattttctaaacaaaattttgtgtcttatatccttgagtttcgagcttctccaaaagtctctagttattaatttttattatttttcttttattctacagtttaaagcgtatgtatttttttttaaaaaaaaatttaaaacatatataaattaccatcaattatttccatttcttttttttttttggtgaaagggaggggtttaaaaaccccattcattgaaacaaaacggccaagccgaacagtactactgacacaaaactaaccaaaaaaaataaacttttagctaacaaacaacagcaactaccaacactacccactaccaaactaaaagagacccaacaacacccgaaggcacaaaacttataccaacattaatcaggatgccattcttgaacatcagagaacacattctcatccatgattcccaaatcaagaacaccagtagccccaactgcagcagcccacttcgcagagttgtgagccataaagttgtagatcctgtcaattttcctgatcttgaaatcatctagttgcctgaccgtgtttctgaaccggtttattgcacccttaatgtcaataaattggttcgtgttgcaagtgatagagcaatttgcaaccacaacttcgttgtcacagtggaaagccacttccccttcagatgcacccttgcatactcagctgcaatggccaaaatggttgcttccgctaacagagggttcgtagcacaaagtctctctgcgaagatagtcacaactctgtcctgatcatctctgaatacagccgctccaaaagattggtttgggtgaattgacacatcagtgcagcaattccaccatcctgcttcggacatgcgcatatgacctctcttctcgttcttcggtttccatctggataagtgttcattgtatgaccgatgcactcaattgacgatctccgttatagggcggagtctcgtaccatgtattactccatttcgagcctcccagattgctttaaaaagagatattttttgattttttttttaattaagtagttnnnnnnnnnatagaaattcaaatttgtgatttaattattcgttattgtatcaaaatttggtggtttgatatttttaaaattaatatttatagctaaatttgtttagtaaccattcatgggtaatacccattaagaagtgttccatgtatatatatttacacatatatacaaatacacatatataaactattatacacatttatatacacatatacacacaaatttctaaaaatatacataaaactataaaaatttacacacatatataaacttaaaaaactaattaaacacaactttatacacaaataaattaaaattattatatatacacaaatcaaaaataaattaaataaaactaaaatagagaaaaaaaaaaagcgtaccggcggtgaggtgcgacggcaggagggtggtggctcgggcagcggttgtcggaggtgcggcggctcgttctcgccggagtcccagtataaatgatttttttggaaaaaaatgaaaaaaaaaaaacaaaaaacaaaaagagagaaagaaagatttggtagtgaaaatgggg

SEQ ID NO: 56300 - DNA, 868 bp, Cannabis sativa
  modified_base (214)..(214): a, c, t, g, unknown or other
agattaatattttgattctcaattcaaatgctatcttttaattctgttttaatatattcaaaattttcattccataaacattctactaatatttttcaatcaatgaaacgaaaaagacaaactttaattcccgtatgaaaaatctaaccctcaatcccaataattaatgaaaacaacattaaattttaaattctcaaaatctataaaaataaanaaataaataaataaaaaacagatatcataaacacaaacagtagaaccccagtaaaatactaaaactcaaacattaaaaaaacacacaataaaattcgaacccagaacttaacacacacacatcaaaataaaaattaaaccataaataaatcaaacccaaactcaaatttgtctttttcttattctttggcttggtctctgttcaaaaccattaaattgagtactaataaaattataaaacttttaagtttagaaatttgaagatttatgctactattttttgaattatggtatttattagcacaaatttaatattttaaatatttacgtcacaaattttttaataagaaaagttaaaattttaatataattttattaagtaattatattaattataatacataattttttttatatttaatttaaaatattttatacatcctctgcgaaaggcgggatgtttactagtttctgtatatttagagaaacttacaaaaatactgacttttgtctcaatctttacaaaaatactgtcacacgacataaaatacttttatactatcttggccaatttttttatcttttatactgtaaacaccaaaaaaaaaaaaaaaatgaggcctccatcttccacatccacggacagaaccaccac

SEQ ID NO: 56301 - DNA, 2765 bp, Cannabis sativa
  modified_base (646)..(648): a, c, t, g, unknown or other
ttattataattaaatattagatcttaaaatatttaatttaataatttttataaaatatcggtatctattacaaaaaaattacctcatgatggtattggtactaatagtacctaataatgatttcaaagataatattttctatatattaaaatgatgatctcaaaaaataaattataatagtatttttttagctaaaataactggcaatgtaactaatatttcttttgtttaaaaaataataggaaagagaatatatatttttatatataaatatatatatattttcatgaaaaaaaaaaagaaactaaatgacaaaaaaagaagtcaacttgaagcaaaaaagaattcagcaaaaaaacctttaaacaaagacacagtatgttttgattttatttcagtgaactttatttttcaaaatttcggtatagataccttcataattatgtattattttgactggtaatatttgtataattattttactatttccgtatataactgaaaaatccccttaaaattattcttaaaatattatacagttattggtgtaattaagttttagacaatgcacctgaaagaacttttttttttcttgaaaaaaatgctaaaagtatcactaccgaacatatattattattattattannnttattattattattattgtaactaagtattaaattttatataatttaatttaataattattatatagaacttgtaattattttctattgttttttctatctttacataatatacaaatttttattttattttttcattacattattggtgacataaaattcacatcattatttaagaaacgtgtattaaatttaatattttgacatatatttaaaagaaaaaatattccaagcaaagacggagctacattgtagtttatggggccttgcccccaaatattttacaaatttttataatgaaaattttataaatttatcttattttttttttaaaaaaaaaaaaatagtttaatagcctttcttaaatttgttttgcatattggcccctgattttttttttttttttaaataaagtagagtaattttgttatgattttacaaatactcattattattttcttttaaaaaaatatatacattaaaagaaagcaaaaaagcattccatcgtagagtatttaatatctatactattattgttgtaattaaatatcaaatcttatttatatttaaattagttaaacataaacaatatagtgtactttatagcaatgctttaaaaaaatgttgataaaagtgcaactaaccctatatttcactcagaactattattagagtttggtattattttaatgtttaacctcaacaaccactctaattttgtactttaatttggccaaaatgtaaatatcttgggtttgcaaacaatatatggattcaagaaggaccaaactgcaaaacaagcctaactcataggcacacagagaccacaagacaatacatgaagccaaacaaaaatggaatctaactgaagatcattccctatattccctcttccaaaaaaactcaagtaataataagggttttttcctttcatttttacattttaaatcaaattttatttttatttttttgcatttttatgaaaattcacataacaacaaataaaacaatttaaatcgtaatcaaaattcaatccacatagcaacccacatagaaactaacgaaaaaataaatttaaaaaattaaaaatagtatatagaattattttcctaacaataataataattagagaaattacctcatatacaattataatttgaaccgctccgataacttctatgtgagttgctatctgaattttaattgtgattttagttactatgtgaatttacgtaaaaatacaaaaaactacttagaagtgtaaaaatgaaaagaaaaaaaaccctaataattatccaactatttttattttcatgttatgatagttgcaatataattttgattttatttaggtaccatcttttgccaaacaagtaaatataattatgttattaataataattgtttttcctcaaaagaaattaaatgaaattcaattacttgaattttgcattaaaccccaccattattatgtaattaacagagctagtaggtaataatagcatagaatagaatagcattgtttggcaagttacccaaatttgaatcatattttcctcttaatcttaatcatcaaattaattaactgcctaatacacaacttaattcagagatgaaaaaccaaactatcctatcctattctatggttagaaattaaatcaagtgtagctgcctagtattctgactttctccattaaagcccatcttcggtcaaccggttccggtagaattctgagcatgaaacatggaaaaaaacaggtagatgttcacagattaatggtgaaaatgttggatctaaacatgagaattatacagttcaaattcaataaaatatcttgaagaggactctaatgatattttgactaaatcaaaattcattagagttcttaacaatagctaatagaagaagagataaggcatattcaagtagtagttgtttcttcttctaaagaatgccttttgaggatttcaaccgtctcaacctccgcactgcaaattcagccccgaaaaagagtagggttagttttcatgaattttcagatacagtttagacatttttacagttttaacatataacttggaaatttatcacaactgtaagttagttagtttcggtta

SEQ ID NO: 56302 - DNA, 685 bp, Cannabis sativa
tgagtttcatcatctcccttatttcgccactattttggacatggagcagtatggtggagctcaaaagctctaatagaacaaaactcctcaaaagtttaggcgttaagatagtctgacttggttattgaagttcaccaaaatttgtggagtttcgagatattcgactctgatctagttgcttttgaacctgatgttgaaaaatatgcttcagatccatattctccttggaatgagcttctcgatcccaatggttcaatgcccttttcatcactatcaaatctaaacaggactgcacgaggttgtcaatattttcacatatgcacataaccaaacttgatttagaatttaaattcaaaatcaaataaactaatcaataatgtctcaacacactttgattaaatttgtggctcattgcacatttctagcataaagtgtacataaaatattacttttgtatattttcctcttgaaatgactctttaaggtcatgaaaaataccatttgatatttttagttttcttaacaaaattaaaatatcaaactcatatcaccacttacaaaataatgtgattgttattacccactatcttgaacttatctcctcaatgagattaacctaaatattacaccaaagttaacgaaattctagtcaattttgctcaccactttgattatttaagattca

SEQ ID NO: 56303 - DNA, 912 bp, Cannabis sativa
ctgcgacgttcccggcctcccaccgcctgcgcacgatgatgccgaacgaagttctcccttcaactcccactgctccactgccccaacgcccatggtctccacccttcagtgcccttgtctcctcgacgtcattttccatgaacccctcgtcggagagaagaacctcactctatttatttttctcaaagaaacccttttcttttcttcttgcttcacgatcatatggaacaatttatctattttttcagattgaagataattgtgactgttagagttggtgattggggctgtttggagtggtgggcaattgaagattctagaacattttggttttgatattttttttgattttttgtttttcttttcttcataggtttttttgggtttgtagtcactttactactatgtatttttctatcattttcattatcattattagtttttttttttctcatagcaaaaatttgtatgttgtaaataaatattattatttgagtttaattttgtaaatagattgtattgttaattattgtgtattgtgtttgttaataatctgaatgtatttatattgcttaaatcaatttgtgtattattataatttatatttatcaaaattaatatttatattcatttaaaaaattatataaatggaatattttttttaaaaaaaaaagaatattaggaaaataatttattttaaaaataaaaatagatatagtgacactttgggagagtggctattatttttagtgtttgacaacttcagactctaaaaatctatagtgacgtgcaatgagaagctctataaagttttagtgacacatgctgatgtgtcactaaatattacctttccagtcacccacattagtgacacgcagtgaagtgtcactaaaactctatagagtcactcaa

SEQ ID NO: 56304 - DNA, 1497 bp, Cannabis sativa
actggtactcagcggttcttctctgggcaatgtcagtatctcaagtctttcctccgatcaacaggtttccaagctaagaacaagagattccacaggtcagatagtccacacactcgcttaggtagaaaaataattaggagtgcttttcgtgatactcaaaatttttacaggttagaaaacttaacaaacttttcaaatcagacttgagggctttgtgtttcaatccacgctctcacttggtgtttgcgggagcagcttctggaaatatgtcttgttgggacattaggtaataacaaatgcttttctgcgattttcgtaacattcttatcatttttgaaatctatgaaccattttttcattctctgttatattgtgcaggacaatgagaattttatgggaaaatcgagttagccccaacgttttgtactccttgcaacacctaagaaatgactcatcaacattggttgtgggtgggatagacggtatactgcgtgttctgaaccagaacacaggtgaagttgtttccagaattgttttggcaggaagcatttcgagctctcgagacaagaatggaatagttgcgagaacaagaggagcaaggcttgcagaagatgttcacattgacagtgttccgaaaattattcgacctcccataacttgcttggctgttgggatgaaaaaggttgtcaccacacataataccaagttcatcaggttgtggaaatttagctaactttacatagatattattccacaatttaggaatagttgaataatgtattttattggattttctagtgtctactcaaaactagtatatttttgctccatcaagaaagaaacaagggattttgggagaagattttcccaaataatttatagaatagaaaaatatgtatgaacaattactatattgtgtaccatatccacagctccactttggatttttttttcgtattgtgttgtgattttggctcttttttcttaaatgtgtatgtttctttgtggaaatatgagtaatcaatacttgaaagagtaaatctctcaaactctctgcaatgaaacttgttcagtttcaacttcttttcacaagcttactttgatggattcacttacaacttgaagtattcaagatatttgaagttagattgtgaatgtaatgaagaaatacctaatacaatatgtaagttgtataattcgtagacactattgttggaatgtagaagcgtaacttcaactgatataggaaatttaattaagctgcaacatcttggtgttcctaagtattcattacaagagatggcattgcaattaggcaatctacaaaatctgcaaacgcgaggagtcttcagaatcagggaccagaaaatgtgagcagccttgaggaagtttcagatgcaacatcttatcttagaaggtatgtataatatattatacaaaaagaaaaaaaagcgcaaaggcatcaacacaacgctgctacactcaatctcaaacact

SEQ ID NO: 56305 - DNA, 1226 bp, Cannabis sativa
ctgctaggattacaaatcaaaaggtaaaaaggcatgaggtaattatatacaattattaaataaggtgagatgaagaaatgaaagggtttgttaaagaaaaataataaaaaaaaataaaaaataaagtgaaaattagagaaaataaagaaagggaaagaaattttatagaaactgccatgtcatcacttttgtgcattcttttatatatatatatatatatatatatatattgattagaaaattatgtcgcgcttcacacaattgtctagtatttattatttttttatattactatttttttaatattaattaagtggtataatataaaatatggcattatcatattagaattataaaaaacaaaaaaaaaataacataatagaatgatagaattttaaaaataaaattaatattttacaaaaaagatgtagaatgatgtggttctttttttttttttttttgaaggagaatgatgtggttctttttgacaataaaagaattattgaaatagcatagagattatatgtatatttaaaattaaagaggagaaaaaagagaaccaaattattcaaaacatgatactttttaggaaaatttacatctaaatactttttataataaataattactaatatatgatatatagtttaatgtaaccactttttcatataaaatactttaagtacaagtatttaaaatttaattactattttattatacttgtttatttgtatatgttgtatttactttttatttatacattaaatttattttcttgtatatatttttttcttcagtgtatgtaataacatttaaatttatactttttataggatgcttaattgcttatattaagtggtagctaaatatatattttgtttttgaatttcaatttgtaatatgtacttagtggtagataaatgtattttgtttaatttgtatactcttattacataaattataacccatttggtaacccattataaatatggtataaattaatcaatttaaagtaaaactactactttggtatccaactaaaataaaaatgatatcacatgatttttatataaaaattatattaatctatacttaatagtatctaaattaaaataataacttgtgtaaaaaaaattaaaacaataacttctaactagtatctaatcgcttaggtaatctactaattggtatctattctatataaaatgtgcctatataacagaatt

SEQ ID NO: 56306 - DNA, 549 bp, Cannabis sativa
cttaattagcatattatagctttgttaaagctcgtactacttctcttaacggggttgcggaacttgagttggctaaaattataagtatcaagaagactcttatttgaattaaaaataaaaaacgattgggcgataatgttagagacaaattatttagtggtagttgagactattcaaagtcagttgataataaacttttttttaaaaaaattaattgttaatgactgtaaacatttatttaactatttgagcgaaatctctcatttatttgtttaatattctgctaatagagttgctcataattttgcttgtgctacttattatctttaagatcgaatctttcttaattaaagatctttattttgaatttttatctattcttttaaatgatttggtgttttaactattttttttttatttaagcgtttatatattacaacatgttttacatgggactcgaacccaggacctccaacactcacacacccatctatgaccacttgagctagactcaagtggtttaactaactaattttttcttagtctata

SEQ ID NO: 56307 - DNA, 779 bp, Cannabis sativa
ttttttctttaacccatttaatggtttcagtaatatttaatatggttaatcagcccaaaacaataataaataaataaataaagaggtcataaggtataaaaatattgatatatgaaatgtatctttgtgaaaaacaaaaacctatattatttaattgttttctcttgttacttctcattgctaatttaaacttaacacaaactaatttaaatagcaatacactttcatacactaagcatatatgttattgttatcaagcttaaaattaccataacatcaagcttgaaataaatcagtgaaaaatcgcgtgctttctttttgatctattaacatcaaactaaagggtggaacgacaatccctaagcaaagcattctattacgaatagtattgaccaaatattaaatttaaataattgcatagtaataaaacatataacatcgcattacaattctaacaatataaatatcatataactaaaaaaaaaataaataaatgttacacttttgctagctaatactaaaatagagttagagcaagttttttttggtggtgtaattaaaattagaatagaatagagattacaattataatatttggttacattataatgagcattatatcacttgtataaattcatgtatgattcgtaaataaggatttttttttttttgaaaaaaatagcaaataaagattataattactaatatattataaaaaaaagacttttttactgttctttcttatctttttactaaatataattgacaataaataaaat

SEQ ID NO: 56308 - DNA, 3285 bp, Cannabis sativa
  modified_base (726)..(727): a, c, t, g, unknown or other
caaatagttttttattagcgtcattttttaaatgacgcaaaaaacaattatcttcatttaaaaaccgacgcaaaatatacactcttctttttcatcttatacgtcggtttaaaaatgacgcgaaattgtttgtgacattttaaaactgtcactaaaaatttatagcgtcggttttaaaatgacatataaattgctgaaatacttttatttttaacttattgcgtcagttataaaatgaaacataaatgtatgtaacgaaaaattacaaattttcatgcatttttccctccttacatttttaaattttaaaacgatttcatataagtaaatacatgatacaaaaaaaattaaaataacgtttataaaacttatataaaattaataattaatcctattaactaattacataataccaaaattgttaatagaaacgatcctaaaatttatattccatgtatcgtaaaaactaactataaactaattacataatgcaaaagttaattacataatccagtaatcttcttctgcacaagtatttctagagctgtgatcacataacttagtcagatcttttgaaataacaaagaaaagacatcaaacttacttaattacagtatttccatttgttaccttcgacgacgccgtttccactccttactgcttctgtaacaaacgagataaattattaatttaataaatcataataaaagtatttaaaaactttannatttgtaaaaataattagtgtcttccaaaaagtagagggaatggtaccattcaatgaattattctcaagtgacctgcaaagaaataaaattaagtcatataagggagttgatgaatgttttatttggataaaattattatatagttagtagacagatggatgatcatgaaaaattataaagaaaaaaaaaaagagatagatcttacattatctctggagtttaggaaagcttgtaaaacttttaggaattggtccatcagatttttcttagataaatcactaaaagaattaaaatacacaaatgacttctttgttataaagtcacctagaaactacaaatgtgtattgtaaggataaatattcaaaagatcagattcgtgcacagtaaagctaaaaagcttttcatgtaaatggatggatggagtatgagtgtgaaattgtgtgtgtgtgagagagagagagaataaaatagaattatgcaaaagttatggagatcgatcatgacatagtggtgatattgtctgaaagcttgttagttggtatactttgactgagttgatttgagctaagatctctatattataaaaatatactaaaattactacaaaaagtcagagctagcaactagaaatcatagaaatgttaataaataattaaataccattattgataaattatgtgaaaattaaacaaaatcattcaaacatggaaagaaaactggcagaaacttctaattctacaacaataagatttaaaatataagactcacaagtaaaagagactactagaaaaagtttagttgggttgatagttttacaagtatttagagctatatgactcgtatttcagccaaactttaccaaataaacatcaaacactatcaaattcaccattcgctttcataaaacacctttaatactcaaaatcccatctaaccaaacacattaatacatttgtaccacaactaccaacaccacattcaagtttaatttcataatcaaaagacataaataatcaactctaacctcaccccctaaaacaaaaacaaaagaaaacaactttgatggctttatcatcatagaaaaatcaatgtaaaagaactcaaaatagtaaaaccacaattgggattggtagtagccagtaggtagttaccaaagagtactaaataagtacagtcaaaaataagagcaaagtaaattgattagactataacaatgagctaataataataacaagcacaatctaaaaatatgttaaactgaagtccatgatgcatgaatttcactatcactgaaaatatccttgtaataaaaagcttaggtcaagaaaaagaaagaaagaagaaaaagcttatcataacattaaattctatgtatatatatatatatttcatttttttatcatcagtatgcaatgtcaaataattaaaaagaaaactcaaaaattattgatgaagatgggtggggagacgcatgaagttgcatcaggatcgtttactaatgatgaagatagttccccattaacagggcctctcacgctgacttgaaaaatcatccattgaaagccaacaatgaatacaaacccatctttaattaaggggtcaaaaagcttaaaacgcctaccttttatatgtcaagggaacatatatttatatatacaaactcgaaattacagaaagtacccatattatttcacatttgattctttaccaaaacatatccacaaattgtaaatcacgaaagaaatcaaacacttaaaacccgctattcaccataaatgagaaatatgcatactttcactgaataagcagcgcaaaagagagcattagagaaagatcgaaagagcaaacttacagatggtaacatcgccatcgatccagaactcccattcttcctcttcacttttctacggaacacacgccccacaatatccaccgcagaggaaccctaccaccgaaaaatgccaacagcacctgagggacccccagtgagcgtcactatggcggtaatagtggcggaaccgccgtcatccaggcgaggttttgagcaatcagtggaagcccagtcgtctggtttaagaggagagatgaataagtgagttggagtggtagtgagatggggtcgttttgattaagaagaggagaaagagaatggggctcgagtgatcgattttgaagaggaggaaaggggctcgaagagatcggggttgggttacttattttgccagaaaaattttgaagaggagggagattagggaagtgtgaacaacacgttgggtttagggattttactgaaggtgttgcgtcggtttctcactctcataagattattttgcgtcatttttaaagcctcacaaaatgccatagccgacagttaataatagacgcaaaatgtaaagcaggtttttaatttttttaggttttttcgtcggtttggtttttaccatcagttgaaaaacgacgcaaattatatattattagcgtcatttataaatagacgagtctaattatttggacactattcacgtcggtcaatgctatgaatagtagcgttgaccga

SEQ ID NO: 56309 - DNA, 3407 bp, Cannabis sativa
  modified_base (3358)..(3374): a, c, t, g, unknown or other
aaacagtttttaaaaatttatgccgaacactattaaatttttaaaatgataaaaaactgttttctattttcacttttaaaaacacaattttaaaaattgaaaactaaaaacacagccaaaccagctctaagattttccattaaaagttggacctacatgataaatttgtaagggttagggactacaagtgtaataaattattttcgtacttttggttccttctcctccatacgaattaattataaattgtttttgtagtttctttccatacaaattaattagttagtttttccgttgcataggataaacccatgcaagtgtgttggagttgtttacgtataaaggtgttgcacttatcctttattcaataatgcaaaataataataataaacattataaagcaaatggatagacacatcactacaacaactagcatagatgtagctctatttaataattaatgtgacatatgtgagaacaaatttagttcagatgacaacaatgggtaagaaaaataatgtgaatatatttatatatataaagaaaattgataaagggcactaatgtttaacacaatgagctgcaatttaatatcagccacatatatgattagtatatacatgcaggcaatattggccaaattacaaactcttataattagataaatgttgtgtgtgattgaaatctataaagaaaatatgactgtttatttattttgtttttaatcatcattaattcatctattatatattttcgacatggaaaacgcagacacgcataatatatattttcctttaatacaaaattccgcaacaaaaaggcaattttgtgaagaaaaccatattaattagccaatattattatatacgctatgtatgcgataaagaccaagcagccgcaagttatcacgtgaaaacgatctctgctcacatgcatgctttgagaaaacatgtaaatttattaaggagaatgttattttggaggtttatatgattaatgattggatgattaaattggattaatttttaataaaaaaatgtaatgtggttcctgaaattatttatgttgaagcatcaatgctattcaatattttttactaaaaaattaaaattaaaaaattattgtagctaaaaattaagatatatatattaaaaattattctaaaaacactccaatatattagcgctctttaaattaagttattaggagatcatctattttattaaatgataatatttaaatactgtatttgttaaaataataaaaattagaccatggattcaatttttatctttttttaaaataactaacttgaagtttgttttgcaaaaatatatatataaacgatcttgtcataacacatttaagtttggttattactaaggttcaatttgataaaaattaagctttgtgtctattttatactattttaaaaaatgtatggtctacattgttatttaacaaaacaaagagcctaatcaataatttttacaaaacaaggagtgtaaaatggtattaccatcacttaggataattaaagtgtaataccaataacaaattataatacctgatgatgcgatttttcgttaactattatataaataggctttttgcaataacacactacagaaaataataataataaataacaccatatatttttatgtaattttgtagttaaaatctacatactgcacaagttcatattatttctgagttttaattatgtttacaatttagcaaagttctgtaattcagaattgctccttccttttccctttgagtgaacccctatctataggaataggatggtagttactcaatcttatcttagtgaaaagttacaattgatgggtggttactgctcatgtttcacatataactgaatatttacataagtataaataacttctttatatttaaaatataaaaaagtggtctgtgaagtagaatttgacttggtcagatcatgttatttgagagcatgttcaccactactgtgtaatacgaggcaatacattgttgttttgtattacgaggtgattcatcactgatacaaagtgattcatcaatgttgtgtattacgaggtgattcatcactaatcaagtattgcgaggtgattcatcactaactttgtattacaaggtgattcatcactgctgtttattacgaggtgattcatcactgactgagtaattcgagttgattcatcactgttgtgtaatacgaggtgattcatcattggctgtattacgaggtgattcatcactgatgtgtattacgaggtgattcatcacaattgtgtataatgagatgattcatcactgttgtatattacgaggtggttcatcactgttgtgtattacgaggtgattaatcactgttgtgtattacgaggagctacaagatctttgtattacaagcaactacaagatctttgttgcgagatgttgaatatttatcaaaataacatcccgacaatgatgaaatacctcacttcatgaatcttatggtctttatttagatgagatcgatcacctcacaggttgagtcttgagttttttttcgatctgtcccacaatgtacttattgtgagaatttattatttatgctacgtgacattcaatttgaatttattatttataaaaataccaattatattggacactttaagattatttataatttaattattatttagcattgttattaaacaccttaaaatatttaaaattgtttagtataataatgtaaaataatcattgttatttgaatttactctggattgtttagtataatgtaattatagtatggaaattgaatctttgaattatatatgattgttattacgagatttttgtatttttaaatgccaaaaattattattttagaaataagattgttaggttatcttaaatcctttttaaaaatagttctaaacatactcatcattcataatacaatagataacacatattaataaattttatattaatttttaaaataatgtataaaatttgtttgtttaccaaataatgtgtaattcaataataaataagatttattcctctcgaactaggacccttgtaaagcttcgtctcgtgaatttttctctgttgaaaaaattccctttgaactataaaaatcattgcaatatctcatgtagttgcattatacttatttctttaaacagtttactgatatagcactaattaatgtgacgttaatttaaccaaatttaagagtctagattaaaaataaatgcaaaaattacagtgtctcataaactatgaaaatacatgtgcattcttagaatattagttgaattacagagatatatatgttgggttttatgcnnnnnnnnnnnnnnnnntcaatataatcagatttgtttattaatatagat

SEQ ID NO: 56310 - DNA, 1229 bp, Cannabis sativa
ggttgcggcggtgcccacggagatttttgcgacggagtttttgtcgacgcctccggcgttttgtagggttgtttcgacggcggttatggttccggtgacggcgtcggaaaagtggtgggaggaggagtgggggttttatctgaggagttatgtagggctgacgtggcaagaacccaattgtggagaatgtgaaaaacgtggtggagattgtggctttgtgagtagtagtaatgatttggaaattggatgctttaatcttccaaataagcatggtatgtattataattataattataattattattatttacacaaattatataagtacatactttagtattgaaagaggaaaaaaaatgattttttttagaaaaaatgtattatttatatatatattttaaaaatttcacattgttaattttaatattttttaatatatatttttagataatgaatgattttgtatgtttttattttagtttctatatcaaaaatgtttaaaatatatttaatattattttttatatataaatataagaatgttagaagttagatttttatttttaaaaacaagaatgagtataaattaaaaatatgtactttatacaaaataaaataataaaatgggatatctttttgaggtacaactaaaactttcctttttatattagttagaggaattagttttttttttttaaaatatagaaagaggaattagctaggaaaattaatataaattaatacatatttagataccaaatttgatttttttagtagtaacataacttaactgctccattaatatattagtatattaatatttaagaagagttttagcttggtaatggtgattaaaattattatatacatattaaggaggattgcttgtatttgtaaatctcttattcaaaattttacctaactttaattattgtttttattttattattttatgtttcattgtggaataggtttattaaattattagtactttagtagtgagtgagcactcatatatgttttagaatgcatgtggtttaataattagtttatattattttgttttattttttaattaattacaacacttaattatatgcaataattgttataattatgtggaattattgctataattatgagctactattacacactattcataaatagctataagtgtatagttaatgcccatttgtactataattttaacaaattttattcatata

SEQ ID NO: 56311 - DNA, 6386 bp, Cannabis sativa
tctaaaggtctcaaaattgaaatttttatgctgacatgaaatcagcatacagataagacttgactgattatgataaaggaagcaattcgcggggttcgcatgatcaagttggcgggaattgaaagagatgttatttgagactgaagatgctaaaagattccatcaagttaggctcatcacaatcaactacttgcattttaatcctttacatcagaatgatctctttacttaaattggaagattactaaccaaagcagctgagaaataagttcaattctgcaggtcttaacaaaataaattcagagaaatgagataagaaacatcagattaagtcctatgatctcttctgtcataatactaataatgaaaaaacaaagtggaaaaagatgtaatgcaaactaaaatatctcctttccgttaatagataatgtttctaaagaaggcgaaatccacatcaatgactccttcaaatctgataatctttcaggatcatattcaccaagaactagtttgagatgcttccaattaatcaacggagaacaacatatgttcttcaacttttccgaaaagatgagagccttcatacaaacatatcaactaattaatatacagtatgtagaaaataataatattaacttgaaataaggcggaagaaacaaataaaataggcttacaacgttccaagagcaattcaaattcgaaagaaatttcatcatattagtaaaacttgtgtcactgtcaatactacgatgctcgattacactaaatgttccattcaacaaattcgatgactctagcgataagctaaaatggatttcaccatcataacgaaaagatgtaaattctggagctgattcaattgtaatgatcttttcatcgtcggtgtactgcctaacattgagacttttcaagtgttgattcgaaattttaagatgctttgaactaataaattaatcaaattctattgagtccgagtctgaatctgagtctgatccatagtaataatttatcaaagactgaatcctatcataactgaggaaactcaaagtcagatgctcaagaagaggaaaattagagataagaacttgtattgatgactcctcatcttcaaaacaatcagataatgagagagttctaactggctcaaacaatattggacaaggaaaaaaaagtgccaatgaatggtgatgtgctatatttaaataatgtctgagtaagtaagttaagtgccaatattgcagctagttagttcacatgtcatattcttattggctcgctctataaacgaagcagtcacctcacttgtgttatgcattatgctatcctttgatatgtgatcattccatatctgatttcttcaggctttgacaaaagcttgggagaaaggttgttcattttttgtgaggacaaccattgtagttgaaagctcactataagggtatgagcaaatagttatagtgttttagcttggtatttgctccatcctaataaaaaggatgtggtaaacatttacacatattggtcaaataagatagcatggcaatggcattactattaattattcatatgctataactaagaagattaaaattattaatttttggtgaagatgaggttttatcagttggcatcattctttttacttaagtttttgcttcttttatttcgttcatgcattgtttaaggaagcaattttcatggtttgaatgaagatagtaaaatatatattttttttttaaattaaacaaattttttattgatttttaaaaatatcacattttttttaataaggacccaaaaataagttcaatcctacaagaatatttgttgtggtttaacagtttagtaattttcatattaaatagtactataattacatgaataacaaaggccaagaataggagttaacaagaaaatataagaacacatcattctcatgcaaagtagtaaaattcatcattaatacaaaactaagaataaagtaaagacaaaaggattggagtaccacttagcaaagaaaactaacagaagacaacaccatgtctactcataatattgtaatgctaactaaaaaatgacctttttattaatcgataatgtttctaaagaaggtgaaatccacatcaaggcatccttcaactctgaatctttctggggctgctgatgatgagtaataattttgagatgcctccacttaagcgcgggataacgacatatcttctttaaattttctggccaaatgagagcctttatggatacaacaacacaccaaaacatataaacattaattcattatgaaataaaataccacaaaatcaaattaaatgaagtaaaaaatacataacaatacctcatgtgtgctaacatggagggttacaatattccaagagcatttgagattcacaagaaaattaatcatatcggtaaaccattttgtgtcatagcctaactgattctccttctcattaattacaatttttccatttatcgaattagacgattccattgatatgctgaaattaataccacctttataataaaagtactctaatcttggagctgattcaaattcaacatgggacagtttacaacaaaggaaaggttcctcaaaagtgaaacttttcaattgttgacttgaaattctaagatggtaatccaaagatgaacgacactccttcaatgtcaaattctccaaatgaggaataccaaaaattagaccttccaatgatggctggtaatctttcgtgcacctaataagagatttctaattttcttgcaagcgaagagatctatttcgtccaagttaacccgacatagaaccaaagattcaagatttgtagtgtcaacttgtaatgtaaaaataatatgtacatcatcaaattccaagaacttaaggcttaaactttgcagtagttggggcgtattgtcaatacataagaactcataataacttaagcacaatttctcaagagaagggcaacccaacaaaaacttaaataccacatcatcttttgaagtatctgacacaactccttccaatgacaaagattttaaagatggaaaactaaatgaataagaagcatccacctttagctgttccaaattcaaaatagtcaaatatgttgcattgtcaaacaatattttaggtaagcagtagcaaaggtcggagtgacccacatccccatcttcatcagtgtcttcataagtgtcagggcgtatgttaagatatatttccttgaccttattctcaacaacaaaagataaccattgatctaggatgtcatccacacatcttttattgtaatcaaacatgtcaagcttaaaactaataaggaacatgtcaagcttaaaactagttaggactgaatcgacgataaagtacatacctttcttgcggtgtttcaaatattggcttacataattggagaactgatgactacatttaaaatcagcgtaagagaaagagatggtggggaccgagtaccagaggagtttccagcgcttagaaagaagacatgttcgaaccacgtctttagttggtagaagcgacagcatgtgaagaatgactgtatcaggaagcttggaaatcctgtctccatcatcagccattgattgtgatcacaaaacattcaaaacaccatgaaagtagagagtgtttcttacgaaagagagaccttagtatatatatatatatatgtacattgatggtgtgagtgagagtgagagggagattgagagtctaattaagaaaatcaatgagctcatcgatgaatggagtaagtaaatgaattagttttaggtacgttgaacaacttgaaggcagagcaagagacaagagacttaataacaattattaatacttttaatcaaaataataaaatactacttttcatttccgatgaaagaagtcaaaatgataataaatatcaagagaattgctagtactacgagttgtctagcatctttctccgtgtcatactattattgatgtgattaagtatcggtttctatataatttaagaaaatagtttttaggaaataacgctaacgtgaaactttatagaagctgttagttaccactggtgatcaatagcaatacttaaataccaactatcaactaatagtataattaaaataagggtaaataccaatttggacctgtgttttctaaaagttacagattggatcatctgttttgttaaatgacaaaatgaactctgtattttttaaaatagtaaaaataggaccctgagctattaaataaaacttaatatctttctcaaaatattcgaaacatatttaatcatattggtaagaaagacttttctagtgcaatacaactcatatttgatcaatacagaaattaacactcaatcttttaagacaatctgaatttgtactacaaactctcaaagtcaaattctcaagaagaggaatatcagaaataagagcttctaatttgagctggtgatctgcatgtgtgactagactaatgtcaaatttctaattttcttgcaacaagagatgtttattgtgtccaaattaacacactctaatactagagattcaagattaatttaatagcttcaagatgaaatgtatgagcatattcttgtataaatctaaaatcaaagaaagaacacatgatcccaacaaaaatttacttagccaatcatcctgtgaagtaccagaaagaacacaatttagtcaaatatttctcgcactctagtattttaggtatgcaatagttgtcccatagttcatctagttgaagacttatttccttaaccttactatcaaccgcaaaagctaaccatttatcaatgaggtcatccattcttcttacataatgatccctgacaaccatatccatgacaagtaatctcattagttggtgcttcaaaaagcaaaatgtggtagctcgatccagcactgagtcagaatatagagctcttgctctagctacctcataaatgatatggttggaatctattctcactgagttagttatcccagtgtcaactactcctgtgttatgatgtgacaacttaggtgctggttctctagcattgaatccagtttatcatgtccaaaccaagtatatagaaatcgatgttcactttgttcgaaacagagttcttgataacaacttggatgtcgatttctcatactagactgcagatatccttacaaaacctcttcacattcctcaattcaactatctcagagacaagttaacactcaagtccaatgagtgtaacttgagggggatgttaaagatagtgaggatcagttatttttggcttttcatttctgttacttagttatatgtaaagcctcaagccttccttttcaaaggttgagcttcctttttcactcttatttacattctcacactctcatcgtgtcttttgagtaatgtatcttatatatttatatatatatatatgatttttacatttgatgagatgagttatgaattttatataataaaaaaaaagttgcaactctatattcttggaaagatgaggtttatcatcgtctaagcaagcaatttacagaagtagtcatactaaaagcttcaattctattggaaaaccattatgcaaagcagctgagaaataagctgaatcccacaggggctgtcgtctaactacatgaacataatgcagccttagatacccaagaatatcaaacttattttgttcttaacaaaggcctaaagtttgtacttttgtaagaactgcaacaatcttaatatgtaaagaatatgttgtgattggtcactaagtgaggaaacccatgcatttggctccccaactaccacatcatcttctgcagtatttgaatggtgaatttctttcaatgacaaaattttaagagatggaaaactaaaagaacaagaagcatccaactctacatattccaactccaacaaaaatagagggaagagactagaacacaaacagattatgaaaatgagtttgatatgatgagttgagaagacaagacaagggaataagagatcataaatcaaaagctttgttatttgtcaagttataaagaaatctctatctctgatgtagtaactcatcatagaattttccatgatagagattaagaaaacaaaatctcactcttatgaaaaaaatagtaacaaagtaaacctcaaaaaggactaaactaggcaaagaaaataggtacaatgacagtcatccctactcataacttacaatattattaatgtttccaaaaaaaggtgaaatcaacattatggactctttcaaatctaacactctttcaagctcgtcgtgatgcttagaagtaactctgagatgcatccaattaagcaacgaaaaacaacatattttcttcaagttttctgg

SEQ ID NO: 56312 - DNA, 799 bp, Cannabis sativa
atggatggcagaaggtcttttacagcctcaagaaggaaaaagaattgaagatgttggagaagactacttgaatgctttaatatcaagatcattttttcaaagaaacataagaaattgttctttttccatgcacgatcatattcatgatcttgctatctatgtatcgggtcagagttgtcgcatatatgatagatgtagaaaagacttgcataagctaagtagcaagactcgccatctatcttacatggaaaacttggaatatatagaagaatttgatagcctaacaacaatgaagaatttgcgcagcctgattgcattaccattacagtcaatgccaccttcatttcttgaaacatttgtgcaagaagttgtgttaaggaatggaggactaagagctctttcttttgttggagagcatattgattcgattagaaatttaaagcatttgaggtacttggatgcatcgaatactatagtcaaagagttacctgcttctatttgtgtgttgcacaatttagaaacactgttgttgaggcgctgctttatcacagagttgccagattcgattggaaatttaaagcatcttaggtacttagatgtatctgacacaaaactcaaagagttgcctgattctgtgtgtctgttgtgtaatttggaaacactattgttggaatcttgcaaaaagctcactctgttgcctaccaacatatctgagctaattaaccttcgccatcttaacatcaaacggtcttcactaaaagagatgccgccgaggatttgcaacatgaaaaatcttcaa

SEQ ID NO: 56313 - DNA, 1371 bp, Cannabis sativa
cagaatcatctcgcatgaatgaaaggcgagacaaccgtatccaggaaaccaagaaatccctcgtaatgatggaagaaatcttggaaaccaacctaggtctggtggtcgtctccctaggcatccatagaggccttctagcacgaatagagaaaatatgcgtacttacctgagtaggggatgtgtgtctaatctcttttgaagaagaagaccaatgcaagatgagatgcgtgaagcaagttcaagtataggagaatcgcgatcctacgtgcatagtaggtcaaatagaataaatagacaaacgcgagatgggagcatatcacgacgttattttactgaccaagaaagtataagtaacttttgcagtcaccaatctaaaatttactcagggactaggtccgtgagtaattatgtgcaaaggcatcgtgaacctgacctctgtgagagattaaatcgaaggcaaccagaccttcgcaagcacttgaattaaaatgcaactgatttgcgtgaccaacttaatcaaaacgcgaatcaacaacctgtggatcccattcaactgcaagttatacaattagaggaaaaatgtaggaaatataaagatagagaatatggaaaactgccaagatatgactcaaatgaagaaactaagccattccaccctaacattttaaatttgcaattcctccaggatttaagaatccacatgtctcgcaatatgatggaaccactgattcccatttaaacaattttaactctataatgcgagcaagcaatgttttaaacaacttgtgttgcatattatttccaacttccttgataggagctgcgagtagtttttgataaattcaccaaaaccattctataacatcttgggaacagttgttgagggatttcaaaaagcagtttcaaactttaagagatcatcgaccagaggtgtcatctttgactaacatcaagcaacaaccagtatagctgctgcaaaagtcagaaacttgaatgatagcattcagctaacaaccctttaggctagaattacaactgatttatctactagagggggtgaattataggatgatttgcaaggtcgtcttatgagaaatatcaatgattttaataaaagagcacaaatttttgtgcataaagaagaagcacaaaatgaaatgaagctattaaagactgactcgggagataaacctagcactagtactgtaacatcaagcaccgtgacaataaaggtggaaaatccaaacgtatcaaatactaagagaaaggatgaatctcttaaaaagaaagaaaagaagcatgagaagtatgtaccaatttattcagtgtatactgaattgaatgaaacttggaattattttaccaggatct

SEQ ID NO: 56314 - DNA, 1625 bp, Cannabis sativa
gttacaataaatgtaagcattgaaacctcttccaaactttttatatataataaatcataacaaaatgaataataaatatttattctttaataaaaaaaattattatgtttaattttgtaaaaaattattctaactatttaattaattttatgaaattatttattttatttttttaataggcatactatattataaataataaagatatatgttggtaaaagaaaaaaatagattaattataaatataaaacttgtttataactaataaaattatttgtacgttaagtttttcttaatattaattaaacacatataaattattaatatattattgtttattattttaattaaatatttgttaaaataaaaatatcattataataaatcatactaaaatggataataaacatttatattataacaaaaaatagtatgttctattatattaaactatttatttaattttattttaaaacatatttatttatttttttaaaaaaaaacaacttatatttataataattataaatttataataaagcatactaaaatagatcataaacacatttatattataacaaaaaaaatattttaaagattttaatttttatggtatcacaatttctgtttcatattatttaatttttttactaaaacatagttttaacattatttttaataagagtaaaatttaaaagattattttaattacatatgaattttatgtatattactgtttataattttacttttatattttattattttgtttaaattataataagtcataataaaacagataataaatatttattttataataaaaaaatatttagtatgtttatttttgtaaaaatttattctaacttttaatcatttttataaaattatttattttaatttttatagagtaatttgcggtataaatacctaaatttatcttccagttgcaatttaatgcctaagttaaaatttttgcagcataattaccttctgttacactttcagacattttgtaggtaccttactgttatcttgcacattggacaccagatgacataacacatcatttaaaataataccacgtcatcttataaaatagccacataatattaaccattaaagtaaaaattaagtttgctttgaaaaaaatatttacataaaaattaatttaataaatttataataaaatatgaaataacacaattaatacaaaatcaaacaaaacacgagtacttatgtatcgcttaaaaaagaaaagttcaattaaattaggcgacaggggcattgggatcatctgcgaccatactggtaccatctacgacttcagcagtagtcgcatctttagcatcattggggaaaaggtttccacctaacccttgagtcttggtaggcgacatggtacgaaaagcattggccatctcaactgcctctggcctaaaaatgtcaaagttaaattctagtagtttggccagggaggtgtagatatagtcacagacagcctggtcgtgtgccttcttcgcgttctctttttcagccgcaagatcacggataagaccagcattgtctccctccagcttcttgactcgcacatctagggtcttgaattattcttcagacttgtt

SEQ ID NO: 56315 - DNA, 1208 bp, Cannabis sativa
tgaagactctcatacccaataatcgcattgtcatgaataagcctccctttaacaaaagcactttgcgattccgatataacctcatccagcgtccccctcaacctattagccaaacacttagaaaccactttatagattacattacacaaactaatcgggcgaaattcagccaccagagttggtttctccacttcaggaatcaaggcaataatagtctcattcaaacaactcagatccgccccattattcagaatattcaaacaaacccgcaccacatctttgttgacagagctccaaaacttttggtaaaatagcgccggtaacccatcccccccaggtgctttcgtaggattcatatctttgaccgcccgaaccacatcctcctccataaacggttccaaaagaaaagcattcatgtcattagacactttcggtgtcacaactgttagaacctctccaaccacccttgagttcacctccaaagccataaaaatattatcaaagtattcttcaataagtcgctgaactataaccgcattcgtttgccacagccccattgaatccatcagttctctaatgtcatttttcttacgccttgccgaagctttgtggtgaaagtactttgtgtttttatccccccatttcaaccacatagctcgacttcgttgtctccaataatgctcatctttttccaacaacacatttaaatgcttctccgcttgctttaactccacccaactcccaggttattgaatcaatgtaagttcattaagaacctttttatccttagtgatccttccattcaattccttcttcctcttcttattccacccatgcaatatcttcccaacccgatgagttttaccatgaaaagaacccgcaattgcacacggctccccactcttccaatgaccttccacaattgccttgcattcatcctcctcacaccatgcttcctcaaagtgaaagcgtgtatgtcgtttagcttttccactctgagtgccatcctcaacaatcagcatgtccaccaccaaaggacgatgatcggactcccaccaatccaataactgaatatccgctccctcaaattgatcaaaccattcctggttacacagacccctatccaacctttccataacagtattagattcatgttcattacaccaagtaaagtccatcttaatagaactaaaatctatcaaacaaca

SEQ ID NO: 56316 - DNA, 1449 bp, Cannabis sativa
tttgattggatgcttcccaatggaatgaaaaatgaagatttggacatgactgagtcttttggtgcatcccttcaaagaaaaaatgttctacaagttattcctaataacaggaaagatgaactaatcggtgcatatgtgtcttggtgacattgataattataataataatctgtattttatggataacaagttaaattattaacagtctagaatctttgttgatgctcatataagtcctaggccatatgcttttttattttgaacgaatagtacaatcaaaatatatttaattaattagtattcattaattatgacttttgaatttttaagcatgcatgtttaattaatttgttgaaaattgattttagttccttaactattatggctggaaaaaaaaaaaaaaagagaaattatcaagtttacatttttgagaaatgataaaaaatactagtgttgcttagcactttcatacgtgtcaatatcattattggtgtaattataagtatcgagtctcatataatttaatgtaacaacttttaggcagtatcgctaactaacactataaaaatttttacttttagtcacaacaaaacttgtgactaaattagtgaaaaaaaatttgtaactaattataaattatcattcatatgttgtgactaatagttccgtaattaaaagtattagtcatgactaaaattaccctttgttgtgactaaatgtgtttttagttacaatatttgttgtgattcttgtgaataaaactaaattagtaaaatttgtatctaaatattatattttagtcacaaataactgttggagtaaacctccacttacactgataattgacttaatacaaggaccaaaaggtaattacatgcaaatccctaatttggccttcggcctctagaatccctaacagaaattagttagaatggattaggttaatccacacctaactaatttatgtaactatattaactaacaattacagaagcaaaagagagaaccctagatctatatatacctgcatcaaaatcacaaccaggcacggttgagtgttctcttcaagatccagatgttgaaagcttgaaggagaaggagttgattatctcgcatgcacaagaaaacaaacagagagttaaagattgttagagagagggattaaacacaaaatatatgtattaaaataagagattaccagtcgagaaaaaattaactgtgacttggaatcttcaaccttgtacttctgaacgtctttcatagtggaatcgagctctcgaatttgaggaacagctcaaacagagacgtagccaatttattggtgaacttcaggaaaatttggtgttttctaaccctaatctttttggttttgtgtgtgttttagagttttgtcacagtcagtagtcccgtaatccgtaaggggaaataccgggtaagctgtgcaatccc

SEQ ID NO: 56317 - DNA, 987 bp, Cannabis sativa
  modified_base (481)..(485): a, c, t, g, unknown or other
aaataatacattgaagacattttaaaatattatatacttatcttaaataaataaattaaataaatatatgttttacataatctctaaaaatttttttaactctctaaaaagctggtggacttacgaacgaattgaactcatcaccctacctaagtctatatgcaattagactaactaattgagctagaatatatttatataatttatcacactaaaattgatatattacatattttttgtttatatatttatattaatttttttttggggcctggccctacaccctctggccggattgtggtgtatagaatgaaaacccttgcacggtcccgtaaaccctcggttgggcactcttgggtgtgagtcatgactctaaatggttggttagtattttcttgagtctcctagatgtgttatgggaccctcaaatgagaattattcacttttttactgaagagataaaaatgagagatttttttannnnnatagaaaaattaagtataaaaactcaaattttctaattttacctattcatgggtaataccattaagagtgaacccacatatatataaaaatattatgttatatatttttttttaaataatacattgaagacattttaaaatattatatacttatcttaaataaataaattaaataaatatatgttttacataatctctaaaaatttttttaactctctaaaaagctggtggacttacgaacgaattgaactcatcaccctacctaagtctatatgcaattagactaactaattgagctagaatatatttatataatttatcacactaaaattgatatattacatattttttgtttatatatttatattaatttttttttggggcctggccctacaccctctggccggattgtggtgtatagaatgaaaacccttgcacggtcccgtaaaccctcggttgggcactcttgggtgtgagtcatgactctaaatggttggttagt

SEQ ID NO: 56318 - DNA, 6032 bp, Cannabis sativa
attatggtcatcatcaataaaactagtgacataattattgggcaaattaacaaccatcttcttttcttttcttttcttttctttttttcaaatggataacccatattcatcttaattattcaactttaagcttgaaatttaaagtaataatatgaatcaagatccacaaaatacatacacattcagatcactcttgtaattaaactgtactttagagatcgagaagaagaactagtatatatttatatatatatacacaacctataacatcagtcataacctgactaattaatataattacaataataattattagaagaaaaccacacctaagaaaagagccaaagataagaagccatgaatgaataaattgatcaaaggttgttttccattaatggccgatgatgatgatgatgaactgcctcgattcccggttgcagctactgcaccgccgcctcggctgacacgtcctctactgccgccgccacctcctctaccaccaccgccaccacgagctctgacgtaagtcaaaagcttatgatgatgatgaggttggaatgaaataggaagatcttgtttggtttgtagtttgtaatgatgatgatgatgatgataattgggttaatattaaaaatactaataagacaacaaaacaaatcgagggtttcatatctcagatggtaattaatataaatatatagtagtaaagaaaatatttttggaattattataagctgagaaaattaggtgtttgtattgtatcaattaatattgagctatatagaaactttatgatgactttttattgtatttttaatgtaagagcaaaaatagaaagatggaacgaaaaatgaaagttattattagataattattgtgtatataatgtatgtggatttgttaatcgagtggcggtggtggcgcgtggtcaattatataatttgtatcactaatcaattcaaggttttaattattttatatgctaattaattaagaatatcaatacgaaaactttatcttttgcacgttaattggtcggtatttgaatactaatgattgaattatacaaatcaagcacattcattacaccacactgttgacgctgttattatataattttagggttcatttgctgttacattattatattaattaaattatattttatataatatttgtatataaaattatatgtatgatattgacttttatatatgctcatatatataatatttagtataaattgaaatttaataaatatgatatataactcaatttaatataatataatacaatttaatacgatttaatacagtataccaaacatgtttacttcttctttcattaaagtctccaaaagttgttgtttctgtatctaagctaatcaatttttcaagattcgaattgtcccctcaatatcaccaaaattgttcttcttccaaatgtgaagaacccttctcgtattgtccaaccaacttttgcaaaagtaatttactcgcatgtaaatccgaagaaagagtcgatgcaccccaagccttcacaacaaggattttacgataatcttcccttgtccatacctcaaaaaagcaaaaagaaatatagcccttgctaacatacatacaagaattcaaaataattgtcgcatgatccgacactgttattggaaggttaagaactcccgcattaggaaagacagagacccaatcatgagagtcaatggccatgtccaagcgttctctaatcaaaccaccattgaatctcttgttgtgccaagtgaacttgcatcctttgtatcgaagatccactccgagaaaacctaagagtcattttgtatcattctctatgactttctttcctcccacattttaaaattcgtgatacaatttaagtcacctaaagccacccaaggataatcgcacgaaccaattttattggccaaattactccagaaaaggcctcttctcacattcatagggggtgccacaagtagcaaaaagactccaccgcaagagttgtcttgaccatcccaaattaatgcctcaaaaagtccatagcttttatcaacgatatttaaattaatttccacattccacatcaaacaaaagcctcttactaatcctatcgcgggcaaacaatccactctagaatatcctagtactctagctatctcttccattcttgccttacccacctttgttttcaagagaaaaatacactccagcttgtattttctcacccaagccaataaggcttagactctcgagtcctttgcaaggccttgacagtttcaagatagtagtttcattgggttggagggcttgataagggccgcctccttgtccatttgaaaattctgaatgttgtccagtcaaacctccactaaactcacttattcctccaaatttcttattgtgtcctccttctcaacccctgtacaaagttggtcttactttcttgcagataagcaacttcgagagcccttcctcctacgcttgtcatttttggtcgaagatgataaagctcttgtacccaacttaaatgcaaagcttgctgggcatgggagaaaagtactcatctcaggaatctcttgtgaaaactcacgagaattctcttcagttctaggaacaaagggaattaaatttaagcaagcctttctttttctggactgaggacaaggatggacttgctgaaaaacatcaagtggatcatgaaaaaagacaggaatgggctcaaatttgtcaacttgaattgggcacatcaattccttggccagcccaatttttactgcataaaatggccaaggaaaatgagttttctcagtagttatttatatggataccttgatttacatagcttctcatgtgggccttccatcatttgttcataggtgggtccatcattagacatgatactggtaataattctagaatctttagttattggtaatagtcttgaagaaatttttttaatgatttcttcctctgtcaaagtaggagactttcccttatggatgtcttctccaaaagcatgcatggggaaactgaatgaacacgcctttctctaaacaattccatcgggtactgtttcattatctctttcatgttttttctattaaccactgtgttatcacaagggctctcaatgattttcaaattttttccataattggcttctgaagttccttcttgaactctgaccaccttcctccttagtcgagacgtgggacttggacggagcttctccactggtttgactaaattcaggcatcggcttttcccctctgtcccttaattctcttgaaaactccagtggtcttcttgtcggagggagacgaactctagcatcatctctaaaccagttcaattaattcctggtattaaaacaactcaaaactgatgtttcagcctttgtccatggaccataggccatgattgtctttcttttaggaggaaacacgaaggtagtttgcctaaaacattttttcttctcgtgccttatatgaccggagttgtagcagatgcttaggagtttgtaaaatctgaattgtattcactcctttctccctctcttgatatccaagtaaaacctcgaggccagttgttggtgaatattaatttcaacttagaacttgaagaaaatccttctggtaatggtgtgatggtccactgtatcacttcctttgtaaatacctaatttggctctgattgtggggcttcttatccaattcaggtaaggagatggtaactcaatagcttggacccaaaaaacagttttactcatttccatattgttctatgctccatcctcaggccactccttcctaatcaataacttgccattaataattcaagccatgttctttaaaatttccacgcaatcctccttaaggttgaagaagatgccatatagtcttggcttcaaagtgttgaacctccaaagacacttcagtttcgcttcctagatttggcccaatatctcttttaatctagaccttgaaacttcaactccttcaaagaaactagccaagattccagttctcgtaacttcttcattagatcaaaatcaggttccaagtcaataatcataggctgaaggaaaccctaattaattttttccagtttctcaacactcttctcatttgcatcatagtgttgttcttcacaaaaatgctcgtctctttcctcagttgtctcctctagggtgcctttatttacctctataataataaatgtgttgttatcacagcacagagggtggttagattcattacgaaccctcatttcctcttttaaaactatattctccacgttctccccatttttcatgttcgcaaaatcactaatttatctatggttgtctcccattattacgcatgcaccagtaatccaaagtcagacattctctaaagccctacctagccaacgactaagagaatgggaattagggatccacttgaaagtaaagacaagtacattcaagttagacttccaacactctcacatgagagaaaacatcatcatcgatatacttctcctctatgtacttaaaactgacactgctaacgtcacaactcacaaaccataattacttatcaaatagcatatctctttttcccttttatgaacttaaaaacttgttcgtttatttcaaaaatattttgaaccaaagaggaaaaattagtttcatggctgaaaaagaagaaggtatattggatataaatatgaatgtttcttcttctaataataattataataataaatttgttgatcttgtttggattttgattattgaagttgtggcaagctttaaagaagtaaacttttcacttttaaatttttctaggttagaattgtgtattttttttttctttgcgaaattcaatagggtcgataagttttcaatgctaacttgatgtttcttcgagaaaccttaatataatctcgatagcatagtatatttttatgtacttcgtctgaagttgaagatgatcttgataggtgctcaatgaagactccattgataggataatatttttatattctattttgtgtaattcttttgtttgataggattttgacggggttcaatttaatgtttttatttttttcctttcattatttgatttgatgtgaactcaacaaagtttaataagaattcgatgcctatcattgagttcagtttttaatatttttaaattttacctcactaccatgagcaagtatcatcgagagtcctcattgagcacgtatcgagctcatcttcattgagcacctatcgagctcatcttcaacttcagacaaagtacataaaagtatacaatgctatcgagcttatatttaagtttctcgaagaagcatcaagttagcattgaaaacttatcaaccctattgagttttgcaaaaaaaaaaaaaatacacaattctaacctagacaaatttaaaagtgaaaaattcacttctttaaagcttgcaacaacttcaataacccaaatccaaacaagatcaacaaatttattattagaagaagaagaaacattcatattcatatacaatatgtcttcttctttttcagccatgaaactaatttttcctctttggttcaaaatatttttaaaataaaagacaagtttttaagttcagaaaagggaaagagggatatgatatttgataagtaattatggtttgtgagttgtgacgttagcacgtcagttttaagtacataagggtgaagtacaatgatgatgatgttttctctcatgtgagagtgttggaagtccaacttgactgtacttgtctttactttcaagtggctctctatgtccccttctcttactcattggggtagggcttttgagattctttgactctgtattactagtgcatgcataataatgggagacaaccatggacaaaccagtggttttacaaatgtggaaaattgggagagcgtggagaatatggttttagaagaggaaatgagggttggtaatgaatctaaccaccctctattctgtgagaacagcacatttatta

SEQ ID NO: 56319 - DNA, 2179 bp, Cannabis sativa
actctaacacttgactcaaaatacgagaagatgggtggcctaatctcctatgccacacatcaatttttgaagataaaaacttattagttcttgattgatttacatgattcttagacttaaccatagaactagatagaaaacaagacttagactgagatgacactatttttattgggttggaaactggaaaactgagttgagactgaggtgactcgagttgatacagaccatccttaagcacttctcgaagtagcaccctctttgttactttgttcttcaccaaatagtaatcatgatagaattcaatcagaatgttgttatccgatgtgagcttagatacactaattaaattcttagcgatttcagacacatgtagcatatcctttaacactaaacaactaccagcttcagtatacaaataaccattacttaacagtatgaacggttttgagcctgttaccgttgcccacaataatagactctttacctgtgtaatcccacttctagctcatgttggaagcattacttgctccagagtcagcaaaccatcactgtcaaatatttcaggggttgcaacgaaggcaatatggttgctttggcctttttgctactggttttgagtgatgttaggattagaccccttgaaactttcatcgaacctgttgtaacacactgctgctgagtggccatacttgccacaaacttggcaagttggcctttgtccatttggcgaccccttccacaagatctgcctgcaccaccacgattaccagagaatcgccatccattgttgaattgttgattttgatgtgcatatccacgacctggaccagctgatccagatccagttttggttgcaacattttcttgaggtgtggaaccagtttttcctcctgagttgagagtttgcagcctttcaatcgttctgtcaaagcttaggaggatatcttaaagttcttgccatgtggttttagctctagcttccatttgaaccattattgaaagatactctgcatcaagtcctgataacacattggcaacgagatgtgcttcaggatagggatctccaacaagggccaacatatctgcccaatttttcttttgtctgagatactctgccattgttgttgagccttttcttactgtttgaatcaaggtgcgggtatcatccatcttggatttggaataagcactatacaagctttctaaagcatgccacagttcaatagatgaggcagatcccaaaaccttagtggtgatgctctctgtcatagagttgtaaagccatcccagagcagttggtcatttattatccagtgctcaaactcaggatttcacaacaacttcaacacatccagattcatctggttcacctgaaggaagaaactccaatggacactctttagtgcttgtgagatatccatgtaacctatgtccacaaacaataggagacaccatagtcttccataaggtgtagttgtttcgatcgagtttaagagagaatggttgattgagagtggtgagttgattctcgtataggttagtgttttgggaagaggaagcaccatttataatggtttaagttccctagaatgcagaagaaccatctatgcttgtagtaggagcattgttttcatcaccaggagtttccatggcagagacctagggttaactctgataccaagttgaaaatggagagaaataatttttcgtaatgttcagctcaattcaattgtgagctagagtattctatttatagtaaaaggaggcattacacatacataagaaaaaaaggagccaacagctcttttaaatttgtccaataaacaaatccctagagaatatttttatcctaacaatttttacgattattgcgcacagtacaatttcataaccgaattatcagggaatcaaatctttctatgcttcagtgttgctgcagtgtattacagtgcaatgcaccttcagggatgacacctcatcaccattccaagtttgcttatttctcaatacgaaatgcttgattttggttggtccatagatgacaaaccaaaggctgctacaacagttatgtaaacttgcttcctcgtttattgttgtcgagtgaatttcgcaacaccaattttatatgatattattaataacaaaaagaaatctatatgaagaacaagtgcgagta

SEQ ID NO: 56320 - DNA, 878 bp, Cannabis sativa
  modified_base (716)..(719): a, c, t, g, unknown or other
tatatattaattacatttttattaaatttttttatgtgttaaatttgtaatacttgattgttttgtgtttttatattcctaatattttgttgtattttggttgttttaattatttaaaacgtttaactgcattacacttataaagattgtatgtttatgaagcattaaacttaaataaagggtgataatttactgttacctatttttttcttcatatttttaagttaatattgaaatttgaagtctaattggattggatcagatgatgattttccaaatcaaactattgattgaattggattggatgaaaataaaaaattagattggatcggatgctcactcctaattttgagaaggcatggaaattgggaatgctctcactccatatctttgttaactagtttaatacctatttccatctccatcatcgcatattttttattggaggcggagctaaaaatctcatctagggtggataatactaatacctaatggaggatccatttatttaaaattaaataaaattatgaataaaaaagataattacataaaatttaaaatattatatactattgataatttaaaacaaataatgctatctaacgtaaaataaaaatatttaaaaatttactaaaataaatacaaaacacatgaagatacatatatactaattaaaataataatataaaataaaatgttgcccctaattttgcccnnnntacgtggaccaaccagatagggacacgtggaccaaaagaccttaacatttgaattgacatttgcattaattgctaagtctttatgaagaaaggcagcatccgggacctgcctcccggagaaggcatacgaagtcccctatgctcccggaggcttaagta

SEQ ID NO: 56321 - DNA, 737 bp, Cannabis sativa
  modified_base (687)..(688): a, c, t, g, unknown or other
atagtagaatctaagcttttcaaacggtcgaatacaattggatccaaatctataataagctatagattaattgttcacattgaatttatggtacataaggaatcaagagataattagaagggtaaaatagtattttgaccaactctagttatgaactaataattggagggcaaactgcttatattgattatatcaatggactataagtaaaaattctgtaaatataattcaataatgtcaaagattgtaattctatatttatagtggagttataatggaattaataaatcagattattcaattgatgagatcgataataattaagtatttattagagcttcaaaatatagatccattgtccctgagtcacatctataaaatattgtacaggtgaaggttttatttaataaataaattttgagtaagaatcaatatcaatatatatatataaaggaaagcactaaggagtttagctggcaatttgtatgagtttttcaccctcttctttgatttctcaatttcttgatttttctcatttatttataattttttatatattatcaaatgattaatgtgtcttttaatttttataacttacactattatgtactttccattattatattactttttataacttacactattattagtatattataattggtatataagtgacttttgatnntattttcttaaatgcaaaatgtcaaaagttgtgaccatttagtttacaa

SEQ ID NO: 56322 - DNA, 1305 bp, Cannabis sativa
aaatagggatacctcaaaaaaactggagagtaagctataaaaatcctctaacaagaaatctaggtcattgcaaaaagagaaatgcctagaaaacagagaccaaatataaataatcagattccacagtattgaggagaagtctcagcttcaaaaaccaacccaattaggggtgggcaacattcaatccaatctaattgaaccgatccaatccaatccaattacaattggattggattagatgctaaaagttaaattctaatttgattggatcgattattagatgtcaatctcaaaatctaattaaaaaccaatcaaatccaaattacatttatatatatatatatttaaaatttagttatatttatttatataataaaaaatataatatgtatcaattatatttttattgtattttatttttgtgttaaatttgtaacagttgattgttttatgtatttattttcatgatgtttttttttataataaaactgatataattggattgtattttgaggtctaattgtattgaattggattgaatgataattttttaaatacaattattaattaaattggattgaataaagaaaaaaaaaattaaattggatgggatgcacacgtaaacccaaccgttaatgttacagttttgacgtggatgcctataaaggctctcaccatcaattaatctattacttctacttcaaatactttgaaatttcctacaataacaaaaaaaaccaatcatgagttcttataaaaataatatttaccataaaagtattaattaaaatctaaaaaatgaaaacttatctatatgtgactcgcaatgtggtgaacaatatatgtctccatgtataatcacctaacctaaacatacatacacaaacaaaacatataacaacatgacacactgagttaccaacaacacacaaagtaattttcaataaataataataataataacaatagagtcattaagtaactcatacaaaaagaaaataaattataaaataataaacatacaaaaattattaatagcaaataacagagtaaatataaccatcttagctttagtctaaaacctttttaaggaagcaatgcttacactttgtctatatattttctatgtgagaaatctacttaaactgttctctctctcttctgagtcttcgcgagattatttgttgtaaggatgttttctgtgatgttcatcatttcttggtatttcatcttctactttgtaaacttcatctgataatgattttttttgcatgatgtttttttcggatcgcttagtctaatcgg

SEQ ID NO: 56323 - DNA, 1423 bp, Cannabis sativa
tacttggcattgccagtgaatctgtatttttctttattaccttgcctattgtcgttgctagacctcttcccttttgaattctgactgttgggatattgtggatactggatggacacccctccgtgtggctggttgttgatttttctttcctgacagtatccacgtgccgtacagattctttgagcttaatgaatccatctgcttgacactaaaattcatcaattgatctcacagttagtcttttaatgtccttccataactctcctagagtctcaatgccatcaagtattgaaactagtcttcctccttaatcaaccccttaacatttgtagcttcggtcataaacttggtaatataggctctgagaggctctcctggcatttgcttcacttctaccaggtcttccaggtgtgagagaagctgttaggaggaagaaaattatacgtgaaactcagatgtgaaggcattccatgagttaaaccttcctagaagaagtttagtataccattgctaggtggcctctgtgagtgtggtaggaaagattctgcaccgtacatcacctctaaccccttgtagatccatctgcatctcaatttattttaggtgttataagggatcttcttttcttgtatacattttccatattggcattttgaaaattaggggtaggtcaagagctttaatctcaggcaagaagggtgatctgcgtgccaggtcgagttccaggatccctgatgaacttccaggtttaccaccgtaaagagaaatcgatttcattaacaatttagcacctagagtagaactggtttctaaggcaccttacagaatggctccagcagaacttaaagagttgaaaattcaacttcaggtggtgcttgacctaggattttcacgacctagtgtgttaccctagggagctcgcgtattgtttgttaagaagaaagacagatctttacgcatgtgtattgactatcgagaattaaataatctgactattaagaaaaaatatccattacctaggatcgattacttatttcatcaacttcaagaaaaaactgtcttctcaaagattaatctctgatcgggctatcattagttgagaatccgagaggaggacattccaaagactactttttgcactaggtatggccactacaaatttttggttatgtcttttggactaaccaacgctcctccagcttttatggatcagatgaatagggtattcaaggatttccttgatatctgtgttattgtttttattaacaacatccttgtgtactctcaataaaaagaggagcacgagaagcatcttcagatggtttgacagtggctacgagaacataatttgtatgccgaattcaagaagtgcgagttttggctatctcaggggtcttttctcgggcacattgtgaggaaagat

SEQ ID NO: 56324 - DNA, 1195 bp, Cannabis sativa
aaagtattggaatggcattccaatggaatgctctttccaccattttagtggaatggctattccattttaaaatggaaggaatgaccattttttcatggtttttgatttgccaactatttgattacaatttaagctcacttaatgtttattttgtgtattttttttaattgaataataatgaatttgggtgccattttttaaaatggatagaccctccaccaccaaagagtgagtttgatttgattaaaaagatggatgagcttgaaggaaaagtgaagattttgtctaaaatttttcagagaagagataataaagttgacaacttgatgaagtttagaaaaatattcaatcttactctatgtgttttgattttgattatggcaatattgttgttctattatatgtaagtttagttgtataagtttggaggcatatttaaatttttaagcttcattttgtgtaaattcaatactgaatataaatgaaaatgttgttatgaatttgattatctaattttgtttttagattatagtagtggaaatagttagaaaattaagtggcatttgtttaactaaatattggcatgaaaatgacattttattttgggcttttttttttcagttttaactgaaaaaggtagcaatattacaaaaatacttcttgctgcctaaataaacaaatatacagctcaaataaaaaaatttacacaaatatctcttacacacaccttcaacccaggatccatgcttcctgggcaactatcgggcaaccacgcagcaacccaacgtagccaaaacaaaaatccaaccagaaagagaaccaccattaattctggtgacttcacctgagaagaagaccaaaatcaatcgaaacaggggctgtttagaattcatgtaaaagatgcagaaaaactatcacgaaactaaaattcaaccagaaattcagtttaattcacataaaactaatgtcctgacttcaatttttagatccatgaaatgtagatctcaaaaagctgaactagagttctcaaacaatcaagctcaagtataataataaaaaaaatacaccaatactacagtaaaatatttagggtttttttcataaatgtacaacaaaaacaaaataattacaaaaaatgtgcaaaaaaaaaaattattttaaaaacttatatattttgaaaacttattacatcaaa

SEQ ID NO: 56325 - DNA, 535 bp, Cannabis sativa
gataattgtgataatatagttgttataaatgttcataattcatttatataattaaattgagtgctgaaatatttttggacgagttagcatgaagaagagttacaaaacacattaaatgtgtcctggaaaatcactagataacatgtcgcccaatgagtagcgacatgtcgcctgaacatgcaaacaaagaatgtcgatcagcatagcatagcatgaagaagagttacaaaacacattaaatatgtgtcttggaaaatcactaggcaacatatcgcctaatgagtggtgacatgttgcctggacatgtaaaagaggaatgtcgatcagcgttacgtgatttcgaaaataggagtgcattttccattccaggcgatatgtcgccagaagttgtttttagaaagaacgttgtaaaacgttcatccctttaataggccccatttacgacttcagtattttcaaaacctccggtttcgcttgaaatacttcggtagtgtattattaaaaatcgaacataaattgagttaaaaatagaggt

SEQ ID NO: 56326 - DNA, 597 bp, Cannabis sativa
  modified_base (50)..(67): a, c, t, g, unknown or other
aacataaaatgttatttctgatctgtattaataagtaaatctaattatannnnnnnnnnnnnnnnnnagggcacaaaacccaacagttgcgaccgatgagatctgcaaacatcatgctcactagccttttatacgtggcccttacattttttagcccgaagggcatgactttgtagcaataaaggcctatatctgtcataaagctagtgtgctcttgatctggtggatacatctttatttgattgtaatcagaatacgcgtccatgaaacttagaatctcatggccagttgtggcatctacaagctcgtcgattttggggagtggaaagcagacttttggacatgccttgtttaggttggggaagttgatgcatactctccacttcttgttaggtttaggcaccagtaataggttcgatacgcactgagggtagaatgccttattatgaagtcattgactctcagccttttgaccacatctttgagcttttgggcgcgctctttgtcaagcaaccatgtaacgtcccctcttcaagcctccattaggcccttaggcccaaaaaatgatggctattatacacaagtacatcactttag

SEQ ID NO: 56327 - DNA, 1060 bp, Cannabis sativa
catcatcacaaatcacaataatgaaaatccctattgaaatctttgtatacgaaatattaactagaacttgcctagaaacaatagcaagtagtcgattagtgtcaaaggaaataaatgaagccacgtacgaaaaaagattcacacaacttttttacaaaagagcgaacatagcttcgggtgttcatattctaagtctaaagtatagtgttttctacactaactacatctccacaccacactcttctccaaaactattatccttgagagattttcttcctcgcaatattaaaattgcagcagcaaccaaacaaggtcttcttctttgcatcgatggttattacttgccaaaatacattgtttgtaaaccaacaacacaacaatggcgaactattccaagacccaagactcgttttttcactcaaaagtgtatgatgtttactataggatctaaccctcttcgatacaagattgttagattctcctcaagaaacttaggaggtgattgcatcaaatataatggtaaaattcatgttgctttccgttgtgaaatttttgactctaaattttgggcttggaagtgtttagaggaaacaattaatattccttttgaagagtatcttgattatgaatcaatgatttgtatatcgagatacatatatgcccttactagaaaaaatagattatttgttttcgatttagagaaggaaagttggaaattcatttctttggatcttgataaagcttgtgatgataagtataagtgtagagcaagatatcaacttgtggagcaccaaggaaaattgggacttcattgtacgttgacaagtgatcactttgtggactacttaatgatactttggattataaaaataaagaaaacatcaacatcatggagtttgagcttggagaaacaacattgctttcaaattcttaaggaaccatatgcttctatggtagattttcttgactatgatttggtggtcacaatgggattcgataatattctacttcatgatgttaagacatcaatttcgaagattagaacgcaaataagtattcc

SEQ ID NO: 56328 - DNA, 1001 bp, Cannabis sativa
taatattattattatcatttgagagaagaagagtattatttccattaaagtagatgaattcattgtaataattatgatgagtagatggatctacacaccgactgattaggcaaatattttgggtaatgaaaggggtttggtagagtaagggatgagttgagttgagtgtcctatatagaaccgtgaaaatgaggacacacacagggtcacatgttacgttgagattctgtacgtgttatatatataagatcaattcatttgaaatttcaaactataacacgtggcacaaactcaagctatgtacgtgaatcatcaaatcatcaccatgcatgttggctaacaggtaagctgcttaacacccacgtggcccaataggactgttgcatgtctcattaatttacactgaataatgatgatatggatggagtacgttgacttttattacttgagttttaccctgttgctattcaaatcaaacttaataatccccaaccgtaatatctatcgaaagtaacaatcaacaacaaaaaaaacttaattattaaatttattatattaattgtttcgttattgatcaggactcttgtgccttctacaagtatgaagatgaatacgaaaaatcattccaatacagaaaattaatattaaatcttcatattacattctattttatttctatgtacaaaattaattaatcctttccaattccaaaccccatgcaaaaaaagtttttataataaagatcaaagtctgatgaacagcatttcctaattcatagaactaagaaaaaactttgaatcaactgcaccaaaaaaatgcttatgatattgctctattatatatttcgttttttcgacaataattactctctactaatttcattatcgacccttaaactaaaacttgtacagtagaacctctatttaagaatactctattcaagaataacctataatttattataaaaaaataaagtcccaatttgggcaagttataaataa

SEQ ID NO: 56329 - DNA, 1146 bp, Cannabis sativa
caaaatttagacatatattgttattcgtatttttgaacaggtgacacatgacatgaaaaaaaggtaaagataatctcataacctcactgattaaaatcccccaataaaatccagccacggagaagcttcattgattcaggaacaagtcgagactgaaagataagtggatgtctaccacatcttactcacgcttctcggacatggaagacatattactactccaaaacctggagtgccccaaactcaaagtctgcctaactgataccttgatagatactcaaagggcctatcgcggatgctgactgcccaagggtatcgcgaacgtctatcttggatgcaacctggatcttccaccgatggttatgccttttctgacaaagaatcagatcttgttccctgtgtcagaacatggtagtgtgcacttcacataccttttcgccagacgcttattccaggcatctacttctaaaggatgaactttttggcgacatgcgtccactatgtgcaatgatcccctatcgcccagctgcagcaatgcacatgcacaattctttctaaggggcccaatggtcaactctttcttgcatgtatgttacccctattagtagtaaaaggaaaagaaataacacaaagtttttttacgtggttttccagttaaaaattctgcatagtccacgagtctatcttattaggtttctgatacaaaactggggctctttctctaaaggatttttagtccatttttcagtgtaccctgcccctatttataattacataggagggcagttaattacaataagatgatatcgaacaacaataatcccctaaaattatgagatttgattacatcccatgtgaaataaatgctgttattatttaaaaatcgcatagctgtgatttatccgcttttactgagtaaatattggcgtggatttaaatacgcttcaaagtgtatctcgcagagttatctcgttgggatcgcaacaataactttgatagtaagctaaagcttttcccatgtctttccgagatttgataataaaaatatcgtcgtttcagctattgaagacataacgctccatctgacaatcgcagttcttggtgacaaggtgaacttcaggagtcaacatcatttgaatgtcagct

SEQ ID NO: 56330 - DNA, 3034 bp, Cannabis sativa
  modified_base (254)..(255): a, c, t, g, unknown or other
  modified_base (1646)..(1657): a, c, t, g, unknown or other
gattgaggaggttattctcgacccaagatttcccaccaaatgtgtgtacgttgagaagaacccggacgaacatctcaaatagcaatgaataagctttttgaaggcgaaccaggatcaattcgcttggagtcatggggatatgataaggatcgaccctaagattatctgccatcacttaaatgttgatccaaactacccgacgaagagacaaaaaaggaggcccttggattttgagaggcaaggggcactaaaannggaagttgacaagttgttagtcatcgattttatacgcgaggtatttttatccctcgtggatagccaatcccgttcttatcccgaaacctaacagaacttggaaaacttgtattgacttctccgatctgaataaggcatgcccaaaagactgttttccacttcccggaatcgaccaattagtggatgcaactgctgggcacaagcttatgtcttttatggatgcatattctggatataaacaaataaaattgtatgtcccagattaataacctacaagctttgtaacaaacatgggactctattgttataaagtcatgttgtttggactgaagaacgctggtgcaacgtatcagcgactagtaaacaaaatgtttgcaaatcagatagggcgaaacatggaggtttacatgaacgatatgttggtaaaatcgataaagagtaaggatcatacctcagacctcacaaaatgctttaaaatattaaaaaagtataacatgaagctaaacccagaagaaaatgttccttaggagtctcctggggaaagtttttgggattcataattaacgtgaggggttttgagcccaatcccaaaaaactcaaggcattaatagacatgccatccccaacaaagcctaaggaagtataagccctaagaggaacaaaaagtttgagtggacaaaagagtacgaagaggcctttcagagcataaaaaggcatcttgcaatgcctctagttttggcgaaaccaataactggagagacattatttctttatttagccatctcgaaagatgcaattagtgcagctatagtgcgagaagagggtaagcatcagcaacctatttactacgtaagtaaaaggttactacaggtagaatccaggtatccccctctagaaaaactcgcgttatgccttgtccatgtgtctctcaaactacggccatatttccaggctcaccccatataagtgctaacagatcagcccttgagacaagttttatcaaaactagatgcttccggaagattgataaaatggccgactgaactggggcagttcgatataacataccatcctcgaacgtccatcaaggggcaagctttggctgacttcttcatagaaggtataactccagaacaaatcccacctgatcagcgagatgcagaaacctggaagttatatatggatggcgcatccaacgaacagagttcgggtgtaggggtaatattaatattgctggaaggctttaagtttcactatgctctgaaattcaaatttgacgcatgaaataacgaggctgagtatgaagccttgatccccgacttaaagatagcagaggccttgaaagtcaaaaatctccatttgtcatagtgattcgtagctgatcgtgaacnnnnnnnnnnnngaataccaggccaaaggcttgaaaatggcaaagtatttagagaaactatggaagaacttggaaagattcgattactttaaaatcaaacaaattctgagagaacaaaactccaacactgacgccttagcaaagctggcctcgcaggaagacctaaatgaattaaatctggtttctgtagaactgctgagagagccaagtatgtgtgaaatcaaagacgtcaagatgatagattgctctccaacatggatgacgcctattatcaactatttactcgacgagcaacttccaaatgacaaaaatgaggtgcgaaaacttttgtatacagtgcctcactacacaatgatcgaaggcaaactatatagaagagggtattcaatgcccctacttcggtgtgtttctcccgcataagcaaacaaaatcattaaagaaattcatgaaggcttctgtggggatcatgcgggttggcaaagtctgtctaaaacgatcattagacaaggatattattggccaacgatcaataaggacacacatgagtttgtcaaaaaatgtgataaatgtcagagattttcacaaatacctcgcgtgtcgccaactgaacttagaatgatgacctcgccctacccatttactatatgggggatcaacctaattggggcattacccactgggcaagaaggagctaagtatgcagtggtagcagtccacttcttcactaaatggacggaggtcgagcccctcgtatccataacctgcaagaaagtccttgacttcgtcgtcaagaacattatctgtaggtttggaattcccctaaagatagtatccgataatggaaccaaatttaatggcaacttgttcattgaattatgcgagaggaataaaatatcaaaagcttctcgtcagtatccaggcctcaggtaatttgacaagtggacgccgttaataaaaccctaaaggatactatgaagaagaagttagacgctgccaaaggctgatgggttgacgagctacctcaggtgctctgggcccatagaactaccgagaaaacaaccacgagacacactcctttctcgctagcatttggctcaaaagcaatgttgcctattgaagtgaacatatcgactcacagaaaagagtttcataatcaagaagaaaaccaagaacttttaaaattttcattggatctacttgaggaaaaacgagttgagtcgcaaaccaccaacgttgcatatcaacaccaagtaacaagatacttcaacaaaagagtcaagacgagtctttgcaaatacgagagatgcaacatcaggagtgttcaacccgaactaggagggtccatatgtcatcgaagtagtagttggagtcagagtttataaattggct

SEQ ID NO: 56331 - DNA, 1300 bp, Cannabis sativa
  modified_base (617)..(625): a, c, t, g, unknown or other
taaaaattaaaatgtccaaatttttaatacaaaataattaatttaataatgtaatttttatattataatatatacacgtttattaaaaaaatatataaatcggtttaattaggtttattctggttgattgggcagtctagaataatttataaaccacccaatatattcattatgcggtttagatttttattgtattattttgggttgtattttttgtcggtttattcggtttggtttagacggtttattcgggttggacgatttgtaaattttgttgaacacccctacgttgtagggtttccttctggcgacgtgtagatacgggcatcagtgatatgaaaattgccaggttataacatagattaaaactgttgtaaggtttcctcttggaaacgtgtagatacgagtgttagtgatatgaaaattgccagcttatgtcacagattggaaccgctgtagggtttcctcctagcgacgtgtagatacgggcgtcaatgattgatatgaaaaaattaccaggttatggcatagattgaaaccgatgtagggtttcttcctaataacgtatcaggcgtaggtacgggcgtcggtgacatatgagtaccgagcgtaggtannnnnnnnnctgattaggtgatgcaattatgtgacatgtgggtgtcaggctatggcacgggtttgcctaattaggcaatgcaatacaggattattagactaaagcatcgacttgcttgattaggcaatgtgatgtaatgaagatgattactttatgaggtaacatatatataattttatattattaaatgaatataattcccattattggtatgattgtattgtattaccagatatctgtatactgatgtttattcataacgaataccagtagtgatgatttcatcttatgaacaatgggtaatggtttgattttgattgtgtataaataatatattggaataataaactatatgattattattattgtgttttcttgctgagtccttgtgattcacgggtgctattataaagtatttcagacctaatgaacgacccaatcaccactcgggatgttctaagatcaattattacactaatcggtaatgctcttattgactttcctagtttaaaggtttagattggtatggatcactgttcatatcacccaaatattgtagtgtttatgcttacattgaccacatctatagggtatttcaaccctaatcaacgacccgatcacaatctagaatgttgaaactaaagaaaatattataattaagtgcaaattcaaaatatataatat

SEQ ID NO: 56332 - DNA, 765 bp, Cannabis sativa
cctacaccaaacatagccaatccagttctttcatccccagtattcagatcactcgatccacgtggtgcatggtgtatgcgggttggtcggaaggtcggacttgttgaccaacccgcatctgtcacgtggattggagtggtcgggatactcgagatgaataacatggtttatagagaatcaaagaagaacactggtttgcgtcatcctctagtcctacacaaagacaaagactgaactagagtagtagccttaaccccatttagggaataggacgggagtcgtcaaagcatcaatcacaccgcctgacctatccaacacaataacaactctaacagaagtaactccataaactacaaaaaagcgatacatgaatcacttaattttccatgttacatttttgttgaatattgtaagtagccatgtccattatttgttctaatagatgttcctatgagtaagggggacaattcgtatttgcgggttgtattcgtgccatgtcgagattcgtatataacaggtatatgctcgacttgtaggtcgatgactagctcgccttagcttagacccctgaactactaattctattcaaatataagttaaatcacataaaattaatagaggaaatacttcatatactattttttagttttttttttcaaatttatagtttggattgtttcggtagcttttatgtgggttgctatgtggattttgattgcgatttaggttggttgctatgtggatttttgtaaaaatacaaaaaaa

SEQ ID NO: 56333 - DNA, 814 bp, Cannabis sativa
  modified_base (206)..(216): a, c, t, g, unknown or other
ctaattataaatcatcattcttatcttgtgactaaaagatccgtagataaaggttttagtcacaaaaattacaatttgttgtaactaaatgtattgtttgtcacaatacttattgcgactacaactaaattagtgataacttgtatctaaactatgttttagtcacaagtaacattttgttgtaactaaaagtcatatttagtcannnnnnnnnnntattgtgactaaaaagttgtcaccaaaagtagcagtttttttgtagtgtttattagttaatatgtatgacacattatgcaatggtgtgggtgagtctcatgatactctttttcaatttattttttttttatatatatatttgaaagcgaatgccccaaaatttaaatggacttaggcttatatattctcaaggtcggtcttggctgtcgttaacctctattagaaatctcttaataatctcttaatcaacttctgcgcctaaaaacacatgttgaaatattttttttccaaaatatccttagccttatatattcttagggccagccctagctagcaaccgttaaactcatattacaatcatgttagttatcttttgtgctcaaaaatacatgttagaaagaaaattcaattattttttatggtgatattcattatagttttaacatcatttttataaattttttaaaaaattttaaagccgttatagtgtccaaaacaggtttagaattttttgaatacccgtagtaacctacaatatcagaaactctgtttttagtaatgtaaactttttaagatttttcaaaaatttacagagatg

SEQ ID NO: 56334 - DNA, 2016 bp, Cannabis sativa
gaggtttgtgtgaagtttggggttgaattgaagtttgtggggggatttttgtgtttcctgcactaaactagaattccggttcagggggacctataggaaccgaaattccggttggttcccaggaaacccctccgaattaaaattttgattggggaatcggtctaccagttggggcactttagggaaccctattttttcccattttttgcaatatttaaggtattttaatgttatccatcgataaggaaactttttgtttcaagtttaagtccccaaaaagtgatttagcgtgtcactcaccaattttaagaataatgtgatttaggagcctgtaaatcgtcgagcagctgttccactcaggttggctggcacacctaaattcagaagcaagataagattagtatactgatatgcatatgtgtttacatgtttaacgtacttgttagttaagcctgttagattacattataatagcgatattagtatatttagtattatattagatatcgataagtgtatcttgcttaggtactatttgacattatcgcatcggtacgactagggtatgactaccgtaccaagtataggctgatattatggtcaatagtattgtactacttgacagtatcacatcagtacgactagggtatgactagcgtactgagtataggctgatattatgggcattagtactgtctttgaacattcttgactcagtaccatgtaagacacggggatagggttatggttgggtgtatgtgcgcctgattataatatgaattttagttatggtattgtttatgcttttcttactaggtttgtcgactcacagatattgtctgcatgtgtaggtaaaggcaaggctaaggttgagcagctgtgagagcgagcggaagaagattgtacatgtcggggtggttaggcctggagcgtatgatctttgggacagctgagcgtattttgtatagttgctagcaagcgacagtttttgtactatgcactatgatattttgtaaagattttgtaaacgggattccggttttatatataagtatgttatttttatatttatcaatagttaaaaaaagtttaaattattcacaattttcaataaactcgttgattagcaacgagctgcataattaagttaaaaatcacgttaacgcgcttaagctagtaaagtgttacatattgtattttattacatgctgcaaagcaataatataaaaaggagaagcctaatgagagctattatgcattttactctttcttgaggtgctctccttttgccgatctcatatatggatgcaacgagctcgtaggcgatatgaagatagtgttccaagacatcgatgcttgaaattaataaagagaaagcaatggacaaatatttcaaattgtcttttattagttttgctagacattatatttctaaatgtgaactattattgtattattttgaacttaaaattattttatttggaacacatgtattgtacattattagaagaaatatattaaatttgatcaaattggacaaaaagatagataagctttataaaatatggcaaatttcactttgtaattgttatagataaggatactcataaaatagccgatccaatctaatctgcacgatccaatccaattcaatctgtaaagtgcggatatccacagttgtgtggattagattgcattagaaaattcaaaatctacacttgtgcggattggatgttgattgacatataaaagtaagtgattcaatccaattcacagctctttaaaaaaaattaaaaaaaaattaaaaaaaaattatatatgcaaataattttttaatgtaaagaaaatagtaatttaaaagtctaatacatgtaatacaattatatttcaaaacttaatatatcaaatgtaaatttttattcttatgtataagtttttttttctacatacaatttaaaataaaattaaacatttcttaatacatacaatttttttttctttctttgaatttgttat

SEQ ID NO: 56335 - DNA, 1347 bp, Cannabis sativa
  modified_base (47)..(58): a, c, t, g, unknown or other
tgaattggaagaaaaaagttaagaaaacttagtacaattaaagatannnnnnnnnnnnaaaataaaaattattaaaataggatgtcttttttgggagtaaataaaattttccccttgtaaattacctattttaatttgagaaaattacgctcattatgagattttaaaagttatttacttaaatatgaaacttttaagtttgaccaatttatatgattttttttttaatttttaggtatttttatggtatttgatatgtcatatatattgaaattagattttcaaagcccatatttaatgtttttatttgtttaggcagttttatttgtcattggtgctggaaaagtcgtcgaagtttgctgcggtaccgaaaaagccgttggagtagctattggcatcggaaaagtcgttagagttgatgctggtgctgaaaagtcgtcagaattggcattgtcgctagaaaaatcaccaagacaggtttcttgatgaaagaacagaaatctgggtgatttctcagtaattttttcgacactggaaattactccggcgacttttccggcatcgacaacaaacttcagaaaagttattgaaattggcattgtgctaaaaaatcaccaagaaatcgatacttctatcaagaaactggtttcttcattaataattcttaatcaagaaaccggtatcttcatcaagaaactagtttcttggtgatttttatggcgacaatgccaattctgacgactttttcaaagtttactatcgattctagaaaagtcaccggagtagctgctggtgtcagaaaaatcatcgaaaaaatcactaagaatccgattccttcatcaagatatcagtttctttatgaagaaagcagtttcttggagatttttcccgtgacaatgccaattttgacgacttttttgaagtttgctgtcaatgctagaaaagtcattggagtagctgccggtgttgaaaaaatcaccaagaaactttcttggtaatttttccagcgacaatgccattctgacggctttttcagcaccgacagcaactcatgtgactttttcgatgccgacagctactccagcaacttttccggcgttggtaacaaactctggcgagtttttcggcaccagtgataactctgagatcaccgtagtttcatttgttttatttttttaaaaaaaatataaaggaattttaatattttttataggaattcaaagtagtttatctcataagtaccatattttttttttctattaagttttcttaccataaaattagcttttttttttctcctatgtaattaccccttttaatttccctaactattatttgaattttaat

SEQ ID NO: 56336 - DNA, 2867 bp, Cannabis sativa
ttaaaaaattaattaaattaatatttattataaaatagaataaatatgattcttacatgttttacacgtaatcaccaaccagagtggcctggccgccatttttatacttctctgtcctcacatggtggctggggcttcctccatatataaacctctaaacgaaaaacaacaactcaagaagaagacccatttctcttcttcgtcatttctccatttctgaactcagaaccctaatttctttctgccatgaaatcgcaatcggacgatgttcttgccaatagcaacaacatcgacaatgacgggaagtccaagaaatcgatccctccatacatgaaggcgatctccggttcttttgggggaatcgtagaggcttgctgtcttcagcccattgacgtcatcaaaacccggttgcagctcgaccgaactggtaattacaagggaatttttcactgcggttctacggtttgtcgtacggaaggtgtccctgctctgtggaagggtttaacccctttcgctactcatttgactctcaagtatgcgcttcgtatgggttctaatgctatgcttcaatccgcgtttaaggattctgaaactgggaagattagtaatcatggtcggcttctctctgggttcggagctggggttcttgaggcacttgtaattgtgacaccatttgaggttagtgggttttgttccttttgttgatatattatggcctttgcatgtgtgttttgggttgtgcattttggggttcttgaggtttaaagttaatgtataatgaaaaagaatgaagtcaatttggtcttttaatcgaatcttttagttttcaatagccaaaaggagtttgaagaagtgaataatagattaaagaatgaaaagggtatgggagaatttgacttgactcaggtttattaattaattctatgaccaaatagaaaagattaaagcactcactttctcaccaatcaaacacggactaacccctttttcgttataggaagtacagaacattagtaaatacgttggaggttgactttggcactcagttgttggtttaagacaattaaggctttttttggagtagttaagaagttggttagagctagtttgttgaaaacagagagcaaaagagagttattgtatggagagttgcagcaagtgcttgtattgtacctgtgattgtgattgaggacttatttaatttggttaattgcttactctttggtgtaactatagttcattgtgttagaaccatgtaaatttactgcttaagtcttgtttgtttgttctgataatgattatagactttgagctgctctgcctctgttttggttcttataatgactatagacttttgggagttattcaatttggttaattgcttgctctttgatgtagatcattgtgaatggaatcatgtattttctgataatgattttagactttaagttgctctgtgttggttcttgaatatgatttagttaactagaaaagaaaatatcattgactcaatcactcttttgttaagttggacatgtatcgttggtagtatctttaagatggaaacggaatcataacattaggtgaaagtcattaggttgttctttgtaacttaaaatttctggctttacagtgtaggatgtttgtatgaaaggtgtatatatgaatagaacaaccactgtaataaattataggtgaattttgctaagcaccccttatggatgttcatctctgaactgaactaccggtacccgtttttgtttaatgactatgcagttgcttccttttcattttggtgtctgtctttccctatttctctctttattttcttgcttttggtgagctatgaagattcttttctttcaaagtagaaccgtaatctatttttctcccgacaaaagtacatttaattggtaaagtttatacttggataatatggcatttagtcatccactaggatcaagttgctgaactcgtgcccagctaaactcgtgttgcccactcgaatgattgaagttagagtaattgggaagaaaagtagttttccttttaggctataaatagttcacattctctttcggttcctaatcaggaacacaaaaataaaaataccatgaagactctccttgccattcttttctattataattaagtgatacagttttctctgttttccttttcttctattgtgagatcttaatattatcttcaatatactttttattggagttgataacaatgtaggttgtgcaaaattatttatgcaggtggtgaaaatcagattgcagcaacaaaaagggctgagtactgatctactaaagtacaagggtcccatacactgtgctcgtacaattattcgagaagagggtcttcgtggactctggtcaggtgcagccccaactgttatgcgcaatgggactaaccaggctgccatgtttacagcaaagaatgcttttgatgtcgtcttgtggaagaaacacgaaggagatggcaaagtcctactaccatggcagtctatgatatcaggatttctggcaggtacagcaggtcctgtctgcactgggccgttcgatgttgtaaaaacaagattaatggcacaaagccgagaaggagggaatttgaagtacacaggtatgatccatgctatcaaaacaatttacgcagaggaagggcttcgtgccttatggaaaggactactccctcggctgatgaggatcccacctggtcaggccattatgtggactgtggctgatcaattaaccggtttgtatgaaaggagatatatggtcaatgcagccttgtagctgaggtaaacatagatttcattatcattctattgaatcatttttgaaggtcttatggatcaa

SEQ ID NO: 56337 - DNA, 1119 bp, Cannabis sativa
agttttggtggggttcaaattcttcatctcgggcattaattggaagacttggaaggctcttacacagtcaaaagttgaaggaggtatgggattcaaaagctttgtccactttaaccaggctcttttggcgaaacaagcatggcttcttctctcgaatccaaattcactcctcagccgaatactcaagccaagatacttcagatcatcttcattcttggatgcaaatttaggatcccatccttccttaacatggaggggtattgtttggggtaaggaattacttgctaaaggacttcgatggaaagttggcaatggagaggatattctttgtgcgtctgcccctggcttccaggtcatacatcctttaaaccattgcaatttcgtggaaataatgcagcaatgaaagtatcagaccttattttgaattgtcggaaatggaactatggtctgctgaacacactatttctgccttcggatgttgcattgattcaaagtattcctttaacttttattgagcatcacgacactatgatatggcaccatgaatctactggggtttattcagtaaaatcagggtatctactagccactaaacttgaagaacaacagcctatgtcaagtgggaatcaagctcagcaatggtggaaaaaaatttgggggttaaagctgccttctaagatccgtatctttttgtggagggccattcatgattgcctaccagtggcagacatccttcatactcgacatatcgcggactcaagtcaatgtactctttgcaacagagctaatgaaacgattttccatgctcttttttactgtaaatgtcccaaaaaggtgtggcaatgttcagatttccgtttacaatctatcctttctcgtcacatgaatttgaaggaattatttctccaagtctcctcagaatggtcttctttaagattagaacagtttgctacaatactttggagcatttggactgaaagaaataaagaaaggcatggttctaaacccaaacctcatgatgtcctgctgtattttgctctcttttatatctcgtagtatcatgatgttcacggtaggcaacctgctacctcttcggcacctgcagctggtcacaacaca

SEQ ID NO: 56338 - DNA, 950 bp, Cannabis sativa
agaattttagttatataggcacactttatatagaatagatatattattttgctggttttactcagaaaaaccggttagcttcaaaccctaatcaaatcgtttccaaacacaaccaaactttccagacctgcataatacactccaataaacattttccaagtgataaaacaactacccatattcagaatcgaattttaccattaaagagctaagcttgagttctaaaacacaaagcttgctcaaacaacaaactacctaccaaaacatgctcaaatcaacataacttaacatattttaacttcagaaaacataaataaacacaagtagcaacaacaacaaccaattcctcaagacatgcataatccattattttacaattcaagacatcaaagaaagagttgtaaaaaggttaacttggcttggattcacttgaaactagctgaaagcacttaaaattactgaagaaaaattcaaaccctagctggttctatgggtttcgaaaatgagagagagtttgagagtgaaaatgtaactttagataattttcttattatcttgaataaatgagataatagcttcattttactcaaatatctcaaccaataaatcataaaaaatcagatgaacttatcccacaaaaaggcaaaacacagcttggtaaaaatgactattttgcccccttcatacttaaaatcactaaaggtcactgaggggtattttgggaaattctaaaatcccgactattcccgacattcccaatgtcaaaattattgtcccgttatactaaaaatactaagatgtgattataatagccaaacaccgcgttccaatgttgcggggcacaaaccatgcaaaattatgaaatttctacgtgtgacataaaaatgtattcagaattcaaataaattatcataaataattaattcaatattaataaataattttcataa

SEQ ID NO: 56339 - DNA, 854 bp, Cannabis sativa
ttttttttttttttttttttttttttttttttttttatgtttggataattataatgttacctttctaattctataatgttataatatagtgtacttataaccgtcaaaaaaaaaaaaattaatgctacattagtttttttactcaaaaggttataaggttgttttttcaataaaaaaatgtatctatgatattagtttttctttttattattaaaataatataaaattatttagaaaaaaaaaataagaacctcctttttcattcatacatttttcatgattgaaggatttttttttagcacatctcctattttacttagggtagggagtatgttagctaaatatattagcatgcacaattaatccatgatgttctaactatataaaaaaaattaacaaatgataaaaatcattaaaaactttcatttacacacacatgaattataaaagaagcctttaagtgtttactagtgtagcggtagggaaatctttactttctttttgcttgggttacgggttcgaatctaaccataaccccttattgggaggggttatgtttgaccctttaggaggctagcttgatgtggcggtaccacatctttaatgggatgagaatcctcatgagttgcgtaccaatgacctaatttagacaaaatgaagtataagactcttataactagcacagcatttccaaaattgtcaaaactactaaaggagtgtggaagagatcttcattatgtgatttttttttaattaaaaaattatgaattaattaaagaaaataaaacatttcttaataataataatgagtatttttacaatgaatttcttaaaaaatgtctaatttttttttt

SEQ ID NO: 56340 - DNA, 766 bp, Cannabis sativa
  modified_base (55)..(79): a, c, t, g, unknown or other
  modified_base (178)..(184): a, c, t, g, unknown or other
tcatgaaataaatcatgtgaaccctgcaacataaaatgatttttgatctttattnnnnnnnnnnnnnnnnnnnnnnnnnatgggttttatttagggcacaaacgggacaacgtcgaagtctctcttcaatcgaataaaaggttactagaatggtgtccattttagatgagctgactannnnnnncaatgaatgatatatctttgactctacctaaacggaacacactattagtttgttggaaaccttataaagtaattgaatatattttaattttggtatttttgcaaacatatttgctttacttgttattttctaaatatgtgtatgaatttatttgaaccaagtaatttatttttatttattgatatttgtagtgttaaaatgaactacccacaccccaaccctcatttattatatgcctttgcaaatgaactctctagtgcgaagatgtcccctggtcagagcgtcattttgcacgtacttttgatgaacttaaatttctagaaagcaaatttgttgggaatttttctatcaaaagaataatgggtttagttcattctaaacagtctttgacctaagtataaccaatttgttatatcttacatgatcagaaactttaactcgtctgacatggataagctagaagctgaaatgcatgcttatgaacggacattgtcacttgcaaggagggctcgctccagagttgcaaaaaagggcaagaggaaagttgaagatattgaggatgatactgttggaaattatttt

SEQ ID NO: 56341 - DNA, 1123 bp, Cannabis sativa
gatgaatcagtcgaccggttcctacaggtctccctgaaccggtcgaccggttcagtgtaggaaaaactcaaaatcttctacacacctcaattcgattccaaaccacccaataacttttagatcacctatatacacaataatatacacaatccatgcaacaaaaactagaaacaacccttgaaacttaaaacaccgttaaagacctaagtttgtgttctaaaactcaaaccttgtctaacaaccaagccaagcaaaaaagtaactttactttacctcaaataacataatcttaacttcagaatataaactcaatcatcaagaacaactacaacaacccaaaatccaaaatcaaacacaaaacctagcatagaatttaggaaaaaacaaagagaatggcccttaggggtttaccttgaaatgatacactaaaattctgctagaaacctttgaataatagctaaaaagtctagaactccttgctgccttcatgagagttcgagagagagagactagaaggaaggaggtgtttttcttaatttctaactagtaaaagataaacataataattctaagtatatactaactaattataatctgattaataaagcttggaataatttactaagtaactagaagacaaaagctaacaaatggcaaaagactattttatccttacacacaccaaaaagcatacatgccacctaggagtatattggtcatttctaaatcatcgaataatctcaacattcctaatatctaactaagtttccctgctattacaaaaatactaaaaagtgattgtattggctacgcgccgcattccatttttgtagggcacaaaacatggaaaaacgtaaaattcatatacgacataaataatacaccttgaattcaaacaaatctccataagaacataattcataattaatattctaatttcataattaaaccctagttatctgctaattaaaaattaaagttaagcggcctttgcaattatccccccattaaaaggatttcgtcctaaaaatctaactgaacaactctagatattgagccctcatcttagaatctaactcccagatggcttcctccaccatactatttctccagagtaccttga

SEQ ID NO: 56342 - DNA, 1784 bp, Cannabis sativa
tccttcataatatttcctataatcaaattattttgaacacttgacattctttacaaaatttgtggggaaagtatttcctttcttttatcccttatttaatcaagttctccatttcctaattttaataatgcaagtaaacaaatgtaaaaaaataattagcttactattgattcacattacttattatctattctctagttgtttcttttactttaatttttttttattaaatttataaatataaataatatttttttttattttctttttatgtatatttcttttaaaaaaaaaacttaaatatctaactctaaacttttttctatttttaaaatacacataatcctaaatttataaatattataaatatggatgactattcaatgattacatttttactgtaaccatgatagttatattttttttacttgtaatagcaagttaccaataagtaaaaaaattcttttttagaattaaattaatcataattaataattttcctaaaataattaattttaatttaaatatttaacaagaccccaattaatatttataaataactttatatttaaatttaagtccctattataatatttttaacatttaaatcatttaactataatatttacaataaaattttattttttattttttacaaaatttagacttccaccccttctaaaataaatttttgaatacttaattaatctttaaaaattacatataattattatttgcaacaaccgcttgacccatcttcctccttcataaaaaaaaaattcaaaaattagggtgtttatgaatttaaggttgtctaagtacgtttatgatgttattgtgagctgtgaagtttgaatttaaagaattgagtttaagaactcaacttttactctttaatggtgaatggacaattttgatgaattgttgagtttttattgtttaattatattgtttttatgttattggactattctggaaagtttgaacaggtgtggtggagttttggatcgcttttggtgaagaaaaccagaaattttcttacctactagaatcggtcgacctgtcctacaggtcactagtgaaccggtcgactggttggtcagcaggggaaaattctagtttcctttgagtttggtttttggctcggggtgtttttaagaatctagtttagtgtattttagagatgtctaagctatttttgagctagtggggattagggtttgtccggttgagcagttaaggtttaattcagagttcgattttgatggttaccagattttgttgtcatgacataggagatcatcgatgtttgttccactcaggtcggcatgcacacctgattactagactgaagtaagaaagctaattgcactgctaagcatgttaagtgaggagcgattatcatcgtttgtgactcgattatgatcgaggtaacgatacggtcattaccgttattgagaatgggtaaagatacggtcattaccgtttattgtgaatgagtaattactcgcttaaaactacaaatagttttcttacttatcgattgctgtattaggcaacgatagtgacatatgtagctcgtggatgacgagtggtaagaatgctttatgaggcatcaagaacagtttgtcttattagacaaatagttttcatgtaatgcttgattatgtgttatataagcgtttattgtgaatgatgaaattgtatgctatgcactgttatgttatctcgtgttatatattgtttgtattttaattgctttcttattgagtctttgtgactca

SEQ ID NO: 56343 - DNA, 2711 bp, Cannabis sativa
taaaacatatattacatatatttattcttttgtaaaaaagaataaaaatcatattatgaaaatcggtaattttataatatatattgcagtgcaatttaaatcgtaattattaaattcaaaaccgcactgtattggtgaaaattcaaactacaaccacacctcaaagaatttcaaactgcattttttatgcagtgtggtgcagtgtaggtggtttgtgcggtgtgagcggtttgatgaacacccctacaatatatgattcaagaatatatttgtgagaataaaaatatatacacacataatacatatagataacaaagaaaaaaaattaaaagagttcatgaaattatttcaatcagaggaatatttttttttatgtatagtgcatcgtgaccttgaaacaactcaagaatgttataaaactattataaataatctaacatagacaataaaaaaaagaaaaaaagaaaaagaaaaagtgaatgaaattttttcaattttttatttatacaattaatgtatgagtcatatattcaaaaactaaaagaaagaatatttattgtaattaataacaattaataggttatatttagtacatatattatttataacaattcacaattctcattctcaattttttttttttttttagaaatcaaattttaatttttttaacgtagacttcttaatttattcaattcaagcataagaaaataaaatttttacctacgagtaggggtgcacatttatactcgaaacccaaaatccacctggctcaacacctcaaaaaaatgggtttcaatttcagtagattgagtttaggtgtaacccagttctttatcgagctgggtttgggtttaaaatttttgaaaactcaaaacctaaaatttaccagtaacccggctagtattttatttatttatttattaattattttttttatgtatatattatataattatattatatatatgtctttttttaattgtgaatttatgagtgtgtgttgaattgttaatgtattagtttatgtaatttgcatatataataataatatattgtataattgtattattttgtagttttttgttaaaaaaagatatatttatatttaaaaaaatacttagcttaacacaaaacccgacccaagcccacccgagctcgccccaatccgaacccaaaaatccaaaactcgttaaaacccacccgatgtgtacccctaccgagaagtggtatggaagggtgagtatgaattggaaataaaattttggatttcaattttttctatcttaaaattcaaaatctaaacgaggcattataattttttttattaaatgaatatggtatgtattctattatgaacatttttttttatttcttgcaactattgtaagtaactcctttcaaaataaaattaaaaagaaataaaatggtaaagtaaccactactagaggaaacctccaatacccgtcaactaaccggtaaggacgccttaacgggacggcaacttccacgtcaacatcgtcgtgacatgcacgatgcttaatgaataaagaagaattctatttatacccaaaatacccttcattagtctactgcaaatcagtgaagtataaggatacttacgtaatttagattcccacctaataagaaaaatatattattattattatttttttggtttgagagtagtaaaaggaagttgcagagaaagtgctctggttaatcaccaacaagagacttaggtactgattcgatctctcgcaattactcatctttttctttttcaatattcttatttaatttgattgtatagtgttactgatcatcaccatttacaatttcttttagtttgtaaattgattggattgtacagtgaatttttttcagaagtcaaaagcttcaaattcttgtagtgccatgaattatgtgattttcaagttcttatttatttatttggatttttcatgtactttaagtttaagagcttgggtttaatggaagatttagtttttgaggttttgttagctttcatatgaacaattttggtctaaaagcaaagtttcatcagatttttgtgtgttagagctgtataatggttgcaggtatattctataatcggatacaatagtttggaaaaaagaatgttattatttattttcataatcgtgctctgtggataattatgaattatgttcacaagagagaattaatctttcatggtgacttttaattttgtttccccttcataaattgggtcatttgaagtgattttgtttccgaggtttatgggattgagttagttggcaattttattgtgaattatactatttcatgatgtaaatttttattttttctctagtgttttatattggcatttacttgttagtgtctggattttggatgtatattaatcaatgaatctttttagatagaatcacgaagaatatgctcatttgtgattaagggcttaaatcatagtcatggattcagcacgaagttggtttcagaaatttcagcctagatcaaagcttgtgccaacaaaaaagaagggtgcagataatttaaaagatgcaaacaagcctcctattgatgatgcaccttcaaatgtaacaaaacaaaaagttgaagcagctaagcagtatatagagaatcattacaaatctcaaatgaagtgtttgcaagataggaaagagaggtaggtgtgtcaaatt

SEQ ID NO: 56344 - DNA, 1136 bp, Cannabis sativa
cacaacaacaatttgaaccaaatttgttggcagaattgagatatccgccaaacgggccttggccttccaaaccgtcagtctagaggattgtcccagagacactggcatgtcaacttgcagggatacatttgcggagatcatagaactcccctgcttggtcacttcatcactatccagaggctcatcttgttgaaaattaatctcttggccacctcccaaggttctaatctcatacaagtccaactttccaaaatgattaagctctagtagcaataaaaaagaataaggaagaattaaaagaaaaaagttaaacaaggccttatcttcattggtagagtaaacagccttctgcccaatatttaggaaatcatattggcccaattcattaagaggagtgcacggcccaccatccgcctgagcactaacaaccaaaggcccaccaataataggccctttaccaacccgatccgtagccaacccaccttccacaaagcaattctccacaagaggcaaattcccaagtctatttggaccatttccaacaacattcggcccattagtaatattgaccggcccaaagattcctttaccacatccaccattcaaaattgtttgtgcacacgaggaacggtcacctgggttttcctctaaaataggaaaaatttcaagaagctttccctcctccttaacgtcaaaaggaaacttattacccaacagagcaatagtcatttcacagtttgtaggtttgtacttggactgccaggcagcacgtagggaaaagcctagaccagctggctttcgagaagtcaccatcttcgcccttctcgattcgcggccaggcccaatcctcaccgccggaggcgatcggagcatagccacagatggagaaatggtcgagaaattcagtcgaagagcaatgagagctccagaaaaatatcctgggaggatgatgcagatggtatccacggtccgtaaagaggaaacggggtgtcaacactaatcaccagcgtggccggagaacaaccattttcaaagcacgacacaccaggaatcgcactgcagtttccacttcgactaaagctgcagggatgaagcaaagggacgatgtgaagaaaaaacagggactgaactcaagc

SEQ ID NO: 56345 - DNA, 529 bp, Cannabis sativa
ttttgacagatttagaaaatttaacacgttggaaacaaagtttaaacaatttattacatgcaagattattttattttataagtatgtgaaatagactatttaaatattattttcagcatgttaattttatttttatttttttttattttttaaaattttacaaaatgtcttaaatagctacaacatagacaccatgaaaaaaattgaactaaacatatttccaaaataccaaaacaaataaagagtgcactatataatttttcaatcttaataattaattttttttaattttcttctgttttttgcagatttcttatggcaagtggggtacacaaagtgcttgatattagccaaatagaaaaatacgagaaaaatggacaagtaaattgactgactgctaagtcttgtgatattgtgaagtatatatattgggtaaatacaatttggaccctctgttttgcaaaagttaccaattagaccctgtgttttgttaaatgacaaaatggatcctgtattttctaaaatagta

SEQ ID NO: 56346 - DNA, 1161 bp, Cannabis sativa
tacaaaattgtaaaatgctcttaaaaatattgttccaaatacatgtctatatattgttgctccaaatgagaggttacttcaaattcaatgagccagcatgtcataaatataacttcaatttctttctttcttttttgttcttaaatacttgaaaaatattttgtcaaaatttgagtaatatacacttgttcaaatagctcacgtaacatatataattttttaaaatcacacaaatttagcttaacaaacgaataaatataaatagttcatgatataacttagcaaaaattaattaaattaatatttaaacatcaaaatctaatatattaaaaaaaaaaaaactagttttgttctcctaataaccaacaattcgttaatgtattacattaattataattagtaaaaaataaaaaagaaggatatacatcatatataggaaaaatcaataatgtggtaaatattattgttgaataatgtatatatatttatatttatttataggaccgaaaccgaccattttttgggatggggtcggaatagaagtagattgatgagaaagaatagcaggtagtaaatgaaaaagcttacttatatatattatatataaatatataaaatattttatatatatttgtgtgtgtaataattaataaagttgtattatttgaatggacagagacaaatatatctctgcagaattgccacaaataatttatatatatacatcttgatatttattaatatagaattttctcataccctagctatatatgcatgcagccatgcatattaataatcttgttcattttccatgtttatataataatattaatatataaaaatccattattaattctgtatttttgttttttggtttgcattatgggttgtggggttatatatttatgatagggttcagttcaacccctcttggctaataaaagtaacatcaatttatatttgtatatatattcgggaagtattgtgagtgtgttgtttgaagatgttataattttattatctaaattttgagagcagttttatccaatgtcattcgtgttttagcagtccattttgacaaaacatatttttagattagacgatgagttattttggttcgagagaattttcgctctgatcgtaatatatatatatatatat

SEQ ID NO: 56347 - DNA, 887 bp, Cannabis sativa
aaatatttcccaatttgaataattacagcttttttttttttttttttgcctagaaatattttattgaagaagctagaaacaataaatttgaagagtatttgtacacatttattatacaataatatgtaataaatatagttaaatacatttttaagtgggactatattattttttaatatggttgagattaattatatatcattatatgaaatatgtttaatttgagtgtgtttcaattattttccatcaattgtgtgatgatttcattaaaataatttggtctaaacatctcgtgaaataattttaataaagaaaataattttgaaatagctactaaatagatcagggtatggatctcgtgaattatcttgaataaagaataattaaaaaaaaaataataaggttgaaatttttggttctcgaagaatctcatcaacttaggtttttttttattatttttatttttatttttatggctacaaataataataataataataatttaataaaaggatttaagaatctttgaaccaattttctggcaaagcaagaattgccaactaagtttgaattgtaagatttggaagctaataataataatgaaaaggaaatgctctcgttttcatattattatgttaagacaaaaatagaaagaaatatatcttccttgcaaaataaacaaataaataaataaatagatagataaaatttcttctgtcttgtatggttgcctatgaactacccattaattttgccaacttttccctgttattatttataagcttaattttttttttatttttatttttagtatttggacaaaatatgcatcaacataatatacccggtaacactttatattatttaggaaatttacaatgcacttc

SEQ ID NO: 56348 - DNA, 973 bp, Cannabis sativa
gttgtatctccatgcaaggaaaaagcaagtggaaggttacttttcaaatttagaatcggattaagttcatttttttcagaagacataaaatcagttctttttttcttttttccttttttaataggcttggaataatgtttttttttttttttgatagatttgtgatattttttaattgttggtgtttttggatgaactaccatatttatgtttatattgagatgcaattaactagttttactgtttcttttttgcttatatattatggtgtacttatgtatagatacctaattttcttactttcaaactctagtaaccaaatattaagtatatagaattcaataactggtgttcttatagtgctacatttattttaaataaattattacaaagattaataaaatattatttttattttttaatgttttgggtaaagaaagaggatacatagttaattatctgtgaatttaaaaatactaatataatttgtacttgttgtatcatttttaagatcaataaatactgagtagtatataaaaaaaaaatatttgtatacctaaaatacttgttagtattcttataaaattaaaaaaaaaaatgctaaagagtatataaacaataaataaatggtacttgcaagtataagattatttattcatactatctattttgataataaaatcttccaaaaatgcatgtctaattaggcaagttcttctaaagattgttgaagccgtagctctcgaggaagtgttatcatggttgaagcacgattttctgtatagtattatcgattctgacaatctggtactggtacaagctgttataagtttgaatattttgtcatcaacttttggtggtgtcgttgaggtttgtaaacatcttttatcttcttttatggattctttacgctttatcaaacgatctgctaatcaggctgctcatcttatggttagagcatcttatttatatg

SEQ ID NO: 56349 - DNA, 1417 bp, Cannabis sativa
tgtcactaatattatctatatgtgttgatttgtttatcatattatatattttttaattttattttcttattttatattttagtattttatgttctatgtgttatattttgttgtacttttattttttttccaaagctgtatatgtctaatactttacactttatattggtatagttttcctcatggaaaatattgcaaaacttaactttaaggcacttgatattttgggaaaaaaatatttatcatggattcttgatgctaaaatctatttaaatgctatgggttttggagacaccatcaaagatcaaaatactgaaacaaaacaaaataaggccaatgctataatttttcttcgtcatcatctccataggggttaaaatctgaatatttaacagtaaaagcttcttttgtgctttgaagatttttgaaagaaagatatgaccataagaaaactatcatactgtcaaaggctaagaatgattggttgcacctgaggttgcaagattttaaatcagtaagtgattataactctacaacgtttaatatcacttctaaattactattgtttggagaaaaaattactgactatgaaatgttagaaaaaatatatactacttttcatgcctctattgtgctcctgcaccaacaatatagagaacgaaattttaaaaaatattcatcagaattgatttaatatcttgtagtagttgaacagaataatgaactttggatgaaaaatcatgaatctcgcctcattaggtctgccccactccctgaagtgaatgctataatttctgacaatcataaccatggtcgtggttttgatcataattaaagtaatagacatggtcgtgatcataatcaaagtcgcggtcgcggtcgaaataatatttggcatcataatggtcaaataaaagtttgtatactctaataaaaagtacaactactgagaacaagagaaaatctcaaaataattcgtaaaaattctgaaaacttatgttttagatgtggaatgaaatgacactagccacgtacctgtcatacggcaaaaaatcttgttgatctttatcaataatctttaaaagggagggagaaaataaaagcaaattttgcctattaagatgatggtcttttcaaagagcctttggatattacgcacttggatgttgcaaatttttttaatgaaaattccatgaatagcaacatgaatatcgataatggagatgagaatattcacaattagagtcacttttctttgttttgtatttttttattgttattattatttatttattttaaggtgttttatttatttaggatgtttatgtagtgaactttaattgtttaagtatttatattttaaatttattatgttttttctttgttgttagttaatgaagtaatagacatttgtcat

SEQ ID NO: 56350 - DNA, 1118 bp, Cannabis sativa
tagttagggtgttacattaacattgtcgtactgttaactttttcaaaagtgtaatatataaaaatttataatatatatttgacacatttaagtattaaaatatctattataaaagttttaaaattcgcatcaaatattaaatacaagttattatcattaaagtaatcatatcttaattcttcttcattctctacaagggacctgttagttgtcctcttttttcttgcctttttatacccttgttcttgactatatccccttcacttcttttttaagtaaaaaaaaatgaaaaaaataagatgaagaaaaaaatttaattgttgaagaaaaatgtcttagacctaaacacatttagaaaatgttagatataagaaacaaatttatacctgtttttcaacagccacattttcttgtgattgttgtcccttaggatttaatatttgttcataaacaacgaatcagtcagtttgttaaatatttgtatataactttatatttcaataattactgaaagcaacataaaataaataaaaatcgtagcatataaaatctatgtactacaaacccaaatagacataccatagtggaaaattaatatacgatcaattttacatggtcaaaaaagaatatacattagcacacaataaatataccacaaatttaaaatgatataccaccattgattatttttttacttatttcttaagtagtataccttatcacaaaataaatatataccattgtgcaacataaatataccaaacttaaatcatcataaactttttgatctaaatattcatttttataccagcatcttaacattttcctgtgctttttgttcctccacaattattgtttggtcctaacaatcaaagcaattcttgtaacttttaatgtttaataaaattatattgttggtatatacaacaagccatagaaacgatatacattaatgaatatactccaaacttaatataatattattaatgtagcaagagtttattctttattccttaatatatcctatgacaaaataaatatatactatagtataaaataaatataccaaaaagcctgaattataatatacacagataatttaaatgtttatttttata

SEQ ID NO: 56351 - DNA, 1235 bp, Cannabis sativa
  modified_base (26)..(52): a, c, t, g, unknown or other
tttctgatcttttattaattagtaannnnnnnnnnnnnnnnnnnnnnnnnnnttagggcataaaatctcaacataatatattaaccatgcctaatctaacgtggtatactttcgtgactaccacgtaccgggcatctgggaatacagaaaacaatagtatataatatagtgtatatatagtatatatactataaattatcaattaattatttattgtaaataattaagcattattttgggatatttatttggattccatagttatttatttgaatttaaatttaaaataataactattttaaatatataataataaatgattaaataattttattattttatataattaagacaaaataatagagtttaagggatatttttttcttcaaaaaatttaattttgaattaaataaatataattgattttagggttgaaattcaaattaaaatataacaccaaattaagataaaaattatcttaatctaaaataaataagaaatgttattatgttaagataaaagttaaatgataataatgttgtcttaaataaagcatttaattaagaataacttaattaaaattattttaattaattaaaagagtttaaaagatgtcttaaataaaaggttcatttaagaatgattaattattttttttaattaatttgtaggcttacgatgatcctacaaaattataaaaatatccttgcagtggtagagattagttttataatttattttctaatttttccaaagattgtaaaattagaaatatccatttattactcggtttatcatcattattttttattgttattttaaataaatattcattaatagttgattaataacatactcatgcaaataacatgtcatacatagaaattccacacaattatattatcacgcatctcatagtagaaacatgatatattaggattgtcatatgtatttatgtgtttactattttttaaaaccgaaaatatgtaaattggccaagattaatttagaattaacttggtgatttaaaattaacttatttatttaaaataattttaaattatgaattaaaaagttaattcagatttaatgattatgactggaaatttatttataactacaaaaattatatttggcaacacctaatcaacaacacttaataaaaaagtgttgtgaatttatttctttatatagttgaacacacttaaaattaaagtgttgctaaataattcata

SEQ ID NO: 56352 - DNA, 1074 bp, Cannabis sativa
cctcaagtaatggctgagtgaccttccttaacccatggtcgagtgaccttactcatgccaaggtcaagtgactcatgccatggccgagtgacattcctcaagctatggtcgagtgactttccctcgggcatgtcgagtgactccccctcgggcatgccgagtgactccccctcgggcataccaagtgactccccctcgggcattgccgagtgacacattcggggtaactctttggatgtgtcttcgctaatctcctgattagttatcggctaatctcgagggttagccttacttatttggggattaacatccactattcaatattttatgtgtatattttgtttagtattgtaacattatttaatattttattattgttgttttattattttactttgagttgtaatcttgtaatttatatttttattgaagcatgacttttttcaacgaactatgttttctatttttgaaattgataaaaaatatataaataaatcttttccttttttataaattaattagtataataatatattagatatgataaatagtataactaaatggtaattttaaaattaatgtgatatattgtacaataaaagtggtgttccttggaaataaaaaagttcatttttttattttttaactataatataccttaaacacttattaattaattaatacagctcataatttaaaactacaataatctatttaaagatcattttatttattttaaaatggatactagatacatgtaacattgatacaagaaactgcgtttacatatatacttaaattatattatttcataaacttttattataattaaacttaaatgggtgtatgtgccaatggcatgttaacaatgaccgtaaaatacaaattccataatacaaatagaatgcgttcattaaatttgaaatactaaaaaatctcttgtatcatttaactttttcgtacgatctctattgaactatagaaactataacaaatgtgtcattttttatatttaatttatttttttaaaagtatgtattgatgtaacctaaaatattgtcactttcattatgg

SEQ ID NO: 56353 - DNA, 1198 bp, Cannabis sativa
ttttctatatagtagaagtttggtaaaaagaaaaaatttattaaaaggaatacaaaatatatgttaatagttaaaaatccatatagcaagaaaaagacacatgtagaagataatcttgtgcatatgattacatacataataatctagatgttggcaattttttataaaagactatctatctctatatatatatatatattttttttttgtaattactatatatctattttttgaacaagattatatatttttttaaataaaaaaattatatatatttttttgaggcttctatttttatactttaaaatagtttttttttttatttatttattttttttttatatttttacaaaattctacatagagacattcatagtatggagcaatctaaattacaatcaaaatatacataacaatccacatagaaataatcggagtaattcaaactataaatttgaaaaaaaaaattaaaaaatagtatataaagtaattttcttatatttttttgtaatttctttgataactcgtatattctttcaaattaatatttactcttgtatataataagtaataataatttaattatgttggttaatgacacttccttcaaatagataaaaaaatttaagggtatttagtatgagatttaaacttgatgagaatgagaatgttaaattacaatcaattttaataactaagggatttgtgtttttatgtggatcttactttttaaattaaaattgtggtaatgttaatctcctccaatacatgagttcatattcacttcaattttattccttccagctctactctctccaactcaaacttatataacaaacatcacatttggcagtatttggttgtaagacatggaaacataactagttagaataaaaatgacattctaatactttaaaataaaaccaaataaaagaatgaaataaaaattattttcattccatttaatctcattacatacaaaccaattgctaacttagaacctacctaaaaataaaaaataaatgataaaagaaaagaacttgctacgagtactaagaaaaaaaaatacatgttaataacaaaagatagccacatatttgcctttatatacatgtataggatcaagtgcactaatactgtacatatcattaactacaaaaaattttatttttagtcacaacaaaatttctgactaaaa

SEQ ID NO: 56354 - DNA, 812 bp, Cannabis sativa
aagatgcaatcatatatacaccaactatcgttctaactgatatgccatacatctggcaaaaataaacataaacatgtacatatgtatgtgtgttatactagacttacctgaattttgatttcaagtgtgtcggtcaaccagagtagaaatagttgttggtaatcggaggccctaagtcacatttctaacaaaaaccaataagtgttgtcctaacactttcggggacttaaattcacaactaaaagtttccatattgataaatatcatgtaaataccctaattattgagaaaacactcaatcggagtcttgataaaagtcttaagatggacctttaaattctacctaaattggacggttcaaaactccactgtctgattttaaaacttgcataactcattcatttataatccaaaccttacaaaatttttcaaggtacctaaaaatatcataatgaacatttttcatgaaggaacctcaatcgaattctcaacagaaatcaaattaaatggccgtcctaaaactgcctaaaacggatggcccgaaacctccctgtacgaatttggaaatcccataactcatccattactgatccaaacattaccaaatttttcagagcatctaaacacatcataatgaacatatttcatgatgataccttacccaattcgcaacagaattcaagttcttacaaccaagtcaagtttgtgcataacttttactacaaccaccaaaacacttaaaaccacttctaaacagtcctaaataaccttaagaagcttttcctaacctttataaacttcttcaacatgtt

SEQ ID NO: 56355 - DNA, 929 bp, Cannabis sativa
agacgcctgctgggcacgagtgcgagtggaagggcctgttggagttgaggtagaaacttccttacttgtagcagtaggaggagatgcagtaggacaaggtggagacccctttgatgaagaagacgatgaagtgcaaaatttgtggggatgcacagatttccttgcaattttcttgggaattcatttcggcttgggcttcacaggctaagattcacgctgaggaaataatgaatctccttggtttgatgcagttgtagcagcaggctgcaagattggagcagcagcaggagcattcaagggggctggtttggattccaccatcttgttgggatgccctaggttcttagtcttagccatgaatttctgaaagtaagaatgagaaacaaagaagcaagaacacaaagaagaggaatcaggtaggtggtgagaataaatgacaaaagaaaaattagtttaaataaacatgagagagtggagcaaaaaaggaaaccaatttcaaaaattgagtaactacctgcccacgaacatcaaagaaaatcgccctaatctttttccaaaattatttttttaaaaaaaataaataaaaggaaactagaataaccaagatacttttcaaaaataagccatttgagaaaatccttcaaaatcaaggacaaaatactatgaatatgatatcaaactttaaaaggtaattcattaaaataaatcaatttagaataaatattgatacttaccaaacaaggcacagaattttcttagcccacaattcaagttaccaacgcctcccctcttttatttttttatcatttttatttttaaaaattcgaaacaaatacaaaataaaatatgcacaataaatataaggtattctaaagcaagcaactaatcaaaattcatcacaaatgataaatatacatgttatgctttca

SEQ ID NO: 56356 - DNA, 741 bp, Cannabis sativa
caaatctaagccatttcatgcccatatgagttaagtctttgttaatttccttggcggattgaggtctctagggtgaaaacactcacacgggcctatgaaccctagtttaggcacacttgggtgtgagagtcctggcaccaaatggttggataatatttttgagtcctttagaggtgccatgggaccctcaagaaggatgtcttaactcatttgacatttataagtcttggtcaaagttgcaagattgacttttttaatttttcaaaaatcgagtataataataataataataaaacctattaactcggtgatatgtgttttctttgatttatgaattatttttttggaaaaggccatatgcgtgcaatgtatcagtataaattactttaaaaataaaatgtggccacctctaggaaagttggatattgtacacttatcatgaccagtaaagtttgatgtgaaattggttcaaaattaataaagaaatattaaacaaaaaatatatcacatccttttaattttttgatgtctagcattgttggacatgataaaatattattcatgtccaacattttatgttcagcaatgtaggacatgaaaaatcctaatatccttttcatgttaagtattaattttgttggacttggaaaatattttttgtagtagtgttcaaccgccattgtagttgggagacaaatttggtttcctcttggatcttggattcgcaggtcctttgttggc

SEQ ID NO: 56357 - DNA, 674 bp, Cannabis sativa
agttggtcttgaccttcatattcaatgatgttggttaggttttgagcatttggtgtgcaatgatttgttgccccggagtctggataccatttggtgtcttctgtctgagttgtttgggcaatattggcctgagcagtaggggaattagtgccttgaaagacccctgtgaagcttttatcgaacctgtaaaaacagtcaatgactgtgtgtccaatcttgtgacatagttgacactggacacgattacaggtgtgggaaatcgactgcctctgttcataccagaaacaccacgtccattagagttagcaggaaaaccatagccatagttgttacctgtaaaagcaccccgattgatgaatccacggccaccaccacgagttgtggacaagggagaagggatgcgattgtagttggtgaatctgttgcttcgattctggtacgccatattagcttaagatgcttgatcagactcaatcgtggcaagattggcactgagatccgaatcttgatctggatctgtcttctctatacgagactcagaagctagtagcaaagcttctatttctgcaactgagtattcttctattcgagtgttggaagagatgataaatgtatcatactcactgggcaaacccttgaagattgctgcaatgtgatctcgagctgacagagat

SEQ ID NO: 56358 - DNA, 1794 bp, Cannabis sativa
caaatctctttaattaactgaaaacttaatttgctttgctttctacatgtattttcactatatatattgtttgttttttgagaaaatttattttgctggttgtgtgaattgagtcatttttttgtatatacatatatatgaattggatatatatgaagctctgttatcaatgatgacttatctgtaattgtgtatggatttagaactatttttgttatcaatgatgttggggctgcaccatatgtgtcttcttcattggtagtatccttgttagttggaatttttagatgacttttgtcataatttattgtgttcttctaatgatgacttatctgtaactaatatcatttgttttgcatttgattgcattccatttgttttatgctcttcgttagagcttcaagctttttacttgttttcttcatacttgtgtataatttagattgttaaatatcaaccttgaaatatatatttgtatatatatgacttggaaatgtttgttatacttgtttaactagtcatgatcatattaggcagctgagtaatggtcttcatgtggtagcacagaattaatgttggtagtagggaacatttaaatattttctctgttaacatttaaagtgctgaaactggggtaacttaataccatgcatgtttagtgtaatattttttttggtgtcataccgtgtaattaatcttttgtttagtctaaaactttgttttattaacatttttttatacaggaactatcggagaaaaattctgctaatcgttcaatgatgccatttgaaagtcgtcatggttcaaagtcttatttctctcatatgaagagcaaggtaatatgataaatatttattttattttatttattatcattttaatttattttatatttgtcatactaattatttatatatttaattataggaggatccaaccacaaaagaaatgcctagtttggtggataatttcaaagatatgcactggcatccaacaaaagggtggataaatgaaactgcaagtgataagtttgtaagtttaaaatcatatcataccacattatctaacagcccttgcatgttgttattttttgtcattgtttcaactacttgtgtagttatattagaaccttaactaaaatctgtttgattcaacttgattgttatacttacctaacacagtactggtcatcataatataattaatatgaatatagagtttattagattgtatatgatgttacatgttatatatgaattgcttaatttgtggttgaaagaaaattagtcatggaaaatgtaaatacaagtactactaaattataacctgagtttacaatatttcagttttctgatcatgagtttattcaaacatatatatttataggaaatactctttatgtatgttcacctctcataaactatatttgatgactcagttggtaccattttctgtccttcctgtttttggcattctctttctgtacatgtatgattatgatgtgattaattaattatttgctttgttactgtttttattgttaatttgtttgttctaatattgcagacagagatggacaatttgcgttctactcagagaacaaatattagtcagcctgcaggttctgacgttactgttgaccagccagatattttgtctgacgaccaaattgttgatatagtattgggaacacattcacgttataagaaaggaagaggtccaatgcctaggttgaaggcgattggtggaacaagagatgctaataactctgtctataatctatataaagatcaa

SEQ ID NO: 56359 - DNA, 833 bp, Cannabis sativa
tacccataacataattggtcacttaattttgtatcacactttataatagcatatacattatacatatgtgcccacataggatttttaatccaacagtatacacaaattttaattaagtttttactttttcaattttggtgagcttgaactcaataaattttattttaatctataacctctataaaagtgagaatgtttgtgggcttctactatgtaattacacaattagcctttattagatatatatttttttttatgaacaacaaaactcattaacattttgttattctttcaaaaataaaaaattattttataattatttatttcacaattaattagaaatgatttatttaatattttattaaataaaaaaatgaaataaatattctttattatctaaaatattattcttaccataaaaataatttttttatctattatgttaatgggatagtaaaaattcccacttatctaaataatttcaatctagccttcctatcataatatactactttttattttgagtaaagcaaagtaataaataatgatctaactaaaagccacattaaaaaaaaaaaaaaaacctaataaataatgatctaactaaaatgaaacataaaacaaacagttgaaagtttcaaccgtcagatcttaatctaactccttgaaccagcgattatccttttgtctctctctctttctttctttcttactttcacaatttgcacaacccaatagagagaaaaagaagagagagaaagaagaagaagaggaggaggagagagaaagaaccaagaaaagaacctcaatttttcattgtgggagaagaggga

SEQ ID NO: 56360 - DNA, 1166 bp, Cannabis sativa
caactccggagtaagttggggagggaagttggaggaagaggaggctgccccaataacggctcggagctgagaaacatggaagacggggtgcagcgctgcactaggaggaaggtcaagcttgtaggccacttctccaactcggctcaaaacccaaaaaggtccatagtagcgggctgccaacttctcattatgacggatagccaaagtcttctgctggtagggacggagtttgacaaacaccaagtccctaacctcaaaacggacctcacgacgatgggaatcagccgtggtcttcatgcggtgttgggcccgaaggaggtgcatcttgagatcatcaaggaaggagtccctatcttccaacatttgatccacagtcaagaccgccgaaccgcccacaggataacgcaccaaagggggaggatcacggccatagagcaccttgaaaggggtacatccaaaagatgaatggaagctagtattataccaatattctgcccatgacaaccatttggcccacactcgaggcttttccgaggcaaaacaacgcaaataagtctcaaggcagcggttaactacctctgtttgaccgtcggtttgcgggtggtatgccgtactacgctgtagaagtgttccttgctgcttgaacaattcagcccaaaagtgactaaggaaaacacgatcccggtcagagacaatggaactcggaataccatggagcttgacaacattgtcaatgaaagcttctgccacagttttggcagtaaatgggtggcggagagaaataaagtggctatacttgcttaaacgatcaaccactaccaagatcgtatccacaccttcgaattggggcaaacctttgatgaagtccatggtgatatcatcccacacttgggtgggtagaggtaatggttgtagcaaaccagctggagacatcgccatagacttattgcgttgacacacttcacaacgccgaacaaagtcaacaacatgttgtttcatccctgtccagaacacatcagcccgaatgcattggtaagtgcgtgtttccccggagtgccccccaatgggagtctcgtgatactccttcaaaaattggggtaaaagggaagaagtggcagcaagcaccactcggcccttgtacttcaactgtccatgatcaaaggaga

SEQ ID NO: 56361 - DNA, 1529 bp, Cannabis sativa
tgaattaatatatgtatatatctacatataaaaaatttgatgtatatatttgagtgagggctttagcccacacatgggctaaagtccctccgtccctgtcgcttggtatgtcgtattagattgtattgtattatattaaattgaattatatcatatttttatacaatactataaaatatcataaaatcaatatcacattatatataaaaatatatattatataaaatttaagttaatataatactataatactatatattatacggtataatatgacttaccaaaataagtgaactaatgttaactatttttggtattcatgaatatatatttttagttccaaataactaaaactatataatcctaatccatatgatggtatccatttcatcaataaaagatagaacccactaaactgaatttgagtgggtttgcaaaagaattggagtgcaacagctcactaaaccacttgtactttggaagtaaaaagaaaaaagagtatggaagtcaaaggcttagcaaatgataaagttaagagaagtggatgcaaaacaagaggcttatattatatttgagcaacaaatgaaacgattgatttggtctatatcataataatatatgactaaaagtataaaagactaatgttccaagaggataggtattaggtagtcctctttctaagctagaatgttgtggagatagagcctagacggaataaggaaaaattaataattatatgatgagatacagattatcttaaattggactatgggtggctttggacagatactctgctcatgtaatcattgggattgaaccaacattacttttatccttactccaatatttgtatgtataaatgtatattctaattatcacatacatcttattattttaaaattctaaataatttataatattaaacataaaatttacaatattaaacataatttataagagacagactgatgcagtatagaaaatttgagaattctaaatgttttttttgtaaaattgaagatgaagtcgtgacacatttattctttgattgtctcttctccttgaactgcttgaagaagatcaaatcatagctgaattagaaaatgactgccacttccctagacagaattgtaaagtaaataaaaaaaaaagtaaaaataaacaaggtgaagaagtcaattttcgctgctctcatagcaaaccttgtctataaaatatggcgcacaagaaattcaattttgtggtagaaatattcctatacaaatgtagagaatgtagttgtcaaagtcgaaaacataatgaaaaaaaaaaaattacatgtacacatggccaaaaaaagcaactagaaatgagaaagaatggtttaataccttgtttggagaatgctattagtttgtacaaaaaaaaattaagtaatgaaacatacttaatttatcaaaaaaaaaacataaaattcacaataattaattatacgcgtatgaaaaaaaaaaaattatcacaaatataattaatcgtttaaatcttatttt

SEQ ID NO: 56362 - DNA, 1453 bp, Cannabis sativa
  modified_base (333)..(333): a, c, t, g, unknown or other
  modified_base (555)..(558): a, c, t, g, unknown or other
  modified_base (672)..(678): a, c, t, g, unknown or other
aaataaggtgtcaaatgtaaaaatcccaaaaaagtacagatatatggctaatcaacgaatctacaccccaatggaaattgggctttggcttgctaattaccagatgggctttgaatagagtaaggccttcccttgagaaggtatctgtaataccactatttttctggacccaaactgatttgattttctttgataagggcttcaaacccaaagacaaatacaataataaaaatagaggaaattacattgtatgcccattttattttacttgttttaatttttacttgttttatgatgtccctattagcccctttaggttatgtaaattatatnctagacttaagtagagagtgaggatatattaggtaatccactcaaaaaagtgggtatattttaatcaaaaataatatgagggtatttttgattaatggatacaaaaaagaaatatttttcaacttatcacaatacaattcgactttttaggtttttacaaaaatactggattttaggcaaaaatttacaattttactgtcacacgaattttttttacaaaannnntatctttttataaaacaaccataaaataataaaacagaacaattaaaaataatagtagaacaattaaaaaacaatcgtaaaacaacagtgaaaacttaacacagtacacagtannnnnnntacacagtatttttaaaaaaaacacaatatttttagaaaaaaatcttcaataaaaaagatataaaaaataaaaaatttagtatgcggtgtaaaaaatttctttctttaatctttattctaaaaatgtcgtggtccatctaatttcctttagcactgttgtttatgtacgcgtgtctccaaaaacactgttttcatgtaaatactttttaaaacatatttttttaagattttatttcttcgattattgattaagaaagatgtataactttaaaatacggatgatatcacgatggaaaaaagagaaaaacaaagccatgtcactcaacaactttcaaatttaaaatttgaagagccaagccattatataatatttattttataaatgattaatgtggacattgaatttataaacacttttttagtttagatattatgaatatggagtacgtaataatatgtttgtactaatatgtattatgtatggactatgaagtatggagtatgtagtatggattataaactttagatttttattatcatgaacatgaagtttgatgaatgacttgtaataattgtttgtttgattttggtttcacttttgtactttagatttggagttaatacttttttttttcttttaaagaatagattaagatgcatgcttaatctcatatataaataaagttgaaaaaaaaaattatatatctaatctatataaagtgtgtctatataactgaaattcttgatttataagaaattcatgggtgacttttta

SEQ ID NO: 56363 - DNA, 831 bp, Cannabis sativa
aggatgttaatgaaacatacatggtagtaaatctagatcttgtaaaatatttctaacatttattacatgtcttaagtgatataaattcaaagtcgcacgcactatataacaaagatctttgtatgaaataaagacatgtaagtaaattattatttgaaaaatatgtatggttgtctatgcaatatgattcgtaaatgatttattgtgatagactcttgaagaattttttattatattatatagatatatgatcatttgatatagaaattaagatcatacaacaagaatagaacaaatatatagtcttagagtaccatcattgtcacaaatgaatatttatattatcattaatgtgttatgttcatattacttgaaattttaaacttttgtatgaacaacattgtatatacacatgcattaatgattaaataagttggataaatattgatattctgggaattcctcatccataatttagaagtccacacatattccggaaagagttacagaaaatatatgatcatagataatatacgataatattttaaaaatgataacaataaatcttacgagatatattatcactaaataattatggatcatatgtgcataaaggagagacatatccatgttgcactctttttctcttagttcaggttttgtcccactaagttttcctagtaagatttttaatgaggcaacttataaatagttatgaaaataaaatatgtactacactcttttttccttagctcaggttttgtcccactttattttcctgacaaggtgtttaacgagacaactttaaatcatgttaacatacttgcactt

SEQ ID NO: 56364 - DNA, 1094 bp, Cannabis sativa
tacatagaagctatagattccatagtacaaaaaaacaaaacttgatcaagcaatcgattcattctcaaaatgttggtcttgttgggctccttgaggtaagagtcaaggctgccgaacttggagccttgtactctaatgtattcaatggatggtgttttacgagtaacatttcatggcacaaaggagggcgaatggttattgcttggaatccgaatactttcgacatcaacatactcaaatgtacaagtcaattgatctatctccaagtctctacttcggatggtaagaatttttttgtcacttttgtttatgctttcaatgatgaggaaggtagaagggctctttggtcggatttagaatctcttaataccaaggatgtatggattgtgctgggagattttaatgatatattgaatcaaggggaaagagttggggatcgggtaaaagaacattaatctcagttgtttagagattgtgtttcttgctgttaattacaagatattaaaagtagtgggaagttttcacttggtgcaataaacaacatggaggggatcagatatattcaaaattggacaggataatggctaacttgaactagttagacatgtttccaggagctgaagctatttttatgaaagaggggatgtttgatcattcaccagcccttctcacctttcatcaattgacacagatggggaaaaagccttttagatattttaagatgtggaattcacatcctgattatgcaaaccaggtgagcaatatatggaagacataccaaggcacgcaaatgtaccaagttgttgctaaactgaaagctctaaaacctgccttcaagagaatcaatcgagaggggtacacagatctgcaggcaacagtaattaaagcacaggagatccttgttacttgccaaaataaactcacatcgtcgccactaaaccagatagtacaagctgaagaaactgaagccagaaacaatttcacccaagctcacaacaaataccaatcattcctccaccagaaagctaaaaccaattgggtcaaagaaggagatgacaacacaacaatttttcatgcaagcatcaaagccagaa

SEQ ID NO: 56365 - DNA, 1081 bp, Cannabis sativa
attccagctgctattgacctgaaccaacctgcgagaatacaatcttaatattccatcaacatcaattgttagacgaaatgtaacattattgttggggcgtatccaatctgcagggtgaactgtgtatacactagctttgcttgtagaattgagcagctctaattggccattgggatgaagattaagtgtaatttttggtgatcctttccaataagttttggtgtcccagtaagaataatattctgaggtatgtttgtttacagggtattgaaccaaattaccatcgtcctgcatcctaagtataaatcctccagacgagtgatttgactcggagacagctgagacaagctcttttcctgtctccaaaatctgtcctggcaaaagggtatctgttggattctcaaaactctgccatatgatcttggaatctgagttgtagaggacaaaattacctgaatcgagcagtgaagctgaggcagcaggctgatcaggggaaacagagttggcgaaatcattcaaaacaagtgttgtgatctgtgggagtggctgctgttgatcccggtttgctgtccataccactgtcttctcctttatcttgtcaagccagattccaatggcaaagccattgccttgtttgtagaaaccaaatgcaaactggcctgaatttgatagccaataggagttattggttgaagtagagattgaagagttaagactgatcatttttgtggtattattttgttgagcaattgagatggagaatagtatttcagtgattagaagaaagaacaaaactattattgcatttgcagccatagtaatcagttgatcaagtgtttgattttgcagagaaaggtaaggcatttgtttggaaatttctaagtcctgaaagtctaaattctaaaagctttattttggtccaagtctttgtcaatgaaacttggtcacaggctttgttttctaaagatatttggtcaaatgaaattagctactacgtttgaagattttcaatagttttttttttttttttaatatttgttcaagtcataaaaaagataaaagaaaagaagtaaatttaaaa

SEQ ID NO: 56366 - DNA, 791 bp, Cannabis sativa
caattatgcactaagtttcttctccaaatttctctttttcttcctcttgattttttccaaactcaaattaaaatgctaaactaaaattctaaataatgctctaataaaactctccttttttctttttcttcttttttttttcttgatgtaggtgttcttggagctcttggagcagccgctaccgtctccttcaattcaagccacgcctgcttctcatatatataatgagatgcatgtatgatatatcatatgccatgccatttctttttcacattggctccttgtagctttctttttattttatcttttttttttgtattttaattgataagacgcattacaatagtaattcattggtaactttaggcatgtttcataagatttggactagcaagtaacaaaacatgacccaatacactaaatgccaactttgcattttaaactcctacaacaccccacatgattgtatttaattcactggaagactaaataaataaaaatttgacataaaaaaatattaataaaaaatactaaaattaatatttattcaaatctaaataaaaagtgtgatgctccactcctcctcccatggtgaagaagaggaaaggtgtctcgaagcctggtgctgtcagcaaaagcgtcgtgagagcgagccctgagctgccctcaatccaagatgatgctatggaggttttcttagattcgtgcgaaaaactagaaccggagaaggaggtggttgctgaggctttgaagtcgacccctaaatcgacaaattgggcggatgatgcgga

SEQ ID NO: 56367 - DNA, 1777 bp, Cannabis sativa
taagcgtttatatattacaacatattttacttggaactcgaatccaggacctccaacactcacacacccacttatggccacttgagctaaccccatgtgattaatgctgtattagctagttattatgttagatgactaaaagacaaataactattaggtaagaaagtaatattattctgtggatgggtatacagtacactcatctattatatacatactatttcataatattattatatgtttctttagatagattaatttgttagacacagataatcatgggtttcactttcaaaaattcttcacatatataaaggcgtgatatgatatgctacaataggctgctttcaatcctttttgttttcttgggagtgctaccgtaacattttattacaatatatattggaattttttttttatcggttatagttataatattatttctttaaattttttaaaaattttgaacacgcatatatagtatcgaaaatatattagaaaatttttgaacacaaatagtactgtaatattataaattttatttttggtactgtaagctattctgaattttttaaaaatttacagggatgatattataactataataaatatcgctatgaaaaaaaattaaaaaaaaaatatttcggcatgtgatttcaggcatggatgtttaatttacacttggataagtggaatgtcttattctgggtattagtaaaataaactagtattggatgtatcaactatacatcagactgaccgatattgacagtgaaaaaaagatattataaacttaccgttatatattttctaagttaatatcacttagttgatcatagatcatttgatctcaatcctgagatggttaagctctatcttaaatgtattgcacgagttctttaacttgttcgttacagcttaattaccccgtaggcataatactacatcttaggaacttggtagtgcaactgagtgggagagttaatcgagagatatatagacatgtataacttctatgtttattagaattgaaacgatagtttcgttagagtttggcttaacacgataaatgatagaacgctcatttcgataattatattattagtttctcgaaatatcatttacaagtagttaagtacttaaggacgaaatacattgaagggtaaaacaacaattttgttcctactcaatgtaaaccgtctatagaggatcaatgattgttgtgattgaagcaataaataattcatctcgaatctatatatagtatataaagcgttctacgtaatcaagagtgcaattccgaatctatagtgaaatttaaatgaattaataagttaagaaatttactggataaatttcaagatctgcttattagaagcttggttacataggcgcatgatccccacactagctaaaataatattgttttgtagtctcaattgattggtttatttaattaggattctaaatctaactatgtcttatttatgaattttattagataaatttactatttttcgatggatttactatttttcacagagtagtgagctcagggatcgcgatcctatatttatataggtgataccttccatcaaggtctctgctacaattaattgtaagaatattttgataattaattcagaaaattaaattgggtaatgaatattagtaaagcgtaatctaactatgtatagaatatcaaccaataaccaaatataatgaatataaaacattcattctcttacacacatataaaatcaattcattgattttt

SEQ ID NO: 56368 - DNA, 1196 bp, Cannabis sativa
  modified_base (29)..(30): a, c, t, g, unknown or other
ctagctcatgtcttgggtcctggtctggnncttatgtccaagtttgggtctaggtttgggtctaggtttgggtcttgggcctgagtcatgggtcggggtccccaattcaggttaggctcctacgtcccgatctgggttagggtcccagtccgagtgcaggtcccggtccatgttcaaaactggtccttggctcgggtcttggcctggtctgggtttatttaacggttcagttttgaggtcctgcgtttgagtatcgggtctcggtcccagtcccagtctgagttctagtcctagtccaattttaggtctcggtcctagtctgtgtctaagtctgagtcttgatctatgtcagggtctgagtccagagtttgagtctaagttttggtacgagtccgggtctgggtgtaggtctaggtctgggtttgggtctgggccaagtttttagtccgtgtctgtgtccgggtcttggtctgggtctgggtcttggtctatgttcgagttctggtaggggaatgggctctattccatgtctcgggtcacaggtcctaggtcccaggtcctggcgcaagtctgggtccgcgttcgggcctgagtcctagtattgatcccagcctgggtccgggtctgtgttcggtttcgtgtcttgatccggttttggatcaaggtccaattcttattccagggtccttattctggttcttgttcctatttcgggtctcggggtccaagtttgggtttgggtcctggtctagaaattgttccaagttcgggtcttggtacaattgcaagatctagacaccaactacgggtcgggtccaagccccaggtcgtgggtcaagattcggatcccaatcttgggtcccggtctcatttccattcggatcctgggtcccagtctatgtccgtgtctgggtcttggaccgagaccgaggttgggtctttggtctcagtcctagtcctgagtcttgattctggttctaattttgagtttgggtccccaatctaggtttgggtcctgggtgcaggtctgagtctctcatcccggtctgggtcctaggttagggtctaggtccaagtctgtgtctcgattcgagttcgtgtctcgagtcccgatctgagttttgatttagattcgcatcttgatccggctccgcgtcccgatccgggtctgggtctgggtcctagtcagattctag

SEQ ID NO: 56369 - DNA, 2173 bp, Cannabis sativa
attgaagttgattgtcattttattcgtaatgtcattcgtgatagctctcatgtgtctactaatgatcaagttgctaacatcttcaccaagactcttggtgagcacaagcttttgtctttattttgcaagttgggcatttgtgatctcaatgctccaacttgagggggtattaagattaatcaaatatgggctttctttagtgtattatatatgggcttaggccctaatctcattcatttgattgtatatagcataccctataggtttcataacaaaattaagaaaacatattatacccattttaacaaaaggggagttgatataagaaaacatttatttactatacatttggtaaaagaatcagtagcagaaaatgaatgcaatgtatcagtcatcaccactaagatctccccatcgaacattatgctttgcagcaagataatgcgctcccactggtcctcgactgccgtaggggtagagctcaggagcaatcttttttacttcaagctcattcaataacggtgtgaaaagtgtccaagccgcatcaagctcatcacttctgatgaacagtcttcgttcaccttcaattgcatccaacactagtctctcataagcatctggtatttctcttggataccttcacaaaaagaaccaaaagtgcttaactataatgccttgagaacattattacacgatacataaaaagtaaaatgttaccttaaagttgacttcattgtctaaaggtcgagaaatgaaaaattagaacattctacaactgtacaattacttttattttttagttatgtctcatgagtcattgtaccttgcacggtagagcaaattcaggtcactacggtctaatctcatgccaagaccaggaactttgttattgatcttcaaatatatagcctcatcaggttgtacacgaagcacaagttcatttgtagccttgtctaaatcagttccaaagttccgcttgtacaagttacctggaacatgtctgaactgaactctaatctctgccctgaattacaattgtaagaactcaattatgtgtagtgtttaacatgttggaatacaatcaataatgaggacagatcaaaagaactggtgcttgagttcatgatattataccgcctggtatgaagagccttgccagccttcattaggaatggaactccatcccatctggcgttatcaataaagagagcggctgctgcaaatgttggtgtaagacttccatttggaactgttggatcatctgtataagcaggataagatttaccacccttgctatgacccttgtattgaccaacaacgacatcttcaagcagcagcggtctcattgattttagaacctttacctgaaacaaagcaattactacttgttacaatttaaagaatgacaaatgaagagagttcaagcactctgttagaattttagtggagtgtggaaattattgagctgaagagatattaaaagaaagatttttgaaccttttcatttctgacatcctcagcatctaagctgactggcgtttccattgcaaacaatgctagaatttgtattaggtgattttgcattatatcacgaatgatgccatagttatcaaaatatctgcaaaaccaggcaaaactacagtcagatgataaatttatctagtgaatgatagattatacttcctagaattatcaggaaagaagctgaccctccacgtccctctgtaccaaaatcttcagaaaatattatttgcacattgcgaatgtagttccgagaccagagaggctcaaaaacaagatttgaaaagcgaagcactgatagattttcaacaagttcttttcccaggtaatggtcaatcctgaacagcaaagatatgtatcaaaatttccctcttgcaaaaatataattctcagaaatttgggagaagaagaaaacaaacctgaatatttggtcttcagcaaggtattgctttaaacacctggttagctcaccagatgattctgagtcacggccaaaaggcttttcaacaatgacccttgtccacccacttccagaagaagctttaagactagcacatctcacaacatccacaaatatgtttgggggtactgataagtaaaagagcctacgggctatttttccagcctgaaaaagagcattattgaagaatat

SEQ ID NO: 56370 - DNA, 596 bp, Cannabis sativa
atttagttaaaataacatctaaaacgctaataagatcatggtaaacccaaataaactcaaccaaaatcaaatcatttcaactaaagtaaataaattagagtaaaaaggagaggtctcacacagaaaccagtcttgatcatgaacaactccattgaagctccaacaagcgcagccccaaatgaaattttcaggtaccaatctagaaacttcattctgactgcatatcaattatcaaaaatatatcaagggaactatcacatttgcaatattagggcattgaaaaatgattaaccgtaagtccaagcaaattctataacctaaattgagccatcataaaagtatcaaaatcacacaaatcaaaagaatttcaatatggcaataatatgtagtagttaaaaaacaataacagagcaaatagataaacagcaataatctcatataaacattttaacaaaacacaagggcaaacaaaaaaagttatatttagggacacactttctttcattggttgacagtcagtgagtcattttaataaaatgcattctacagagacatacatcttacagtttgactcaattcaacagattgttgtgcaa

SEQ ID NO: 56371 - DNA, 2465 bp, Cannabis sativa
  modified_base (501)..(501): a, c, t, g, unknown or other
aacaaaatacagggtccaattagtaacttttgtaaaacagagggtccaaaataatatttaccctaaaaattatgacaaattgttgtttgttattgagcacaaatatacctaccttatcttttgttcaatataaaaataattatatgatattgtgcacttaaatttcatatgttggatcgaaaagtattatatattatatattttaatttaatttttataaaaaattgttaagcattagtattagtgcatattgaattaagattttctgttaaaaattagtacttcataataaactaaaccaatttaaatattacaactcaaataaataaatttatattatgtaaaaaaccttttttagtgctcttatgaatgattgaggtgagagattcaacaacaacaacaataatcataataataataataatataaaagtaaatagcgtatctaaagttttaaatttataaataacataaatttaatatttaataataataataatantaataataataataatataagagtaaatagtaatataagtataagtttataagtagcataaattcaatatttatttttaaagacacaagtatttaatttttttaaaactgtaatttttatataatttcgtcaatataatttctgttattgtcttaaatagaacacatataagatctaaattctagatcattggttctaaatagattcatatagtaccagttacttccaattattctttaataaatttaaaatgaaatttgtactgacgaaattgaaaaaaaattataattttacaagtatttaatacttatgctgcttacaaacttaaaatttaaatactcataacactatttacccaaatataatgagaagcaaaacttgattttgatttaaaacttagaagtaacatcacttattttaacattgtaatgtgtaaactacaacctatattcttcttctgtctttactctcatatatatacatacaaagttgatacataattaattatggtctttattttttagatttatattattattattttatatggtatagaccataccaacctcaacaagagcagcatgaggaatgttgagagcaaccggcggctcgcggctatttttatcgcaaaaagtgtatgtcatgattaaaaaccgctttagaaagttcgaaccatttcgaactctcaagtgagattgtcccaagaagtatgcagttccactctctcttgcatcaactaattcttgtagctcttctctaacacaaactctcattttaggactattcgggggcaacatgaaccgaaccttctttctctttttaacgacagatgtttctgcgattggactcctttgattttcgttgttggtgaatattggaggagactcagggggaacaaatgaatgagaatcaatacgaggaaccagagcgttcccatcagatgtcggttttccaacaactatcattcttccttctggagaagtcaaagactcgaaatcattttcttcgagggaaatgaattcccctattgtccggatgatttcctcctcgaaatcatctgagtctctactattgtcatgataaccgcacctaacaacacaacggtaaatcttgtagtctctatgtccaactcggcctataaggtacctcttactcgggtgaacacaaggcacaggtaacgacttgaaagacacaaaaattaagacttgatgaaacgcaggaagatttgtgacaaaatgtgagaaaaaagcaggaattccagtcactatatcggtgtagataaagccaataccgggtactctagaaactccaagaccgggactaagatcggtaagccattctatagacaccttgttctctaaatcaaactcatacttcttcaaagttccataatgccatgacaacatgacagtaaatgataacaaaaaaagtacaaccaaaaaccaagctcccttgtgcatattcaacatgcacgccgacacatacatcgcctcaacaaacccaaagaatattagaaaacatacagattctatcaaattattttcccaatacagagcaatgaccaatgacatcaaacaagttgtaactaacatacccgacactacagccaaacctgttcgaaaagagattcaaattaagtcgaaaaggatcaaaaataccaattcaaaatcttaaaagagtgttgaaataacattagatgtacctgttgcactgccaattttgacaatgtcatgaaaaccgagagtcgcagagagactgagaaccatcagtagccagttgatatcgggaatgtagacttgcccgtgtattttatcagatgtatggataactttaaccctcgggaaacaaccgagagcaaggcactggtttatgattgaaaaactagccgttatagttgcttggcttcctacagccgaagcgaatagggataacaccacaaagacatggcgaaaatgtcctgtaat

SEQ ID NO: 56372 - DNA, 977 bp, Cannabis sativa
ctttccttctgtaattatttccccttcaaaaaatggcagccgcccacgttagaaagaagatggtgtgtacttggcatttttttttctttttgttgttggttagatagggtacaaattgataccctaaaaatagaagcccaatcccttttgcaccttggcgcactaggtttagtcctcctcctacacatcatttagctggtttgatttttagtaacaaacacgctcctgctgatgtggatagctaaatttcgtgttcccacgtcactaccagaatgttgaaatcgtttcagcattgcttcagcaatttgccccaatttaagcttttatgcccacttcatccttgcttccttttctttttcctaacaacttaattcttgtttttcaacaacaaacaaccacgtttaattagaaaaaacacaactaacattaacaatttttacaagacttacaagctagcttacaaaatagagaacgaagctaaaactaattaaaattaagcaaacaaacacattttcactactcttctcacaataattcaagtttaaaagcataacaaataactctataccatagagttatcacaggtcgtggcaggttttagggtggtcgacatgtgaacccacctcaagctccaccagattgggagcagagattcgcggaaatgcaagatcatatccgccagcaagatgaagaaattttgagattaaggcagtatggtccttctgcagtggctccaccgcaagctcaggccgttgttattgctaggtgccagcagaacaacctgttattggcaactgtatggagctgttatacgagaggtttcgcaagcaagcacctccagtatttttggaaggtccagatgtgatgaaggctgagtagtggctcatagtaatagaaataccatattttcaataataccatattttctaatttcaatcctataaatgccaaaactatttatttaataattataatta

SEQ ID NO: 56373 - DNA, 1280 bp, Cannabis sativa
taaggttcaaatattttgttgcacgcgcgaactattttttcttatagacgaggtaatcaactgtttgaattttattttcgacactctaaactaatcagaattttatgaaaatttacaggtggtcctaagtactacaatgtagacgatcaagaaaaaaaataatttaaaaactctcatagatgccaaaatatagaagaaggtctatcgaaacaacccgaggtacaattatttctaaaatatttttctttttctaaattaatttgttatgatgaattctattgaaatcttctgtagtacacctttaaaagagtgttctggtagaccctatatctgttttggcattcagaaaagatttttagtctaattttttttatcatgatcgtgtatgttatatttatgtaggattacctgtaaatttttaaaaaattccgaatagtttataatgttgaaaataaagttcaaatagttacttaatatgtgtgtacattatatcaaatagttacttaatatgatgatcgtgtatgttatatcaaatagttacttaatatgtgcgtacaataaaatatttaaatcttatttttggcattataaactacatgaaaatttttgaaaatttataggtggtcctaaaatatacaacgtacacgatcatgaaaaacaaatagattaaaaaactctcttagataccgaaccagattgtgagtttaacaagataatccttccaaatgattatgaaatatcgctaaatatttataaagcacctcataaaaatagatttttttaattaattatttaatttatttgttatatttgacattaattttattgatacttatatacttgttttgatttattggaaactaaaaaacaaaaacaaaaatctgtagatactacatttttttttcaaataaatatcttttattataatatttatgtttaattagaaaaaaccatgaatattactgttttttaccttttatttgttatgtagtctttttttacaagaaaaaaaaagacataattacgtaaaaaaagaagacataattaggaaaaataatttatttaaataattaatagtatgatttttttcgaaaacttttttttttaagtaagaaacttactttttaattgtaacaaattaattataaaaaggaaaattggaggaaaaaaatcatgttccaatgaaaaaacattgtttatgtatgttaaaaaattattacttatgtaataataaataaataaattaataaaattctttcaaaataataataaaaatataa

SEQ ID NO: 56374 - DNA, 806 bp, Cannabis sativa
  modified_base (756)..(758): a, c, t, g, unknown or other
aattaagcactaaactcaaccaaaatactcaccaagaatccctaatcttttatcaaaatattctctttcttgggcagctaagaaaaagaaaaaaaaaaaaaaaagccaattttgactacaataatttcttacaaaaagaaaaaagtttgctctttaatctgtttctcttcgtttttcaaaaaaaaaaaaagaacaactgaacagaaatgtttgttatgaaaagcaaaatcatacctgtgggattgaagagatagagaaccgtgagttgggaaaggagagagaaagagaggcgtgaggtgaagacgaggaagagcaactcagaaaaagcttacatatttatacttattattttaaaaccagtaatttcttgcgtttaactattggttgttgataaataattaaattttatttttaatgataaattatattactgtatataaattttataattactaatcaatggctaggtacataattaaacttaaattttataacataattaaatgttaatttaggcatattattattatcaataattaaatgtagtagtaatttacaaacaaaaattaagctttaagtatttaaatattaaaatagtcttttaaaattaagagagtttaataaaatatataaaattacacgagatacatacgtttttactttgaactaatttaacaaattagaatttttcatttctaaatctatagcaataagaggttttttttttcggccagtgtttggttttatgccctaaannnaactccatttcaatgtaatctattttatttaacatcaataaagaaaca

SEQ ID NO: 56375 - DNA, 850 bp, Cannabis sativa
gccttctacctctcgttctatcaatcattctagaagagatattcaagtaaatttaaaacaggggtacgagtgaatcaccctttaagaaaaagtgaagaatcagttaatacacctaggcttacagcttcacatggtcattatatacaagtttaaagttcaaagaccactttggttttctgagaaactcactcgctggaagaatttaagggtaatttagttgcgaaataagaagaatggacataatattagattctaacgaaaattgtgtatatatatatatgataatgagagatatgggaatatgtgttctataaaattaaggaagaagcagagagcaaagcagaacagcagaggctgcaatttggaattttaacaaatctaaacctatcaaattggtgcacaaaccataaacccgagagagtaaatacttatggcatgtttggtttgttgtaatcaacattctaatggaatcatgattacaattccaatgtttgatctgcctttaaacttttgtaatgacattccattgtaatcattattacatcacttgtatgaaaaatgattacactcctatacctcatgaatcctcattacaattacttaaaatgactatcttactcttattttatacttttcttactaaagtagggataattttatcaatttactatctattccaatattaattccaacaacaaaccaaacataacaatcaattcctattacaattcttattctattacattactattaccattacaattaccattccattccaccaaatcaaacaccatcttaactcgtatgcatccattatgatcatgatataggaaacaaataagttgtataa

SEQ ID NO: 56376 - DNA, 1315 bp, Cannabis sativa
ttttggtggggttcaaatgcttctggatcgagaattcattggaaaacatggaatgctctttgcaaatccaagggtgaaggtggcatgggttttaaaagctttgtgcactataatcaagctctgcttgcgaaacaagcatggcacatcttagataatccttcctcactccttagccgattattgaagcaccgatacttcaaaaatggatctttcctagatgcgggaattgggtcttatccttctatgacatggaggggaatagtatggggtaaagagcttcttcaacatggtcttagctggaaagttggtaatggtctacagatcaagtgtgctactgatccgtggctgcctagtcatacaaccttccagccattgttttttaaagggacagattttaatttaacagtcagtgagcctatcaacagcgatcgacaatggcatataccggcactcaggtctttttttctggatattattattgagaagattcttgatattcctttgtccttttttcctcacgatgataagatcatttggcaccacgaatcaactgggatttattctgtcaaaacagggtataaattggcttcagacattgcagatcaagaaactccttctggttcctctcacactacccatttatggaaacaattttggaagctcaacctcccttctaaggtaagaattttcttatggaaagctatccgtgaatgtcttccagtggctgcgatcttgcagaagcgccatattccaggttcttcaacatgtcctctctgccgtgataacaatgaaaccatttgtcatgctcttttcctttgtaaaagagctaagaaagtatggagaggatcctctttttctatggatagattgcttgctgaatcttctaatttcaaggatctattctttaaagcttcagagacatggtcgcaacacgatctggaacaatttgcctgtcttctatggtgtatatggactgaaaggaataaagaaaaccatggaaccaaggctaagccgcatgaagttctccttttttctgcccttacatatttaggagagtaccaagctgctcgtaaagctcctcccagcaatctcagtcacgaggttctcaataacacagtacctactgtcacacctaggtggctcaatcccccttctggtcgactgaaactgaatacggatgcagctgtggatgttgtgaatcgtatttcaggttttggagcaatcttacgggactctaatggtcaagtggtggctgcaatgtcaaggccatatcctagttgtttcaagcctaaagtaatggaagcattggctctca

SEQ ID NO: 56377 - DNA, 1860 bp, Cannabis sativa
tttcatcatttacctcttctccacaccaaacaagacttagtagcaatcttactgagataaataaaagtcttcagtaagaaaataaaatttagcttgctcgtcaaccctatacgtaaaagacattggtgttcatctccttctcatacggcaatacccattttttaggtatggtctctcctttgtgctctttatttttgtattttcttttttcgctaaaaatctttattttttgtccatttttcacattaataacttaaatacatcaataaaaatagtttcttttctgttattaggaagaaaaaattgtctatgtgaatggatttatttgggttcgaaaacatgagggtaagttcattttttactatattacgattattgttgttgggtattaagcttgaaataggtagataaatattgtttgttaaatttttttttttataaaagttgattgaaaaatatatatacatatacttggtttttttttttatttaatgtgaattaaatagtaacattagagttctatgggtattgttgtgggatttaagtttgaaataggtagatacatattttttgctaatttgtttaataaaatttgttgaatgaaattttgttgatttttttttttttatttataccaaaattaatagtaatattttagtactaagtctagtgttggtgtatttttagcttgaaataggtagacaaatattgatattgagaaattttacacacattttttatttagaagagcgattaattagtcttcaatgttctaatatattaatattgagaaagtcttagtaactatattctactaattatgtaataatttttttgtgcttgtttatacttaattgtagatctattgggtgaatttggttttgatttctaagaagtttcaagaacattattgtaagtagttattagttactatatttacttactatgtagtcactagttatatatgtattagttacttgttagtattctaacttaatatttattttgaacttttttatattatattttaatattgtaggttgtggattgttattggaaaataaagtaaaattttggtgatcattgattgctagctagaggtacgttattgacttatttctttttactaattataaaactattatcggagtttgaatatcttagaaattcatccatagtaaagtaagtgatgcgatatattgtattgcggtgaatagagaattaatatgcatgttagaagagtttgaatattttaaatattcatccgtagtgaaataagttttgtgaaatagatacactgcggtcgaatgagtggtaaattattatattcttaattgcttttctgatttttgtcttgatacaaaattttcttgcgttgtttgttgcgttcttatatagttattaaattgggaaattttaaactgcatttttcatagaatatagtgtgatgcagacaatttgtgctataagcggtttgatgaagaccccaaccagcatatacaatcaaattttggcaacaccttattagaacttgaaaaaaaagtacgtgtctcaatgacttgccataaagcaaaaatttttccaaattaattatttctctaattggtgatcactactgccatgttgcataatctcttcaagaaacaatgtcatattaaggtgtgaggatccaccttcttcaacagctctctttgccatctccccaagccatctagctctttcccttctctccttgcattcttctccatcatccaacatttcctctaaagcactcttaatagtttccctcttcaccttgaccccaactttctcttcctccccccatttcatcggctgttcaaaaccaagcgatacagctat

SEQ ID NO: 56378 - DNA, 1074 bp, Cannabis sativa
gtttcatactctaatattagccataaaagatttaattaaaaattaattaaactctcactaaaggacaaaaatcccttcaggctaaaagaccataatgcccttgctcacacaaaagcatcataaaatcacatagggggatttttgagaaattctaaaatcccgactattcctgacattcccaatgactaaatatattgtcctgcttcactaataatactaggatgtgattctaatagccaaacaccgcgttccaatattgttgggcacaaaatatgcaaaattattaaatttctatatatgacatataatgtgcattctgaattcaaataaattatcgtaaattaatatttaaaaattaataaacattttcaataattaaatcttaataatctactaatttccaaattaaagctaagcggtctttacaaataataacctactcctgttgtatttgtattaacttgagagaaggaataaagttttctttctctcgaaggctctgacaatgaatctgtaaattattttctctcttatatcactattctctctcttgggtgtatttttgaatcaattcttttggtccccttcatagtgagattatgccactatttaatggactaattacatgaggaatgtttccctttgtctataatgaataaaataagaaactacattaattctataattactatgtaaggaataggaaagtaaagtgtgttgcctttattctgtaactcaatctcacaattatagggattgtctttgtttcttggaaataatgagattgatctttggaattgccatcttacacgcttcgcttggcattagcatgtctgcatgttggttggacatcttctccaccattttattcgggtatttgagtgttacaaatgttaaataaccattaatggactgctaggaatactttcctctacccaggtgtcataaatatgggacacatgtcatcaattcttattgccatgtcaaggtgaaaaaaataagataacattttcccccaagtctgtgcaggaccttcctagtcgcacatggacttcactcagcctggagtcttgt

SEQ ID NO: 56379 - DNA, 956 bp, Cannabis sativa
tttcagtttttgggaccgtcttagtgcaaatgggtcaaactttatacttggacatgaactagacatgtcatgaacatatttgaagtatcaaaatcagattcgaagaactttcatatttgagtattcggagcactaggtgccccaagtacccagcgcccaggtttacatattgtcaacctaggccattttcaagcatcaaactaaaaatccatcttaggaattttcttcatcttcctcaaaaacggggaaacaattacttttggggaagaaacagactaatttagaggccaaaacaaggaaccagtgcccaggtcacctagtgtttgcccagcgcctaggttgacattttgtcaacctgggccaattccgaggagtatttttcaaaaattcttccgggcatattctctgtttttgtcaaagattaagattcaagtattttcgaagagcaaatggaactgtctaagggcctaaaagtggatctagcgcccaggttgacacttgtcactgggcccagtgcctaagctgacaatgttgtaaatacgagtcggatttttcgatacgacatgaaaccggaacgagcctgaaagccacgaacatgataaggcacaaaaaaatacaagcttaggcatgacacgacacgaaaaatatgtctttaagcatgacactacacgagaagcacgaaagacacgacacgtaagcacaaatagactaatacagaaagcacgatacacgacatggccgaaaagcatgacacgatatattaaaattttttacaatgtattattaattataataataagatatgaattttttaattataaatacgttaaaataataatataatttaaatataatatcgaatattataattcgataattaaaactattaaaacatgaaaaactaagattatatactaatttatttatagggcatgatataaaaattgagtatttat

SEQ ID NO: 56380 - DNA, 997 bp, Cannabis sativa
  modified_base (42)..(44): a, c, t, g, unknown or other
  modified_base (529)..(529): a, c, t, g, unknown or other
atttacatattgaattgcaataattaagcccaagcaacgttnnnattaataaatgaacgacagttactaagtccatcaaggtatgcgtcttctgcctctgcgagttgaccgttcatgttccgttgttgagctcgcagggtcatcagtacgttgggaacgtgttgtactcttaggtaattgtctcttgtggacatcgcatgtcgagctggtagaatctagagatgcgaatctatatcggcttgccagggctattgggtcgttgggaccaaatcacaccatagagagttggtctctattttctcgcataagtataggggggatattcacatatgtcctggcacatgcgagttgggtctaccctgcataatgtgaactacggtcatgcgatccgacttaggtcgtactcgcagtatctcgctggctttatcctgggcggggtttaaacatcgaggagtctctcatggacatttcagctttcattggaaatctgaatacaagtgtcctttaaataggagtctggtctcgagtntctaggtgagagaaatctcactaactagtttctattgagaactttaatatatatgggtgcattaataggtattctcatgaatgggtagtagctaagaaaatttgagtttttatgcttaattttttaatttaatcagacgaaagtttctaggtagttgctgggtggctggccgaaggttgcattagacgaagtaactgttagcaaaatatttatgcaactattgtgaaatattaaaaatcataacagtgtttccacgtgcgtataactctatctacatgtctctttatgatttaatatgaacaaattcaccattagaaatttagaaaacaacgaaaatacaccaggataaacatttattatagtattgacataattttttttgaattatacttgagttggattgtttgggaactccagttcaactttttgagatctgcctttcatggatctaaaaattgaagtcaggac

SEQ ID NO: 56381 - DNA, 903 bp, Cannabis sativa
tgtttgttagctccaattgattgtatttgactatttgtattgatttgtttgggttgagatggttctttagtgatctttttatttatttatttaataaacagtatatcgattaaagactaccccattcaatacatgaataagagatgaacctcacatttctataacacttcatcatcatatttgcttcagcctttttttaagattgatttagcctaaagaatttgacacgtgaaagaattacattcaaataagggtataatcctctcactttgagccatttattgaaaatttaccaattaaaggcagttcatttggcttgaaagaaaagaagaaacaaagaaagaaaaaggaaatttttacccaagaccaagatttagaatctttcaaaagcaagagggaaaaggaaaataaaaatgtttgcttctcaagaaaggtggatattctattcttttcttttcctcttcctctaggcaaagagtaaaaaagaaaaaaggatgttgatcacaactgtaagtctgtaacatatatgaacatatataaatgggttgaagactgatgaaatataaatagagtttcaacgtattatatttagttaatatattagaaaaaatcatagcttaaaaagtattaaagctccttttaaaaaaatatatatatatattaaaaaggttagcactcatattttatgataaatgttatttatagtgtctgatactcttgtgaaatataatattattattagtgtaatttaatatcaattattttaatttaataaaaattatataaaaaattactaactaattataaaatattatgttttaaaagtagtaagtacttttttttaaaaaaggaaaggagtaagtactttaatactagggttgttcataaaatagccgatccaat

SEQ ID NO: 56382 - DNA, 888 bp, Cannabis sativa
aatccttgactcccgccggtaacctctacaacgaatcaagttgttgttccagatcctttatgatcgagtcaattttaccatattgcaatcgattccaattaagaagagcaacacgagtcgctccagttttcttgtagactcgcgttggggcccaagggtgaatgaccgaaacccacgcattggcaaccaccagtttgctcatttcatctctcatccatccttattcaaatatgaagcttcttttaattttaggctccaaaccactcgagagaaggcaaagaggtctatggtcagaagtctgggaagagcaaagatagctttaggaaacaaattcaaccaagctccattaatcaatcctttattgagagccgatttcacatggcacctacgagaacgatgattatcccaagtcatcttatcaccttgaatgggcatattaataaggcctcgagaatccacaagtagaaataaaggggataaaggggtccctaccggaagacccttctcgtttcgagtcacttaaaacaaaattagtatcacccaatatcaaccagggcccgccgaacctatccccaatgtccatcaactcagtccaaaacttcttcttagcattttggtaaggagggccatacacacacgagaggagccaagggtgtgacggatgatccgaataaacaaaccagtgatatggttatgagaacaagagatacactcaaaatcaaaaccaaaactttcaagccaagataattcccccagctataccaataggcggcacattaatattaaaataaagtggagggattttagcatacgtaccagaggtgtagcatccactttaagctcggttaggaagacaaaatcaggagagcgagctctaatcagggactt

SEQ ID NO: 56383 - DNA, 3363 bp, Cannabis sativa
aggtagggacaaaatggttcaatcaaggtaaacacatagataatagggtgttttattgtatgaataagtaggattttggacatttgtgttttctctgaaccaaatgggtacagatgctttctgtttgaaatgcatgtcttttctttggtagagtcatcaggaccctaggcaatgtatttgagtttacattgccaattctctgtgttcccaactggttatatggagatgcagcttccgtgaggaccaggttgtgcctttgggcaaccagtctggtggggacctctccaagcagttcataggagaggccttcccaataccaatgttattaattttgagtctagggtattaactacttggacttcacctttctttcatctgcaaacatgttaggcagtgactttgacctgaggccatagatcttattgaaggagaagctgagggtggactgtaggaaatagtttcaagagaagaaactgaagctttggaagcttctcttgaagaagaggtggaatctctggaggctcctccggggagagagtcaacaactctgagagttccctaaaggaggaaaaacaagaagaaaatggcttctgtggtttacaatttgtctatttgggaaatggaccaaatcaagaacaagtttcaaaacttaaagatgctccaaaattatgacaagttctagggtgtaacaaacgtcccaaggctatgttggaacaggctttccctagtgggtgagtctgcaaccaagttgtggatggcttcagagtgtggagctaggtgcatattatttgcaaagcccacctacccctgcgaagttactttgccaatttttacgcacatatagggatcgcgccttttcgactcatccctcaatcatacaaacgtttgaccgaatggtacatcctgtgcaagttccggaagctagatattcgaaggcgagaagaaattctttatttctacgcagtcagatcgcaacacatgaggaagaacaaaaccaaaattgggttttacaaattggaaaaatgtttttcccagtcatcatgttcaactagtttcaccatgtatgtccctgacttatgagactactagttttttacctctggattcccgctgaagagggttccaacgttgtctctagacttctccacttctagcaagatttccaaactttgtctttttcattcaatttctcctttgtcgactctgtttttctaacgaagatgaccttggttttgcagtcaacatcgaacaaaaattatccccagtcttcgcattaatggaaatgctatataggaagatccctaaagacgcctgaaaggtggaaaatttggttacgacggagaaccttcgtaatgtcaggctcattgctaggagccaaagtattgaaacttacaataatcgagacgatgaccatgaccctctaatcatctacaaggaaatttttgctttggttgcctcagtgatgaaggaggcagtcaaactagacaagacctggatgtcaggttgggaacaatcccatccagaaacacttagcgaagaggctaaaatcatggagtttttcacggttgtggccaagaacaagggcactcagggtgtcagcacgtctaaagatgtaaaaaaccctcccatctcttttatgctccatggctcacctcgaacaaggaggcttcgacaaatacttcttaagattatacctgcataggtatccagtgtacgagtacctagatagggtagatgagattatgaggagtctagaacattttgttcaatacagtagatccttttcttcttatgtaccgtccaagtttcgaggaacacggtagttttctagacaaagaggacataacattatctgcacaggaaaactcaaaatataacaaagtcaagagttgcctctagacttgagtttttcttttagctttgcatattttaaaattatctttattcaattactggtacatgcttctaaccctttgttgatgtgctttttgttttgcagaaaattcacaaacacctccatcttgtatgaccaagatggacatgaagaaagcttatgatactttggagtgagatttttgaaagaaatgatgagtgctttgaacttcttagaggctttttaagttggtgatgacttgtattttactccaaaattctctataatgttcaatagttcgctatatggtttttctcatctaagcgagtgttaaggcaaagtgatccaattcaccctctcctttttgtccttgatatggaatatctagctttaattctcaataaagtctctcaaaaaaacagtttaaagtttcttcatcgctgtcgtgctttaaattgacctatttaagctttgtagatgattcttttgttctttaaaggatatctgccttctataatgcttcttcttaaaagcttcaagagattttcaaaaacttcaggtctccaagcgaatgtctctaaggctaaaatgttctattcaggatagagtgatcaggatgttaatcaagtgttaaatgattcaagtttcaaacaaagttagctcccctttcgatatctaggagtcccaatttactcaaaaatagtatctaatactgattgtgaagttcttgtggaaaagatggtgcaccctattgaaacttgaagctctagacacctctcatatataggtcatgtggtacttgtagttatttattcatattggtcttaagtattcttagaagataatgctgaagaaaattgatcaaatttgtagggcggatatttggagtggagttgttgatgctagagggtcggggtatatcaaatgcattgatgcatgcaaaccagaaaaggaaggaggtttgggtttcaagaacattgaagaatggaacaaaggaataattggtaagcatgtgtcaatcttggcaagaaaaacggaaaatctttgggtaaagtgaatccatcctatttatttaatgactgaggattggtgggagtacaatactacctcaaattgtagttgatattggaagataatgattcaagtcagagatcccagtttgagaacctaaactacttaataaaccaggtatgtaaaactctattttctcccccttctcctgctatctggtacactgctaatgtttggatagcttttcctaatattgttttatagcttggttagtggcttggaagaggctcaacacgagagataagttgataatgcatggggctgtagttgaatttcgttgcttgattgtgagatttagcctgaaaaattattatcaccttttttttttactgcgagttctgccaaagagtgatcaaggagctgcggaattgggtggggattggttcaaactttaaggtatttttaactacattcgaaga

SEQ ID NO: 56384 - DNA, 1283 bp, Cannabis sativa
tctctctctctctctcttttgaataagatactaaattgaaacacttttttttagagagaaaataatattactctagttgtctctccttttttttattatattaatatatatatatatattttttatttagaaaagatgcacactacttgaaaattgaaataaaatgatgttgctcttgttatataaatatttttttaataattttttttctcttttatttacttttttttattttttttttacaagagaaaacatatacgaaggaataaaaataaaaagaaataaaataagattacaaagaaataaaaaaaaaataaaggttctttattacaaaagaaattaatccctctagtaaatgtcatgttcgaaattctaaaagttcaactttgtcaactcaaatgaccaataaaaattcaaaaagttattttctcaactctcacaactcacaaaaaaaaatgaaaagttttacactcaaattatttttctcaactatatgtattaacaaaacatagcaaaaatttgactccaaacgtaattttacaatcatgctcggataattttaaaaaatttgacttaaaaattcaataagataattaaaattctccaaatgaacgctcagcagagctcaccacccccaactcaaaattagacagtgtcctcaatgtaacaaaatatgaaatgaagaagatagggaaaagagtacacctaattgacgatatgtacgagacgagagctaagataacctgataatggtaacaataacaaacatagaaataaaatgtaaaaaataaaaatataaagataaaataaaatattatagcatatagaaagaaaaaaacaaatattcagagtgtataatttgggtcctcaagaaggacctcttcatcaaagctcatactctcattataatatttcagtctctggccattgactcaaaaagtcctcccatcggttggctcctcaacctcaacagtaccgttggagaatgcttgtttcaccacatacgaaccagtccaccttgatctcaacttactagggtggagattcaaacgagaatcgtacgaatgtactttctgattcggctcaaaatgttttctcaagatctgtttatcgtgagcaactttcagctttgctttatagatcctggagttatcgtaagcatcacttctcaactccttaatttcagacaattggagttttcgatttatacctgctgcacttagatcgaagttcaaggccttaatagtccaataagctttgtgctcaagttcgacaggtaaatg

SEQ ID NO: 56385 - DNA, 933 bp, Cannabis sativa
catgcatgattttcttttaacagttgccgcctacattcaacatgccaaaatcacaattacagtgttatggtgagttagtgtattgtgttggtgatgatttattgaataaatgcaatattggagagagcccgatagagagattcaaagcggttcttgcatggaacttttccactctgcgccctttaatctttggagttgtaccttataaccctattcttggagagacccatcatgtatctaagggaactcttaatgttctcgttgaacaggtacactttttaattttcacttatataacctcttaatatttttagagttaattatatatatataaatatatatattttataattacatttgaatataattataatttagcttcttactcaggtttcacatcatccatctgtgactgcactttacgcaacagatgagaaagaaaatattcagctcttatggtgtcaatatccagttgcaaaattttctggtacgtgtacattataggatagttcaccagtaaataaaatattttaattctaattttagtattctaaattatttagattttttttttaagaaaactatttatgtaatattacaatataaataataaaataaataaaaaatagacattataattattaggactaacaatttgtatttttgtatagatacaattatgataagacacaattaaagtagattcgaacacaaatacaattattaaacgtgtccaaaactaaaactcgcaaacacaatatgattaatttagcaggtcataagatagtgacatgatttaacaaattaattcagttaattagtgtgagctgacaagttagttaattaaggtagtgtttggttgggaggaatgaaaatataaaaataggaatgagaatgtgaataggaataggaatggaatgaaataaaatttaa

SEQ ID NO: 56386 - DNA, 632 bp, Cannabis sativa
tttttttttttttgggatgaatattgaggaaacagatcagctattgactaataggaattatattcagtacttctaacaccaaaaccaatataatatcactagaacagaatgtgacttaagtttaggataacattgacaactatatttatatacacacaggtttggtcaaactcaatttgaaagaagtaacagtattatttatatgtcatatgtcaaagttagaccagagaaaagagaattatgtgggctaggaaaaatgtcttgtttatgcatgttattggctaaaaaacacggttttgagacaacttgttattattatttatatatttaaattaaaaaggtcagagctcattcatataaagagagaagaaggccccaaaacccaccatttcattattttatttgtaaaagtcatttgttccataatattcttttgcatttatttatgtttttgttgctctgatccgattctatgatcacggtcaaatgtagcaataatttatccatggaaacatttaataatgcaattttgtttttcttgtagagtaaaattttaagttttaattttagtattggtcaggaaattttatgttgtgttatgctcatcgaagtttattatttatttatttatt

SEQ ID NO: 56387 - DNA, 1173 bp, Cannabis sativa
  modified_base (798)..(802): a, c, t, g, unknown or other
atctcaaaagataagtattattgtaagtgttttattcttagtaacgtccaccctaaagtggctgctaggagtaagacttacaatgtatgaaacaatagtggaaaatcttaagatagaatgactttgactctcacctaaacgagacaacgccggattctagttttgatcgaataaaaggttgctagaatggtatccattttagatgagttgagtactgtattcactgaatgatatctttgactctcgcctaaataagatcctgtatcagtttgttggaaacattagaaattatttaagatgtgtttgaattgtattttcacatgtctttcttacttgctaattgtataataatttctgaatgtgtatgaatttatattgaaccatgttgttttgtgttattaatgttgtataatttcgaatcttcgttgttggtctaacttagcttgttgtttttagacaacataatagtgttagatctcgacagataattattagtaaatgcaacatctagttgtacatccaaagatgacaactaagactagtatttgcaatatgaaacaatgaagaatttataaaataagaataactttgactctcgcctaaacgagacatcaatttgcttaaataatatatcattggatgaatagtttataaatcttctgcttatgatgtcattctttttttgtgaaatggatggcgcagatgactatattcaagaccagccctatgttaatttgggccttaggcaaaaataagaattggggcccactaaaaaagtgaggctattggaatttgaannnnnaacctcttagttgttaaactaatgaaattaccactaggctacaacacatatttagcattaaaagtattattatttattttattactaactatattttatatttattttttcgaaatggagccctcagtggtggggggcctaaggcggccgcctccttcgtctcacctcagggccggccctgactatgttcccgaaattatatctcgaaatgatataaatcctcgatcttagaaatcttctacttgtatatgttcacttttggaaaattagacttagagttagattagtagtggtagtccaagctagaattattactcattgtatatttggtataaatttaagtcattgactttaaattttagatttcaaat

SEQ ID NO: 56388 - DNA, 1004 bp, Cannabis sativa
accgccccagtgagctttggtcgtcgtctccaggaaccgaaacctccacatgtcgagttcgagctcgtccaagggcaactctgttgacccacttcctctaaccactgcctccacatttcgacagtgtgagccctcacatcgacactgaaactcttcatctctgacatgggggagacgccggagtttcttgtgggtcagaatggtggtggacggctagacttagggcaataagagaagagagcacgagaagaagagagaaatttaggggaattagggtttgtttttttttttattattctttaattttatgatttatttttttattttagataaatttattattttaaattattttatttttattttttattattttttacttttaaaataattaatttttttaaaatatttatttacgtggaaatgactatgtacacaggtgacatggatcccagtgatcatctatctagattaaacatattcatgacagtcatgagggtcaagaataatgctaaatgcccatgttttccactgacattaggaggatccgcaaaagagtggttcaaaaagttagaactagggtctgtggattgttggaataaattgcaaactaattttagaaggcaatttgttgcagcctgaaagatgaaccttaaatttagtgctttaactaacatcaaacaactaccaatggaaatcttgaagaacttcatcaagaggttaaaagaggaggcttccaaaactaagaaagtagatgacggacaataattggcattattgcaagctggaatctggaaaagaactccattctggaatgagttgcaataagaaggtgcagctagccttcaagatttccagaagagagcccaaaaatatatcaacctggaagaggcccaaataacaactttcagagggtagtatcctcaggaggcccagggtatgcttctggattaaaatttctaggtatcccgcttcctgccgctccctaaacgagtgggacgcct

SEQ ID NO: 56389 - DNA, 1095 bp, Cannabis sativa
  modified_base (1023)..(1029): a, c, t, g, unknown or other
tccttcggctagacaatgagctatttaggttcaaagagatttttacgctgtttacgaatatctgcattgtaaatttataagcgattctaatccgtacctaaaaaaatttttaaacatattttaagaaacaattaggttaaatataaaagaaaatgaaattaatttctttcctaccaaatcatatgaatttataaacatatacacacaattcaaaaaaagaagaaaaaaaacctattttaggtactacaaaaacaaagatgctctcttagccatatgaatgagcacaatattatattggtccatgtaatgagtgctacttaggtagtttacgtaatctaaactaaacaaaattgttccttaaaatgtttataatttagtctacaaaataataccacattagatcgagtttatttatttgtttatttatttattttggtggttttttgtatgatgtactttattatcaataaatagccaacagtacaaaaccacatgcagttgttattcggcatcatgaattcaacaacatccaccatctatatatatatgtataaatataaatatgttatataaaaataattaaaagaaagaaaaaaaaattgtataaatatgttgttgatagttttaaccaccgcataggagtaaatttttgtcactattgattaattgagtaaataaaaaaataatacgagcattatcatatgttttagtgatttaataaatataataaatttgtttagtcactattataaaaatgattttttttccgacgtttttaaatagtcgtttaaagtattcccgtcggtttccataactgttgcctacgaccgttgtaaaacggacaaaataggcgacaattaaaaattgtcgccaatgtagacttcttgacaatttaaaatcatcgcctataccctgttatgggcgacgtttttaaacgtcaggaatgtaaaaagaaaaaaaaaatacagattttatggcagaaaatttgtattttcccatattttttttcctgcattagttttnnnnnnntacctaaattaaaataaaacaactaattaattttattacaatataacaactaattttaaaacacat

SEQ ID NO: 56390 - DNA, 1419 bp, Cannabis sativa
gcgctggtaaaactttgactttttgccatcgcagtttgcaaaattcgcttataaaagttacttttaccagcgcaatagcaaactgtgctggtaaaagtgacatttcttatagtgataaataccacctacagggactcaagatacaaattatttattggcatgttttcctcaccaaataacaaccaaatcgtaatacaagccatctcgaacaactacaccagccctgaaggcaagcaccaccaagtccataaaaatgaaacaccatcacgaggaaggataggatcgacgtagtatgattgaagcctcgaaaaagaaccactcaatcaatgtcaaagagaaaaaactaccaccccacacactcctttcagtcgactctcgacaagacgggcaagcagtcaaaagtttattaaaaccataggtgaggctgatgggagatacagagaggcaaatattaaatgatcttgacttcataggattataacatttctttattctattctttaaaactagacaaatgctaaaaggttctagtaccctcctcagtgtcatattgttattggtgtaattaagtatctgatctcatgtaataacttaagaaaatagcttttaaggaatatcgataaccaatcgtaggacgctatatataaaaagtactaaacactactagtgcccaatagcaataataataccctaaaaactacatcttcaaacaaaataaaaaatcactaattatctaacttttacatcatatcatatatgtattaaatttttaaccttttttttttccttcatacaattttgattagtgaaaattataaagagaagttgaataatacttttatatatatatatatatatatatattaactaaatttacctccatgtaaaatttaaatcaaatatatatatacctataattattgtacttaaattatcattacaccctcacataactaagatataatttcgaatataataaatttgtattttttgtagatggatatgtaggtttgtggaaagttggagcaaaattttgattagaaaaaaataaaaactatcgtgaagtgatagggataaaattagtagaatgattgaaaaaagaagtaaacataatagattttgaaatataagataaaaaattaaagggatcaagttaaaagaagtatgtagtgtaatttcctcaaaaagtatatggaccaatgtagatataacccatatagtttttattaagctgcaatcttcaccctgctcatatatatcaatgctcgcttttctggttggtcaataattaatatgaatgcccaatggcccatgcgtataggctcgtagccttagccatgcactaagaaataagtatgaagaagaaaattagaaagagagaaatatattgcctagcatgatagagaagaggtcgttaga

SEQ ID NO: 56391 - DNA, 890 bp, Cannabis sativa
  modified_base (467)..(480): a, c, t, g, unknown or other
  modified_base (599)..(604): a, c, t, g, unknown or other
acaaaatacagggtccaattggtaacttttgcaaaacagagggtccaaaatagtatttaccctaaatatatagatatataaacgaatcatatatagattaataataataataataataatataaagtaataatcacgtgtatagtttttttatttaatttaattttttacttttaattgattaataaaataatattataaatttaataaaaattttaaaaaataggagaattaatcaaacaatatttataaacttaataaaaaaattaaaataatgagagaattaataagagaatagataaaagtatttggggtgattataaagcgatatgtcaccgtcttacttccctcatttatatatatagaattgaataattatttaatttaataattttaatttaatttatatatattattatgtgtttttttaaaaaataatcaatttaagatagatatttttatagaaannnnnnnnnnnnnntagtaaaatattaatttgtaaatttatgctctaatacaatattaaaaaattgagagaattaaagtgataaaagaaaaatagctttagaaaaattttagaccgccacgtcaccgcctcannnnnntcctttatatatatatagatatagatagatagtatgccatgttaaaaatcagaatttgatatgtgaattaatttaatttatattaagtatattaactatttttgttgatttaaggttaattttttaataaataaaaaaattaattgatatgttaaattttgattgattcaacataatatgaaataccattttttaatgaaggatcttgattctaatttgttacatggcacaactaaaagtctggtcagctaaagagtgtcaggccctgttggaatttattttacca

SEQ ID NO: 56392 - DNA, 553 bp, Cannabis sativa
tatatatatatttatatagttcagttgatattattgtctatataaaattagtgcatacatttaaatattttgggcatttattctcactacaaattcattcaaaaaataataaaattatattcaaatgtttcatcatcttctttttagattttaatatgatgaatttaaaatatattaaataaatttaaattaatccaataaatatacatgtttaatggatagaattgattctatctaataatttattagattagttcagttaattaaaattattagaccgatttgattgaaaaaaatccaacattcattatttaatttgattgaatctcaataaacctaaaattagtagatataaattagtgaacaagactaattattaactatacatatattatttgaagttttgagttttttggattcattataatattttatactttttttttaaaaaaaaaaaaaaaaaacttactaaaaacatactttagttaattaattatataaaataatttttaaaagaaaaataaattaaaaaataaaagataagtgatataat

SEQ ID NO: 56393 - DNA, 2282 bp, Cannabis sativa
tgatttgtggctagaattagaactaaggtggcttaatgggaatggtattttgatgtttggtttatgttggtaccgtaatgaaaatgataattttgtttttatatacgtatggtgtaatggtgattatataggtgtagaacagtgtaatccttatctttatgaatggtgtaatggtgattacattgtaaagacattacaatgttttcaaaaccaaaccaaataatggaattgtaatagtgattccattaggatttagattacgtcaaatcgaacatgacctaagctcaattgagcaaaaatgtcaactgtttgaaagtagtacacaaaactacagctctgttaatggtactaactctgtttttttgcttgataaaggcatatgtgtgtttgctagtacatattattcccattgaatctttgaacatgttaataggttaaacatcattgagatcaatagtattgtttatctttacaggttcgagaccttgacttttctataaaagtgattggttctgaaatagttcgtgatgatgatggcctagcaatgagttcacgcaatgttcacctctcacctgaacaaagaaaacaggtctttcttgcccattttttttctcaatcattcttttagtttggttatgttatttttctatgctaccctacaaaaaaaaaagatattgtctggttagctttatttagtagtgatacaatttgtttgattgtggtaattttattgtttttgtttctctaggcattgtcaataaacaagtctttgtcaagagctagaattgctgcagaaaaaggtcatgttaattgtcaagagttaatagatatagtcatcaaagcaatccatgaagctggtggaaaagtcgattatgctgaggtaaccccaaaaataaaagtcagttttcaagttctttgacttgttcaaattaccctgtagattaaaaatttcgttttcaagaaccaaaaaggggttctttaatgatatgtaatccatactgaagccttaggggtttaaaaatgtgatttttatggtagcagattgttgaccaagaaagtttgaaggatgtggaagaaattacaagtcctgttgtgttttgcgttgctgcatggtttgggaaagtgagactgatagacaacatggagatcttcattcgaaatggtgatctatagtaacctgactttttgttctttattttgggattttttgagacatgaattcacaagaaatttcgacccatttcttctttaaataatgctcatgcttacaatgttgttcccaaataagccatgcataatttgtagtaggttgtcttatatgggtgtaaaggaaccatctttataaagatcaataaagctatgtatagagtttcttttcatatgggcacatttcttcatgtatatattttcaatgagaaagatggaaattttgcattggtttttgacttttctcggcaatgtcgttttgttctttttttgactttattgagatttgatagtttgagaaaaggaaaaaaataaaacaaaaataataataataaaaaatgcatgggaagaagagcaacaaaatgaattacaaatactactaaacgaatttggaatcaatcacactaaattgcaattttttccattgtgtcaatttcgagaaagattttaaggtaaaataataataacatagtcgtggaatttgaaactatttttgctccaaattgtaatctgataattttacttatgctttttgtatagtttgttaattttaatttcatttttgcgggaagtaacatgttagtttgtaagtaaactaatacatgtatcactaattatagttgagtgtgttgaattgtgactttattttttaataaataatcttgttattttgaaaaaaataacctagtagctgaatttttagctttaatttttcttcaaaaagtaacatagtatttgtagtgtgtgttgtgctatggttgcacaaaataacatgttaatttgaaaaagtaatctggttgttaaattttagatattatttttactttagagagtaaacttgtacttttagttttgattttagagtaataattaattcaaatgaagatctttattttataactgtctagaataaattttcaataattttttttagtaagattagtatcaaaaagttaatgtagaataaaataatttaactaataagtcacatatttatttttcccaattaaaaaaaaaaaactaacatgaaaatattgtgaaacaaaaatatgtatattaaattacatattcaatat

SEQ ID NO: 56394 - DNA, 797 bp, Cannabis sativa
taagacgagccacggtgctaaaggagcagcatcatgcaatctatttaacaaatccaagtaatatctttattatgaacatagggagagccatagaaatatgataaatgaaaattattattattaagaagagagatattacagtcattgtggtttaaagagtaggacaaaatattaacactaaccacatcattccaaaacaaaaacaaaccccccctaaaccctgtctagggaccttaaaagcattatcaaaagacaatttagccttaaacaaacgactactattagcaggctgcttagtctccatcacaaaaagaagctaaggacgatgttgagtgactaggagggagagattttggaatgctcagaagctccctaatccacgagcattccaactgatgaaactcatttttccaggcggtgttgctcagcaacacccgcctctttgtcaacattagaaagggtaggaaccacagcaaaatcacaggttgaggatttggctctcttcaacatgctcctgacagaggaacccacttggcagctttgtctagtgtaagatctcttggtgcccgagaaggtgactggagcgacccgagggatgggacgaataggagggacacgggagtccctaggagctggtaagtccctgggaggctcaggatacatgggggccttgccctttgaggtggaagtaaccacagaggttgtcataacaggaacaaattctatgttgtaggtgaggtttctagaagtagggacattaggaggatggatgtgatcaatcgtagcacttgggagag

SEQ ID NO: 56395 - DNA, 1264 bp, Cannabis sativa
  modified_base (1189)..(1206): a, c, t, g, unknown or other
cttcggggatgaagcccatacttagtggcgacactcttgaaacccaacttgaggaggctgacaatcgtcatcgcggggtgaacccccgagacccaacttgaggagggtgacaatcgtcatctcggagtgaccccccgagaccccttacactttgttagtagttataatgttatgtaggtgttctcatctaactttgagagcatcattatgtctgtggttggggtagtgtcatctacctcttagactagcttggcatgtgggtgtatggtgattattcatttcgcttacgaaggtgttagtccatagtttttccttgttcgagacgcccaccttactcaagctaggggaaaggtgattgtctgacttgcattctaacagtcatgtcacccttcatggttcacggttatggccacccttcatggttgacagtcataaccacccttcatgattaacgaccatcccaacggtcatgactttacatattcttcattaatttattcctaatatttttgtgtcatgtgttgctactcttgacatgtcatcgtcattaaaatttgggtaaacaaattcatgattcaaattataatataaatatcatataattgattaacagaaatcagtcaaatccttttattttattagtatttttttagttaaaaaaattatccattaatatatttaatacaataattaaatggtaattaattaatttaattggaattattttaaaaaaaaaataattaaacaaaatttacatagacctttatattctatgctacacgtgtgagccatattttaaggtccaaaattacttttctaattttacgacaaataagatatattatttattatgtcaataaataataattgatcaattctaattaatttattatttcacaaggattagaaaaatattatttttactaaaataatatatttctctctttaatattatttaaaaataatatatacttaactcataaatatagttttataaaataaaaataatagttaaatactatttaattatacaattcataattattataattattcaaaatagtaatttctacaaattactattttacgcttaataatttatttctcatagaaattcattctcactcaaatttactcatcaaataaatttttttccggtacaatgttgtatatgttgggttttgtgccnnnnnnnnnnnnnnnnnnaatataatcaggtttactaattaataaagatcagaaaaacattttatgttgcatggtt

SEQ ID NO: 56396 - DNA, 1837 bp, Cannabis sativa
  modified_base (33)..(35): a, c, t, g, unknown or other
  modified_base (1022)..(1023): a, c, t, g, unknown or other
aaaaaaatataaccatatggttacaataaaaannnaaccattgaatagtcacccatagatatatatatttagaagaaatatatatatatatataggtctaatcaaaattgtatattacttttcaggtttggtcattcttttggacttcccgaggatttaataaccagtttgatcacattgcaattgtagtgcttgtttgagaaagtatttactatatggtaaaaattgatcgcattaaaattttggcagcatcacattttttgttaatttattttaagatttaatatattctctatgactatatctcacttttaaagactttttatggcctaaaaagtttagattaaaatggaccataaaaaatacataaatcttgaattaatttaaacagcataacagtattaattttttttttttaagattttatatatttttcatggctatatctcacttttgcataccttttgtggctaaaacaaagcttagatcaaagtggaccatgaaaaatataagaaaaatattagatttattttagcatataatggtatgtaaaagtggaattttcccctatatctcttggttatatctcacttttggagaccttttatggcctagaaagcctaggtcaaagtggaccatagataaagggagaaatccattagaacaaaagaaaagattgagagtggagagcataaaaaatagagatttttacctatcacttactgtgtagaaattcttgaagatgacaattttgtgtacaaagccttctctctttcttgttttctctcatgtttcactcttacgtttaattctaaaattactaaaaaaatcctctattatattgcttctcttcctttgttataggaactctttttatttttattttttttattattttaatttttcactaaccacccatttaacgtagaagtggtgagagtagagagaatatctcctaactttactctcatcttgactgatcctcttttttttgttatcataataataataatattattatnnttattattattattattttaatcaaacaaattattcatttacatttgaaatggcttataaaaggagataatttatttataataataataagaataataaacctttttttttcattcaacaccaagagatctcaagattcaagtaatgaataattaagcaataaaatagaaaagaataacactaggttgaacgagttcgagccatgtgcaatgctctacatcttggttagaacaataggagccataactttttttatattagtaattacaaggttacaagaatcctcacaaaatcttagagattacgagaagaagattctgtctctagtttagactctttctcttaaccttacactattacaatttacattcaaggaaatctggtatgattctcacacaggttacgaagacttatacaactatttatagatttttattgttgccaaaattatcttctaaatcatcctgacacatttacaccgccttaaatgatctagctcatcacccgtaacaataatccacgtcatcttgaaaaacatgctttcagtacggagaatccgaaatctttataaacacacaagccttccagatacgtacaaaacttccttcctgaatggacctttaagactgacagtaagctatccgggagtgtacctctggattgataacaagctattcggaagagacattccatacgcagtacaagtttatctggaagtactttctagattctaccagaccttccgcacagggcttttcgaatccacactaagctttcgggatcgctcactacaaaaaattgttacttttagtga

SEQ ID NO: 56397 - DNA, 935 bp, Cannabis sativa
  modified_base (308)..(310): a, c, t, g, unknown or other
atgccatatatatcaaaacttatcttcatttttccatatttttgtaaatagcccaaaaaataattgatatgccaatcaaatttaatagcctactaaaaagtaattttttttaaggtactaaaaggtatattattaaggtatattattaggtgtttttttaggtgttttttcagtgttttttcatttttacacttcaaaacagttttttttaatattttttttacgaaaaattcatattgcaattagcgctgcaactcaattgcaacaaaaaatcgtatagaaacccttattgcaactagcgctgcaannnctttagaaactcaaactgtaaattaaaaaaaaagttaaaaaaattatatatagagtaattccccattttattatttcatttacttttttctcgcattctaaacaagctaattttattaaactattttattaagtttctaaaaaaaaataagaaacaaagtagtatctttttttgttttatttgttttgttttattaaacaaaatggtatcacaaaataagttatatcacagaaaaaaaaaatactaatttttgttaataaattattttgtaatttgttatattttctttcaacttactatacttttaattgagtttcaaagtaatgcaaaaattgttaaataaataataacatagttgcatcctaccctaaataacaaaacacacataataatattaaattaaaattataattttaaaagtaactaatttaaaaaaaaaaaaataataagcaaagttatataaaatttaatttaatttaaagtttagttaccattctttcaataataatatatataaactaaaatattacttttaattatgattatctttttaagtgatcagaaatatgtttcacaatattaaaataatatacctaaaaaaataatggtgtgatcaattcttttt

SEQ ID NO: 56398 - DNA, 644 bp, Cannabis sativa
tatatgtttgtactgatcaatataattgatcctttgaaatgcctgaatgaaaatgttgaatatgatagcatttttttaagacatatttagtttatttttaggtgagaaattgacaaaattttcatgaaatatagaacgtatagttagaaaattaagcaactactcatcatgaattatgtaagtatacactagtacatacatgtattgtatataataagtaattaacacattaaatatattcaaattaatgctgaaattataaatatatatttattaattcgtgattagtatctcaagataaccaaactaaaagctgcataaaatatatatttgtaatgtacatattatatcctcaatacactgattaaatacatatacaaaactagggacacgattttgtgccgtgatgtactttcacggaatgtattccgtagtacattagatgggtcttgagatacattaaatgagtgtcagggtacgtttctaccttttaaccctaattacccctagatcaatctcagccatcagatcaaataactctcttatctgacggctgtcgtacattacggaatgcattccgtgaaagtacaatcacgggacaaaatcatatccctctctatccccaaatataaaatatctgaaag

SEQ ID NO: 56399 - DNA, 708 bp, Cannabis sativa
ttaatttaggatgatgttaaaataaccatatatgaatcttagatcttggtaaaataatccccaacagcggctgcttcacgttctaatttagcgttctgcccctgcacttcttccagacagtgtcttagccggcagttttttgtttcataagtactttctcccatagactaggtacctccacgattgtgctcttcatccctcatcccagggttctggccactcccacgctgagttctattcgtgtgtgttggtcgcgtattaggaccaatgtcaggttgggtcctcagggaacgtgtggtccgtgtgctggcgccaccctcaagttgagtcctcctggaaggggttgttcgtttggactacgggttggtagaccttctagagcccatgggccctttcccaagacgttgatgagtttcctcatgtgggttattaatattttctgggttttcagccatgaaggaggttgtttttcttcaaaagaaaggaggattttttctgagctttttcacagaggctcttaatgaaagcaccaaactgttaacgcagatttttcgttaaccaaatttgagcctaacagtgacaatctcacatagaaaaaataaaagcaatagaataaaaagtatgaacacacagtattctttacgtggttttgcagttaaaattttgcatagtccacgggtcaatcttatttagatttctgatagtttt

SEQ ID NO: 56400 - DNA, 1013 bp, Cannabis sativa
ttgatataatatatatatattatttttgtgagtcactagtcacgcaattgatacaatgcgtgaccacatccaaagtctatatttatatatatatatatatatatatatatctctatgtgaggataaaatcttcaatttctaaaagtttttttattataatgtttgaagatatctcttagagtaaatgattataagaaattaaaaatattcaaaatacaactctatctattttctcattattaatttgatgaattgtttttttttaaatattttacaaattcagttatttataaaaatgagtaattaacttattgtttgatgtgctttatgtacagaataaacctattgggaatattaatgacgatgacaagtgaaagacagtgatgagactacaagtaagattcggtgatgacaacagtttttataaatcatatacatgataattttttttttataaaatatatcatttgttgcatttttttttttttaattctaattcaatttattcaaacaatgtaatattttaaaagctaaccttataataatatatatttataataaattaattaattaaaaattattatatattaagtttaaaatagtttgtacattattaatttatttttcttatattattaagagtaaaaggtgaaaatttagtaaaataataattcattttataaatatgtatatatttatatagaatatcaaaatataaatttttatataattttatgatttaattattattgaacaaagtacaacgaacgacttgaagcacgatttatttcctagttatttagatggttgaggagtattgaaggattgtaaaaggaaatcatatgtgtcttaatatgaaattcccattgtgagctattgggtagaggagtaagacaccattttgtaactagttcttttgttcttaaccttgtactcttacattcactcattcatcaataaagcttgcaaaaagacaaggcagttttccatggattagaaaccttatagaaagg

SEQ ID NO: 56401 - DNA, 1039 bp, Cannabis sativa
gctaataaaaaactactggaatgttgaacatttgcgatcttactaccagtatacgtataagaatgttgtaatctctttttgatgtatttttcaaaattcaattattaataataaagttgaagtattattcaagtaattataaagttttattctttaaaattacttgaggggcatatatgtgtatgattaactagaacccatctggaaatacatgatatattgcaaacccgctccactttaaaatttttccaaaattattaaagttgtctatgaacaatataaagtcaaaaggaaaatcaaaaagtagcaattgtaaatgagatttaactcataaaaacaacattaagctacatgcgaagctaaatttctaacgattcacattttatagaaaagtattaaacgaggtaccaaaatgccttgagaaaatgcttaacctaaaatatgaatataatgcctaactattcatatagacaatcaaagatgtacaaagtaattcacaagatgaattattcaaattatgtttaagtttacttaaagcaaattatgactctttatgcgaagtagaattgataaactgctcgcaaatagaaagcatagcagatgacaactgctcgcatacatagtagattattaattacttaagcaatattaaaggaacaacgagaccgattactattccatttctatttttaaatgtaaaaaaaatcattctaatgtaaaatttaattagttttttatcaattttttctatttttgcattttaaatttgaatcttattacctattccatttctatgtatattctcacttttatctttattcttattcttacatttttatttcttctaactaaacgccactaaaataaaaatatcaataataaaaaaaaagtatgctcaaattaaagtattaaataaggatataagataaattattattggccctgacactctaattgtttcaaaaatatgaaataatgctgagcattaatatactgttcttaatattcttatgcatttaattaacaccacagccgcctc

SEQ ID NO: 56402 - DNA, 845 bp, Cannabis sativa
tactaacttataacttaaacatgtaattcacaaaacaaaatttatgtcatttaaatattgctgcatgacataaatagtgacaaattatgtcatttttgtaatattaaattaattttcatgacatatatgtcgcaattaatgtccccttttaaaattcgttaagatcaagttacgtatacattctaatagccaatcaaataatattgaatttaattgaagtatgggagagaacgaaaaaggaaaacattttgaaaatgtagatatatgtaaacaaagcattttttttcaattattaatatataatatatatgtatttatcacgtcaaaatatatatatatatatgtatttataattcatttgactacatatagttacgtttttaataatacatattaaagaaggtatatattagctagtgtaggctgttgttaactgaaagatgtcgttatgaggtatacctatattaacctcaccaaatagtactagtaataacatttatttatttatttttcatatttaattatgatcttgaaatttcctctctatatatagtttgttgagttagggcaggagtggaagacacgaactgatctggccaatatgtaaattacaagactaagtaatatgaaattgaggacacggtttctcttgctttccatctaataataaatataatattaaaaatatatctaattaataccaatgtccaatatatatttatatatatatatatatatttctttgttttgacacaattaattaagcatgcaagcaagatcctaccaacaccatcgctctttaacaaaatgtcctacccaatcacaaaattcaaataaactataat

SEQ ID NO: 56403 - DNA, 1834 bp, Cannabis sativa
cacaaataacaactctgcaaattcctgccacttaaaagggtcctcattccatacatcatccaacacaagtagaaacttgtcatccttcaaagtctcactcaagggtctttgcaactactataaattagtcaacttactaatctcagcttcattattagttgcactcataataacatctttcactagtgtaatgacattgaaatctaaagatacacaaacccaaatcttcaaatcaaacttttcatcaattttcccatcattgaaaactaatttgataagtgaagtctttcctaaacccccaattcccattatagataccacaggaatttgattctcaattttgttatcatccatcaatatcatatctaggatctcttctttttcacgatctctaccaataacatccgaagggttaacaaaggagtgagtcatcactctattctctaacacgagagagatttgttccacattcagctgagttttgatcaaatgaaacgtttccatattcttagcagtctcatctaattgttgtcttatctctttaactcgatgaacaacactaaaatgataaacaacaggattggaccctgaaaagaaacggcatacctttctaccaaaagaggcatgttgtttgacaacttgtctcctcagtaattcacactcaaattcattgagcacatccaccgcatcatggaacacatccttaaggtgattgagccagtttttgagctgtggattcttttcttgcttagtttaagcatctaggagcacatcttggatggctaatgtgattagcttaagcttgtcaagatcttgtttcattccccatgccaagctaacctcttcataagcaagagaacccagtttgtccaagacatttccagctatggtgtaagctagatctgccattatcaaagcagtagagtgttgagacgttgaagcaatagagattagagagagaggagagcacttgtgtttttcaactttgttgactcgatcatctttctcatccaaccacactataactatattccctttgctataattctcatccacaagctggatctttctcatccactagtattgttattaggagatttttcaaatatatacctaaatatgaaaataattacataaaaaaacaaacatcaaattaattatctatacggaaggtaagcataccaaaattgaaaaaaattattagcctctcctatgcctttcttattgatatttaatatttatgttttaatatttctctatgaaaaaattgaaaaactttattcagtatctttcagagtacttcttcttccttcttctataggaagaatgaaagccctactccatctgcacacttcgtgctagggcctattctaattgtttcagcttgatctaaccattataaattatcaggctactttttaccattaactgtggtgaacaagacatccttatctaaaatgatgagaattactactacacataaaagtcccataagaagtctggattagatatgccttttacctgcaatttatttcaattcaaattaataaataataaagcagaaaaatgttaaaattgaaacataattgaacttctcttttcatcaaggcaagtggctcaaaatataagatgctagtcttctcactcattaactatgtgcctctggattcatactttttttttcaactccttgtattgaatatctcaaattgttattgagcaaataataaattggtgagagaaaaaaataaccaatcacaggtgttcaatgatcaatgttcctcaatttaacagatgaaaagatctaaatttttacaaaataaataaataattt

SEQ ID NO: 56404 - DNA, 1052 bp, Cannabis sativa
catcctcgtcaccagcaagattgatggtatcatcataagtcttcctccatgtatctttcgaataataaggtgagcaaagtgtgtacacactcgtattcatttttaatgtcgcaacacttgtatgaaggtaatgcaatttcaataatgtaaacaagtcactggtgcatgtcctttcaactaggttcacatcaccacctctttcaccgttaggtcccctaccaacgttatacaaattagctcaattttgttggacatgcttgaacgttccattttcatgattttttgccaatttttttacaaagagcgtggctaaaggggttatacatttgtctgcatttttgaggcgatcaacgaacaaaaattgcagtgtgagcctgataaattcaaccaaagtagttattggatatttcttgaactcttctgtcacactgttgaagcttttggcaacgttactggtcatgatgttgtatcgataggccaaacaataagggtgacacaacttcaaaccctatactctccacatatgcatcaatggctatgattcatctttctaagcttctcaaactgtctatcacatttagtttttgaccatgagtaagtaacattgtatatttggttatgaaaagcatcagttgtgaacttggagttcacgttcataacaatgtggtgatagcatgcacagtggactactttgggggaaaacaagttcaacatcatgatcaatgctttgatgcctatcggacacaaacactaagttctcaaccacccaaattatttccctcaacttctgtaagaaatacgtccaagagtcgttattcatactgtcaacgataccaaaagcaacatgaaacaattggttattggcattgtatgccacaacaactaacattatactaccatacttcgtcttcaagaatacgccatcgatattcaaaacaggacgacagaaagtaaatcgcgttctacatgcatcgagtgatataaaacagtacttgaaccgctcatcctctaaatacaagtcagtaatggtacctagattcttctgttccagc

SEQ ID NO: 56405 - DNA, 1177 bp, Cannabis sativa
acttggtaagttcgtcgtggcaaacttgtaaaatcggaacaatttcactttttgtatgaagaatttgggacaagggtgagactttgggcgacggcccagctagcctcacattttctagacggggattgcctttatgttttaaaaaatgtatatttaatttaagtgaaaattagatagaatatggaataaaattacaaaaatatgacatttataaatttctcactcttttatgatattttttcacatttaagattttctatggtacttgatatgccacatttttgtaaatctattatccaaactcatatttcatatttttgtttctagcccgattgattttatctttttctttggtttattttgtatttgcattttagagttttttactctatcttttccttctactctaatatttttagtaagttttgtgtttgcttgagatattatttgattattagagtgtacaatattaatccacctctatttttattatttttatatatcatttctctctctctcctcttttttttttaatttttttgtcattattttatggtttttattgtatttttgtctctataattttctttgttttccttttttctctttggttttagtgtttgattctctttgttatttttactccatattgtatgcttaaatcaactctggtttttcagcaagcaaataaaaaaattaatcaaaatagagaatgaattaaaagttagttattcggtattgatataaaatttatatgttcaaagctggattttaaagttagtatcatttttaaagtttggttattagacatcgtgtattttttattatgttgtcaataaatatgatttttttttcctgtctcttttaatgaaataattagtttcttttaatgtttgatgaaactgatttttaaaattagtatcattttcgatttataattttttttcatcgtcttgtttatgaaattattttttctgcttcttttaatgttgatgaaattgatttttaaaatttgtatcatttttagattataattttttgtattgtattttttcagtataatgttgatgaaactgattgtttttttgatgtatttagtgaaatagttagtttattttaatgttgatgaaattggtttttaaagttgacattgtttttacattattattattattat

SEQ ID NO: 56406 - DNA, 1211 bp, Cannabis sativa
ccaaaagaacaaaaacaactgctataagaagaaatcttcaaaccaactcactatcgagcctagaaaatctcctgaaaaggctgctcctactgtggcgagcgccagtgaatagccccttttatttttttttcttttttgtctttttgttttttttaattcttttttattttgtccttttgtttagcgtgagcacattattattattatttttcttaatacattgatttgaagcattcagtttaaatattttatttattattgtattatttttatctctttctctctttcttataacttttaaaaagaaatctaatcacagaagaatttattttagctcaagaattttatttttgaagatcattattttgatgtgtgataagcattttttttttttacttttactagagaaaataaatagaattaaaagtaactatctaatttttattctatataattaacaaataaatagttaaaattaaatataccatctaattttataaattactaaaaatcttttgttaatacttaaaagttatgagataatatattatgaacaagtttacttaataaagtatagatttctaaaataacttataaaataataaagcaatataaatttagttacttttaaaaaattatattaattatatactaaatttttaatgagaaagtacacttaagtttttttttttttttaactaacggaaaaatttcattaatcaaagaccaaaacaagctacaacatggccacacccaaccggccccaacaaccaccagcaaccactacaaaattaggcgtaaaaacatgcctttttcagcttgaataatcctcctattctttaagctatacaacctgtatttaactatttctttaatctcattaacaattttcaatatagttaaacaactactattatgcacacaaaaattcctattttcccaaagcaagtaaacagtggcagcaaagagcaaaacaatcacaccaggattcttgttagaaaaccagcagcgcaacctgttgtagtccaaaggccaggctgctactccacactagtcaaagacctgcttcacaacctccctagatacacagcaggtgaagaaaagatgatggtggctctcctctttaatgccgcaaactgggcaataactagagtctaaaataatgtgaaatttttggaagttatctctagtgagcaagtgtccatgaacca

SEQ ID NO: 56407 - DNA, 2539 bp, Cannabis sativa
aagcacctccaaactcggtgtgcaaacttaacaaaagcatttatggcctcaagcaagcctcaagacaatggtttagcaaacttagtcaaactcttatttcggatggctttattcaatctctttcggacaattccttgttcattaaaaggacaaacaacatattcttggccattcttatctatgtggatgacatagttgttgcaagcaacaatgaccatgcaatatcacacttcaaaacatacctccatgacgaattcaaacttaaagatcttggcaccattcgtttcttccttggtcttgaagttggtcgcacaaagaaaggaatttcggtctctcaaaggccttttacacttcaattactaaaagaaacaggctacataactgctaaacctgtgtctactcccatggaaacaaacctaaaattaagtaaagatatagggaatcttctccccgatcccacagcctatagaagtcttattggcaaactaatatacttgacaattacaaggcccgacatctcctatgatgtcaaccatctaagtcagtttttaacttgtccacgggttccacatcttcatgctgcaaatcgtatcttgcagtacttaaaatcaaccctgggacaaggcctttatttcccttctaacacaacagccactatctcagcttatgctgaaacaagtctttccccatcaaatgttcaagtatccttctttttcggatgatgattgaggggcttgtcaagacacaaggcgatccatttctggttattgcctcttccttggtagctcccttgtgtcatggaaatcaaaaaaacaacaaactgtttcccgctcttctgctgaagcagaatatagggcaatggctaatgccacctctgaactcacttggatccttgctctcctcaaagattttggcgtcaactccgctactccagcactgctttattgtgacaacaccactaccattcacattagtgaaaatccagtctaccacgaacgcacaaagcatgtggaaattgactgccacttaatccgagagaaggcccaacaaggctcgatcaagttacttcatgtctcctcacaaaacaaccttgctgacatattcaccaaagggctcttacctactcacttctccaaccttgtatccaagacgggcttaattaacaactacactccatcttgaggggggcttttaggattagctttggattaagttagttaaggatagttttgtttgttacaacttgtcattacagctgtacatttctgttacagtattggttaggtttaactaaccacttctgtatcgagctatataagctctcttttccattgtaaaattagttcagtataataaaataccaaatgctctgatttttcctctgttttctctctatcctttctcatacaattgaagctaataaagatctgtacatattacaacgaaaatgttcaggggtagattaaggtgctaaatatcacaaaatgtagcatatcgttattggtgtatttcaatatcaattttcatatcacatttatatgatattaagtgtcttcaagtactactctcacataataataatagtacaaaaaattatttactaaaaaaaaatagtacaaaagttattcataaaaataaaataaaaaaacagaataaaaaaatatttccaaccaattattaagtatgatatctatgacattgaatattttaaggtgtcaataataaatacaaaaaatcatttatcaaaaataaaaatatataaaacataaaagataaaaacaaaaaaaaacaaaaagataaaaacaagtctttcattttgtttttattttgaacatccatccttattgtagatgttatagatgtatatatttgtctactcttcattattatttggttgttatttttatactatttattagtttttttttttcaaaaaaataaatttatttttattgtttagattgaaatataatttggtgtattcaattctttaaaaagtaaaagtttcttttgttctattttaaatcgaatacaaaatttaatttgcataatatacattaaaatttatttataattttcttttaaaataaatttaattttcatatggaaaaattaattttcaaaactaataaaattatagactttttttttttaaataaattataaattatttatttaaattattttttcggcatgggcaaccccactatgtatataaatatacataactgtcggtggaataattgctcacatgcctaaattacatttaggtagagacaaaaaaaaaaaaaagaggattagatggatcactgtatggcttaaagagaaacataaaatataaattgttatgcgatcttatccttgtactttcctcgttcccttgtttccacatcttaatataatacacacatttcaaattttgagatattttgatattccaaactaattatggcctttgttgatgagtaaaaaaaaaagggaaatagaaaagattgtgtaaataaataaaataatgacagtagaaggagcaaattagtaa

SEQ ID NO: 56408 - DNA, 1842 bp, Cannabis sativa
tttctttctaggcatccaaagcttcactactacaatttgaccctttagtgacactctttagtgactcgcacaaaagtgcgtgtcactaaagaattaggagtgatatttagtgacacacatagtaagactctaaaattttagtattagtctcttgtcatgtgtgtcactaaaactatgaaggtcactaaggtcactaatagttttttttttttaaaaaaaatattactgacctatagagtcatgccaggagtgactgcaaaagcttgtcctgacatgccaggcgcgtcactatatcatattaatatattaattattattaaataaatttaatattaagatattgtgacacgctaggggagttaggacatgtgtacccagtcatgtcttgcatgtcactatatgttaataaataatacagattattaattttttaattttatttatttttttaaaaaaaaaactttaattttatttatttaagtaaataaattaatgagatataaaagggaaattataaaccctaaagccccaaaccaaacttcctctctctcaatcgatattttctctctctctctctctgcgctctacccaccccgatctacggcagccaccagacaaacatttcgccgtccgagcccaagccaaaccccatgaaccccgttgctctctctccgccgtccgactcgctcgtctctcactgtcatagcaatggcagcaccgggacgcctctaacctcacaacagtcattctccatcgtctctaacctcacagcagccaccgtctcgacgcctctctcttccacaatcgcagctgacctttatcttggtaactcttaacctgcaacttcaacgcgagtttctcccctatttctctctgtttctctttgttcactaataataataaatgatgaaatcaactcttaatttaagtcaagtggtgatgttcatatgaaaatttatttaaaggaacttaaccatggctttggtctcattgactttagactccagggattcttggtgagtaaaatttattctgacgaggttatttgtatgggtgtcgctatcggaaacctctccatggaggagaagcaggtcttctaaaacgtttagatgagtgttaatttccttgtttcactcttgaagaagaattggcaaaacgtaagttctggttttatgattttgtgtaattgcaagctagagcattttcctttgaaataatttttgatgggagtcatttttagcttgaaagattttgatgtttacctcttttttttcaccaaatgatatgatacaggttaggtgtttgttcctgaagaccaccatggggaagcgacaacgcgtgttttaaatatttaatctatttttacatgtatggtggagttttgtagtgagatgttttatgaggttgatacttatataaagtattaagttggaattctcaaaaagaataattatgtgtaaatttatgtaatttttttttttttgtgtaaattataatttataaatatgtatgtatttgttggtatttttgttatattaatttacattaattcttgatgaataattaattatatggttaagtatattattattgaaataattaattaaattattttaataaattttataatctataatttgtatttaaaaaaattaatatttattttttaaaaaaaaaaatagatatagtgacactcttaaagagtagttgattctgacaaagtctgactttaaatgtctacagtgacacacatagagtgactgtaaaagggttcagtgacacgtgtgaagtgtcactaaaaactatctttccagtcaccctcattagtgacacgcggtgaag

SEQ ID NO: 56409 - DNA, 917 bp, Cannabis sativa
ctatatcttgtatgaagaccctgtcttactattgggagggttgtattccacatgtactctgtcttggcttacatggacatgccatgtcaggtggataaaatttggaaaacataaacaatcattgatcctctatagaaagtttacactgagtagggataaatttatcattttactcttcaatgtattttatctttaaaacacttggctacttgtaaataatatttcaataaactaatgaattactgaaattagcgctttatcatttatcacatttagtcaagctcagaggaaactatcattttaactctcccaatcaattgctctatcgaatttctaagaagtaagtatgggctagtcctacaggtaagcgggtaacgaacaagtcaaagaacccatatagaacaattaagctagaacttaaccatgtcaagattgagatcaattgacctaagatcaactaagtgactttgacttagaaagacataacattaatatctttttcactatcaatatcggtccagtccaatatatacccgatacatccgatacaagttcactttactaatgcaatggaaaagacattctacttatacaagtgtaagtaaactatatcgttgattatcaagtcagtgtgaatccaatgcactgataaattgtgggactaaatagttcgaagcatataatcatgattattttccacaatgtagacaatactataatcataagtaactatatattcaggatttttaatagaatttatatattaaacatataatcacgaaagtaatcatgtgaaccatgcaacataaaatgatttttgaagttttattaattagtaaataagattacattgaaatgatttttatttaaggcacaaaatctcaacatgtgaactgtttggtgatgccaggtgtcgt

SEQ ID NO: 56410 - DNA, 912 bp, Cannabis sativa
atttattattcgggctccgttaacacctcaacaagaagtttacctccaacgcgtgcacaatggtatttcagcaatagagagtgcaatggaatacatccaactatatgaaattaccgcagaatccatgacttggctgttgagtgtagtagagaggatgcctgaacagttgcgagatgcggtcaacatttttcaccgtccaccctagtgttccttatctgtttagaaactattttggtgtaatatggtatgattttggctagtggtattttattattttttgctaccactgtggtttataatcagcttatgccaacagttaggcattaaatagtttgatgttcttttgatatatatgtatgtaactatatatatagtttgtaattttattttgtgttctatcttttttattaatgaaatttaaatttgttttattaattgaaatctaatacatgaagtcataaattaccattactttacttgcttttcaacttacaaaaagaaaaaaaaaaaaacaaaacaaatgaactaatctagtctaaactctagtttcgtataaaaaaaaaagcaccattatttatagtcatgtataataatgtgagagttacactaacttattagaagttttttttagataaaataattcttagataggatcaacgtgatgacgtattagttttgggtaattattattagaattggaattgaaattggaattagtaaatcatttttagcaaatatttatttaaattagatttttgcaaattatataaaaaatattatacaaaaaaacaaggcaaattagtatttttacttcctaaattttgatatgtactaagggtgcgtttagaacacttttttaattagttttctatttttttaattaaaaaggtgaaaatattttctaaaaatatg

SEQ ID NO: 56411 - DNA, 864 bp, Cannabis sativa
agctttctcttcagaattccatgctcaattttcttcctctcgcaaacttccgttgcacctaggagatctggtcgaagtaaagcagtgactaggcgagccctttcgagcctacatcagcagattcatgacggaggcgaccaaggtttcacgagtaaccgaagatgaaaagttgttcatgatacagggggcattgaagtcctcagtgaactttggaaggacataaggaagaacagtccggtagactcgatgagtgattttcttgactgtgcagaaggttttatcaaattcgaagaggccattcagcaatcagaaggcgaacaaaaacctggcaagtcaaaagctcattccaataggacatccgtccaactcccccattacccaagcaattcaagttcaaatggaaaacgttccagcaacaataacaagcatggtaatgggaaaaagggaaagttcattggaaaattcgaacaagctccctgggagaatcctaccaagtatactgcatttacaatcatgatagaagacatagaaagtttttacatggcaactcagtcggtagccccatacaaaaagctcgcaccgatgaaaaaagatgtcagcaagagagacatgactaggttctgtcgatttcatggagattacgaccacaaaatcaacgagtgaaataatctgaagagagaaataggattcctgataaggaaacataacccgcatatacagaagtatgtcaagaccgatcagaatcagtggggtgattcaactaagagatgctacctccactagtagaaggacatgtacaagtcttcattggaggcccacacatagatggagattcaggccaatctcgggagaggtatgcccgaa

SEQ ID NO: 56412 - DNA, 991 bp, Cannabis sativa
ttatatgtataacatgtgtcactatacaaaacaagtaaataaccataattgaaactctttaacaaaaaaactgctacgcaccatacagtcaactattgccctaccacaaaaactgttatgcatcattctcaatattattaattacattgcaatataacttgctatgctatacagttaagactaaaaggaaaattactttatattgaactctcaggatttatcttccaagataagttcccgtggctcaacaaagatatcaaaactgtcacatgcattcctgttgatgaagaagactttcaattcaaatagacaatagttgattttatccctgaggatgttgtggtgtttccattgtgtcatgttatcatttgttgcagaagtttcttccctactcaagacccaacaatctacatttgccatccattaaacaaggaaatgaccaaattgagttgggatgaacttggaaaggacaacattatatcgttagtgtttgatccatctcagaatcccatacacatttctacaaaattcaagttagtgaaagttgatgcaatagagattggagaagaagaagaaaagtacttcacatttgaaatatactatttaagaagaaaagaatggttgaaatcaatagagatttgtaaatggaataagaacataattttgttctttagacttcaaatctctcttgatttcaaccattcttttgttcttgaagagtatattttgaatgtgaagcacttctcttcttcttctccaatctaaaatgcttcaacattcactaacttgaattctatagaaatgtgtgtaggattttgagaaggatcaaaagctaaagatataatgctgtcatttccaacggaatcccaactcagtttggtcatttccttgtttaatggattgcaaatgtagattgttaggtcttgtgtagggaagcaactactacaaaaaatgagatcctaacacgatgaccataccacaacatcctcag

SEQ ID NO: 56413 - DNA, 993 bp, Cannabis sativa
tacaacccttatgcccatgttcaaatgcttcttatatggcttaaaaagaaaaccaaaaggaaatttgtaatttaaacctatagccatttcttctaacttttgcctattgaaaccttcaaattcacagttgtcgaagtatgtaaacccccctccctcgtaccttaagtttccatatggagtaaaccaccgacccccgtgaaatagtttcacagtaaatagatcatcattgcagcctgcaatcaaattaaaaaacaataatttagccaatgtatctcattcaaacatttaagcaatatattgtgtcttaagtactagctttgttcaatgattgggtagtctcacatcatcacactaacaattcctccaacataaaaactaggatatatattgcagtagctgattacatttattatctacatacctacacatatatatatttatatattcatatatatatattatacatagctgattacattctatggaaagagtaggtaataaaaatattcattattgtattttttttgtttagataattggtgttgtcataaacatctaataggaaagagtccccattattgtcataaatatttttatatcgacttctactcatttctcaaagaaagaatggatcacccatctaaatatggtacttaattaataatcttgttatattactactacttgatctttgtgttaaatattttaatttggtcaactaataacaagaatttaaaatgaataatacatttgaaggtttcaaagaaggaatggtggcttgttgtggcagtgggccgtacagaggagttttgagctgtggagggaagagaggtgtgaaagagtatgatctgtgtgagaatcctagtcaatatcttttctttgattctggtcatctaacagatagagcttaccatcaattttccatacaagcatggagtgaaggagactctagtttcataacgccttatcatctaaaagcattatttgacttta

SEQ ID NO: 56414 - DNA, 1357 bp, Cannabis sativa
  modified_base (1314)..(1325): a, c, t, g, unknown or other
gtgagacaaaacatagaaaacatatcaaattaacatacttttttcttgttaccaagctttcttcaagattaccaagaatgagatctttcggatgattcggttttactccaatgcttggttccttttggatagaatcagtaatgatgtttggatgaatcgagataggttgttctggttcacctgctttagttgtggcggcaaattcgacatttgcttctttagaattcaagtctgctgcattagaatctacatttgctacttttggtggagtatcgaaaaaactatcaatctcgatttttgtgtataaatctgaaaaatctttaaaatcatcaacaaccacattagctgattccaaaatagtttgagttctcatgttgtaaacacaataggctctactatttgtggaatatccaatgaacacaccaacatcacttttagcatcaaattttccaatatgctcacgatctctagaaacatagcaaacacatccaaagacatgaaaatgatttacatttggacgcttaccttttcagatttcataggatgttttggaagtacctggacgaataaacactctgtttattgtatagcaagttgtgtttatagcttctacccaaaaccattttttcggcttcttgctatttaacatcactcttgccatctcctgcaaactttgattctttctctcaataactccattttgttgaggagttttatgagctgagaattcatgagttatacttgaagacttacaaaaatcatcatatatagagttttcaaactcctcaccatgatcactcggaattcaaacaattttacaaatgttacatcatttttcaagtctttatctcaaacaaagagttttaaaagcatcaaatgtgtcagatttttaagttaaaaaatctaccgaggtaaatcgagagaaatcatcaaaacacacaataaatatatcgcttaccattcagactttcaacttgaattagacctataagaaccatgggaagcaattccaatatttttgtgatattgatatctgatagacttttgtgagtgattttcaatttgcttaccaagtttagaagggttcgcacttaccaacactttctttacctagtttaggtagaccatgaacaacacttgcatttgacaattttttcaaatttttataattaatatgtccaagttttgcatgccacaaatcagcggtgttgttgatagctgaatgataagtgaacacaggggttaagatatagcaattatcattagatcgacatcattgcaagatacattgattatcatcattaagtacataannnnnnnnnnnntcaaatgagacagtatacccttggtcacaaat

SEQ ID NO: 56415 - DNA, 835 bp, Cannabis sativa
ttttcggctcaagacataaaagctgctagtgcgaaagggattttagagcttccatgctctattaactctcagattattcagcagccagacctagctgcaagggctatctggggtggtccgaatgttctaaaacagagtttcatcttatggcaggcatcccactctaaactgctcacaagagaaaactcaccatctttcacctaccagtaactgatacttgttgtgctgtttgtggttatgatagtgaaaaccatcagcatttattcttcaactgcaggttctcaaagctagttcttgatgcagtctttgcttgggtggggttttgaagttggtcggctaagctggaataattggcttaggctaggaaattcaagcttgattgggagattgctggttgttattttggcagccacaatataccatatttgaaggaatatgaacaattgtatctttttgaattactctaatactattacttgtatagccagcaaaattaaaaaagatgtcaagtatagattgtatcttctcaagaataggaatggatccaaagtggagatagatttactaaagagatttatttgtaattaagtgaggggtgaggttggtctcctttggagagccgtgagggtgtgtgggtttggtatgattaatgaagctttcttctcgattaaaaaaaaatatattacacaattttaagaataaagacattattactagtaactagtaactagtaactagtaattagtaatgtatcttttgcctttgtagcaaggataaaatccacctcaataacaatcaagtcctacagtagatgtaattaattaaggtttaatac

SEQ ID NO: 56416 - DNA, 1344 bp, Cannabis sativa
atatacatattcataataataaatcataaatcatattccaatacataaagaatttaaatttaggcagataaatacatacaaaactatctattttccttacctcaaatcccactgcttaagacttgttatctcgtcactactacctctaatataagacatggatcagggccctaatattaaaatttacactcttacagtacagcaaaaagaacactctttttgaccaaaaactacacgaattcagtgaaagatgtcttcataaaaattatagaaaattcaattatctttccaatgacataaaagtcatcaaaaatggattaaaattgagggagttatgatagttttaccgaaactatttttgagaaggaatatggagtaacgaattacacaactcaacaaaaatataaacttttggcattgaatggttcagaactagaagataatatttcatgaaagttttagaaaaaataaattctctttctaatgataccaaaatctttgaaattgaaattatattcagagagatattgtaattttaccaaaatagttttgcaagaacaagattcaagaaacgaatcacatgatacagaagaaaactaactttgatgatatattgttggaatagggatagattatttttgtactttgatgatgaggtggtccatgccattttggctaatcctcttggtgatgtttctatggaggatactctcatttgggaatatcactcctctggcttgttcactgtgagttcagcttaccatttggccaaatctgttagttctttaccgacttcttctagtaatgctacccttgttagatggtggacgactctttggaatttgaaaatgcccctaaaaataaaacattttatttagaagacctttcatcatagtcttcctactgccttaaatcttttccacacaacaaatcttgtcaaaccctttgtgttctctttgctctaggtgtcctgaatctgttacccatgctctattagagtgttccagagcttcaagagagtggaaagactctagatttaaaggtttatatttgcttaataggaattgtgatatttgtgagtttcttttaagaggttttcgagacttatctaagaatgatctcagattcttcctcagaattatttgggaaatttggaaccgtcgtaatatcgatcagcctgtttaacaaaagcaagatttctttttcctctgctgatttacagatttcaggtctactgcaagattttgatgatgcccaggattttcatgctcaccctcttcctaaagtgtttttaggttgcagccatggcaattctataccagtaatccccaaactaggttattt

SEQ ID NO: 56417 - DNA, 929 bp, Cannabis sativa
tttttcttaagttagactcgctatttaattacaccaataacggtatgagactaaggagagtgctagctcctttagcaattctctttaaataatgcctgatgagtaagagaacttaggtgacaaaatataaagatattatattattggagaaaaaataataatgtttttaaaatttacatgatgtcacacaataacattaatactatattttttatttattttttaaataaaaaattaaagtgcaacatgtatataataatttgataaagaaaaatatttatgtatattatgtttttttttttattttttttttttgaatttaataaacggtaacacatatatatttatatacataatttaattctttgatgttaaaatattataatttttatatttttttattataaatactcacgaacgatcattcattttctcacaccaatgattttttatatattttcacgcattctttttcttacaattcaatattataattatttaattataattttgctattttaaaagttatttttaaatttagtgtaaccattttttattttgttaaaaaattaaaattttatgttatgcttatttatattaatatatgattttttcttaatttatagtgataatatttataattaaataataatgtaagataataattatagtatttttaaaaaatattatattattagaggatttttaaaagtaagagtgctaaaaataatgtgaaagaaagataaaataaaatattatatttttagataaagtgaaaatatttaatatctttaaaaattaatactattgtaaatgctattaaataacactctaccccggtgatgagtgtatccaaatggaatactaattcaaaaaattcttcaaaaccccaaatgtctcaaaattcaaatcacaattaaacactactc

SEQ ID NO: 56418 - DNA, 778 bp, Cannabis sativa
tttttttttttaatttgaggtattaaataaatattaccgttaaatatcaactgaatgatcactgtgtatacctgtatatatgtgacagtaaaacctcgaagctaaacagtgataacccagtttatgtataacaatgatatctaactggtgcctcaaatttataaagaaaagtaaacttaaaaatgttttgccacaaaaaataaaataaaaagattaagcatataaaatcaaaatattttactgccaataatcctacatcttaatgtttaacctattttgcactactgatgatttgtaggagcacgtgcattccacgtgcctactaggggtgtgcataaatcgatccaattatagtcagatcggattggatgttattttaaatatctaattggatcgaatcagatagtagatggggtgtctaaaaatccaatacatccagcatctaatcaaatcaattagtattttcattagtttggatgagtaattagattttatattgttatacataaattctatatgtatttatgaaaattaacaattaaattttactatttttttttttagattggatggatccattccaattcaatacatactggacctaaaatattagttgaatccgatccgatccaaaaaaaaaataggtctgaaatattagatagacccaaattaaaccaataaatatatacgaaatgcatttaatggataaaactgatccaatatgttggatcgattggatgactaaaattaattggatcggatcggataataaaatcta

SEQ ID NO: 56419 - DNA, 3927 bp, Cannabis sativa
  modified_base (3846)..(3846): a, c, t, g, unknown or other
tgatggtgatggtgatggtgatggtgatattgggtatagagtgtattttaagggtttggttagtaaagaaaaatgtgagattcggaatatgattatggctggaattggagttgctttgtgtgatcccaaaggtaatttgattttcgagatgaggaaacctttcttagggaatggttttagtaagcttggggcggaagctaaggctttaattgaagctctcaatgctgctattagtatgaacttggaaaggatcactctttactgcgacaactttactttttatcgattcgtgagttttttttctttcttaattatggtagtttctcaattttagttttggattttttacttgttgattttgaaattgtttataattgtttgaattttgtttggataaatagcttaattgcacaacaatggtatatatttatgtacaaatgaccaaatcccatcatttggaaaggtttcttaatgttttttactgaattgggaattttaggcattacagacttttagggaatccattacttgtggatagtgaccctaattttaggtagctgttgatgcaattgtggttttagccactaggaagagttaagtttgaagattgtacattcctttgggaatacatttttctcttcttaggttcattagcttatttactcttttatgttaagtctaggcattttatactctccaattatgtgttcttgtacttttaccatttatcaagaattttgataatgatcaaaagaaaatgcaattcataaaattgtatcttatatatcattagatcaaaattttgtttttttagatgatgacatattgagtttatttcatctttgtaggtttctggtagatggcctgtaaggcagcgcaagatgaaagacctaatgaatcaggtgaaaacccttcaaggaaagtttgcctattgcaattcgaagtatgtcctgcgtagtgacgttaagcatgcttttaaacttgcaaaggatgccattgaatctaactgtcggttaactttgtacgagacttgtgttatttgtatggaggatacagatgtaaatcagatgttttcagttaagaattgcttacacagatactgcttttcatgtatgaaacaacatgttgaagtgaagttgcgcgaagcccaaatgcctaaatgtcctcatctgggctgcaaaactgaaattgatagtgaaagctgcgaagatttcttgacacctgaactttttgagcttttgcgtcagcacataaaagaagcagcaactcctgttacagagagagtatattgtcctaataaatggtgctcatttttaatgtcgaaaagtgaagttttcgatcttgcaaagaaagaacgcattcatctatcgggagctaggaagtgcttgaaatgcagcagcctcttctgcattaactgcagagttctttggcatcataatttgacttgttctgattacaaaagtaagaaatataattcaagcaatgaggatgcaaagcttaaggacctcgcatcaaagaatctttggcgccagtgtagcaagtgtaaccacatggttgaactttttcatggatgccatcacatcacttgcaggtatatatgactctatctagtgctttggataattttatctatagtttttaaacttaccttgcattagaatcaaatcaaaagggaaatttgattaaatatgcttctattagattaaaattaattacctaaactaaagttaaaatatataggttttgtgtgccaacttttccgtatagcttcaagttacccctctcatttcaaaaagcccactctcagctctttccctctcgttctgtcagtttccttctcatccaatcaaccaccacaaactaccccaaaattcaccaatcacaccaccgcccacgaccctcgctctctctggttctctctagtgcgtgaccgacgacccacaacctccactgtcgaacggacagatgaacgatttgtggttttttttttttgtattttttggtaaaaaatcaagttttggtgaaattcgctttttttgtgattttttgttatatgattcgatagtggtgcgatagggtacgatggtgagtacctaaaggttagggatgaaggttcgatagtggtacgatggttgataaagcacgatgtggtttgatgtggtctgatagtagtttgataggtgcttaaaatttatgccatagaaaaaagagagagtgggtgaagtttttgatataaaagcgataatttagaaatatatgaaaaatagacttacattgccaatagtgatttaattttaatttaggtcatattttatcaaatttcccaatcaaaaacatatgtgcattgcagttatatccactgattaaacttcattatgatatttttagtgttatcttaaattctcatcatgtttctttcatcactatggcagatgtggctatgagttttgttacaagtgtggagccgagtggaagaacaggagagcaacttgttcatgcccactttttgaagagaatcatcttttgtatcggggttatatacacgaagatgaatttgaggaagatgattttgaggaaggtgattttgaggaggatgatattgattttgaggatgaagaggatgaaggcttctatggctttgatcttaattttaactaattaaaatcattgacttgggttcttgatgaaatagttattgccttgtaaataaccatccactccaacaagtaaacttcatctttttttaccttgttttcttgacaaaagtaaactatgagatgaaactagggatgagcttacccaaagaaattactatctatctagggccattttggtagggaatgggaatgtagagaagctaaaatggcttttttgagatttaatttatttttactgttttaaataggcttttcttcatcattcaaaagaaaaaaaaaaaagtagattgtgaatgagaacaaatcacactacattattggtgtcatttagtatttctcgttttaaaatagaagtcatttcacaaaactagtgaaaaagtcattctaatattttaaaatgcaactaaaaaaaaattgaatgaaaattaatttctttccatcatactttattgtcaccaaaccaactaaaggcaaccattggtgttataaataagaatacttgtaatgaaaattcttatttaatgatatttgtagtaggtaaaaaatgcatgttttttacagcacctctaaggagactgcatatatgttaaatgtcgtgcatgtgccttccaacgaagctgtatttcttgcagcattttgtggttttatttatagtgcacgacatatatatcgtgcactgtagtcactgcataatttttttatatataatttaattaatatttatatatatttatatttagattattgtatttgtaaaatcaagaattaatttttagaaaattttacaatgcacatttttaaaagtgatgtacgaatctactcctatttgtttcggcacctgacagagttttttagtctattttttttatagtagtgtatattatagttatttaagatcattctgtaaaatttagaaaaatttaatacgccgaaaataatgcacttctttaaaagtggcgcactgatatactcctatatgtttcggcattcgagagatttgtttagtcttttttatggtcatatacattataattatttaataaatcctgctaaattttgaaattttttaaaaattttaggccagaccccaatcatcctcgacaaccgagtcgatggcctccaaatcgaccagtagtgcggatgttgaaaacttggctagacccaatcatcttctctctctctctctctntctctctctctctctcttgcattgtaggtggatggctttcgaagcttccttcgtcggcgattggtcggaccccatcggacc

SEQ ID NO: 56420 - DNA, 907 bp, Cannabis sativa
agagatagagagagagagggatgataggggtctgctattttttttttatcatatatacatatatatattattattatttaattattattttatatatatttgactcggtaaaaaattgagtctttaccgtaattctcacaaccaatcaaaatctttgacaccaaacttgctctagatccatgagaaataaagtaaatagtttcacttgaatataattgctcaagaacaaaaaatttatataaatcatcaaagatatctccttgatgtccaacactaagtttagacactttcacacatgctatgagcttgagtcaagatcgatcgaggaagatgaaaaagaagtaagaaacacacaataattatgtggctctgataccatattatagtaaatgaataaaagagaagataattatttttcattaattattcaaaaattacgtaataaacttatatatatatatagctcactatgctcaactaacataagagaatagttacaagattgtaactaaaactaatcacaataggtaactagtggccaacttgtgcagctagtcgcaaccgtactaacttagacactaattaatcatcacctatatttgataattatgttcactatgccattattataatatgtagacttttggcgaaatgagttttacttttgaaactacaattaactcgtaaactagatcctctaattaatatatttgacgttactacgtacagaatatatatatatcgatctatatatacatatataatgaaatgatcggatgagtactggagacataaattcatcgaagagagaccaatccgaagttacatatatattcgatcattttatcacattcattgcacctcattatcacaaaattaataatgctcagcaaacagggatcagatc

SEQ ID NO: 56421 - DNA, 1007 bp, Cannabis sativa
attagattttagttttattattattttaacttatttataattgatgaattcatatcttattagtattaataataataaattataagttttttaatacgtcgtgtcgtgcttctcgggcttgtcatgtgtcgtgtttttcggagtagtctattcatgcttacatgtcgtgactttcgtgcttctcgtgtcgtgtcgtgcttaaggacatatttttcgtgttgtatcatgccactttgtagtctcgtgtcgtgtcgtgctcaagtttgtatttttttcgtgcttaatcatgctcgtgccttctggacttgtaccggttacatgttgtgtcaaagtgtccgacccgtatttacagcattactaccagcactcccaatagatgaactaaaaaaactcaatcttcaaattataaagaaaatgacaaagtaagcttccaacaagtaagctaaaccttaggtattttatatattttttactttaatgaataatgtttaattagctaaatacaaagataagttaaaattattatattagtatttgtttaacttttctatatatatatgtaatattattatattttattgtaatttgcgacataaatattaacttggactctcaattataaatatatacttaagtttaattttttgttgtaataatacttaaattataatttttaaaattctgtaggtaccaggctgttaagtgttaagtaaattgcaacgtggtaaaacctgattgctccatgtcattaaatttgtatttttatttaaaaattaatctaaatataccaataaaaaatgacacatggaatattacttgatacttaacgactaggtacctatgaaagttctagaaatataacttaggtattattaccgttaaaaattaaacttatatatttatctacaattgagaattaaacttagatatttatgccgtaaattactctatattttattttataaaacctatgaaaagtatactatttaaatgatgtagagaaaaat

SEQ ID NO: 56422 - DNA, 1240 bp, Cannabis sativa
gacctatttccccattttttatgacgaaaagttaaatgaaaaagttcaatctttgacttgagacttttaaggcgcccagattgacagattattaacctaggtgttgagtgctcggggccttgagtgctcaaaaagaaacttgctctgaatctacttctgatgcctcaaatatgtctgtggtatgtctagttgatgtcccagtaaattttttttccactttgcacttagatggtcccaaaaactaaaaccctagttaaggaatgtcaaacttgggcatcgagtgaaaccctaggtgcccaggttggcttttgggttgcttgttcatgtaattttagcttccggaccttgtatgaggttactcgatgtcttcatgttataggatattgaaagatagtgggttagattcaagttattgaagtccgaacttctatcccagagatcctagagtcaacctgagcacagggctagggtcccctaccaagttcactgctatgactaaggtctactcaactccgtgatgtcatccataatgccacatgtagaacattgatgtacacctcactaaggacagtttccaagttaacatttgcccctaagtcaagtgcacacttgtgtggaattgacttgatgatgtgagccaagcctgtttcgctctaaactaccagataggcatcaattttgacattcttaggcacttgtaattgttcttcaagcatccccaactgaattgactttgaaatcttttgattagtccttggaaattccaaaaattcgttaactaagaaaaagtagaaaatattatatttttttttttcacttatcttttatctctttctttgaaactttggaattttttgcatttttgttatggcattaagattaattagattggaatcctaatccctgttgattattctattcaaaattagagagagaaaggaagaagagaaaagacttttggcctttcgctgatcatttatctttttcctttaatttctctaatttttccttaatcccaatagcattaggaattttttttaccttagaaatttatatttctattcctagttagataggaattcgaaattagcttgaaaaaggaaaaggcaaaagatataattatcttttacttatcattttcctcttccttaagaagcttcaaatttaagactccaattagctttaggattaggaaattggactcaactatgaataagtgagttgagaaccaattttttca

SEQ ID NO: 56423 - DNA, 598 bp, Cannabis sativa
tatttttataagacaaaacattaagtaagatactaattgatttataatatcgcatgtatatttttaagaaaatttacatgatatattgaatttttttattttattacattaaatacttttaggcggtaatttttttatttttactgtatatattatttgagttttatattgccttttttaaacttttttatatataaattttttatagtaatatgagctgtcacttttaatgtactttaatttttttaatattatttatttatttttaatttttttacttaaccttaataatgataaaagatgaaaatatatataaagttttgatttgattgatattgttgacaaatttttttatttttttacttaaacttaatgataataaaaatgagacccaaaatgtgttctcatttcactttttgatcatatttccttttctttctctctccatgttcatcttcttcttcttcttcttcatgggtttctttcatttttttttttcaaaatccatacacttatttaataacttttaaggaacattgctaaccaattataacgtaacatctataaaaagtgctggataccactagtgcctaataac

SEQ ID NO: 56424 - DNA, 2145 bp, Cannabis sativa
acaacttgatttatctttttaattatactacattatttttttcatggaatttgttgttgctacttcatacttaaatgattacattaataacagaaataataaaattttatgatttcacaatggggtatataatataatgagtaatatataattaatatgaaaatatccgctactacacattgtgtcaattaaaaataaaaaaaaaaattatcattgtattttaataaaatgtgtcaaaaaattaaactaaatatattacatactaatctataaagcaacacacatataaccaaaagaattatcaagaataaaaaaaaaattgttaaacaaaaaaatattctaaaaaccacttaaaaatagctaaaaataacataaaaataataaaataaatggatatatatacaacaaaaaaattatgtggaataaactaaaactatataccataaaaaaatgtacataaactaaacaacaattgtacaaaacagtaaaacaactaaacaacaatataaaaataacaaaaaagacatctataaattaatagaaaaattacaagacacatcaactttgttaaaatatgcaaatcatacataaatgaattccgaataaactacaaaacatgtaaaaacacactacttttattaatcatgtaaaatagagaaagatataggaagagtgtacttaattttttctaagatagagaagtagtgttaaaaaaatatgagaaaaagtgtgaaagtagaatcatgtttcagtaaaggttaaacaaaattaattaagattttttataaaatgtgtgataagtcgatattttgtcttataaatatagtcaatttttgtattaatattcttaatacaaggcagaacttaattataaatttagacgaatttaaaggcagaactgacttagagcttaacatgaaagttttagatctcattcttagttttctgaaacatcttgaatcatccaattctaagttgtattgaacaagttatggctaaaatactaatctgaacacgtggcagaaattttttggtagcaagttgtcgccgcggcgaggggattcatggtcgtggcgagagcacgaattctgccagatttcaaatttttatctttttttttttaaaatagagatatttttaagggtatttataagacttttagggtttgaattttagaacttttaactacaaatttgagagtgaactcagagagagagaacagggaagagacgaagatcatggcttcaaagtgttcttcatggttcttttcttctccttaaactcttactatctattatgattaatattgttataatatctagttttgagtagtttccttttagttaagggttattttaaaatctgagatatgaattcttaatttcattatttaatgttaatttctagtttctattaattatatcaaattgtttctattattctatgttcaatgtcatggttattattttaatcttgtttagatggccactaaattagagtttactttaatctacattcatcttaggattactattcacctaatactctaggattctaagtgtttgtgatgaattgtaatttttaatattgtcaaaggtattttaattgtgatgaagaatagaacctaggttaaataaattatatgtttcattaatttatttcctaaattaatctatttcataaatctagttttatctaagctaaataaattgcatgttttgtggatttactgcttaggtaaaagagttaattattgagcgtttcaccttgattgcatgtaataagaagattaggataattgactgcttcagcgttatctgtggaattaatagtttgattagaaaatcgaaattacattcattaacatgaattaagaatgattgttgagggtggagaataacctttaactatttatctcatatcgtagtctcacctttaatttgtttttatttttatttatgctattttattcaaatcatcaaaactccattttctaattcttgtctttaatttttaataatcaattgataatagtcattgtgggattgacatgtatttactgttatactgaaataattggtaatatagaaataaaaattcgtaaatttattgtggtaaacaacacgcatcaatgtgattaattaa

SEQ ID NO: 56425 - DNA, 6033 bp, Cannabis sativa
atgaaactagagatgaaaaacacagtcgaccaaagaatagttcatttgtttcttcaaacacaaacattggtaagtgggctttgtctagtatgaaacattatttgtttatctttttttttttttggttccaacgtatttttttgtgatcttaaataaaatgcagcaaaggggactgaacaatataaaagacctgggactgggaagagaccaagttcaatagaaaaagtgaaaaagaagaatagtgatgatgttgagttgaaaaaggaacacgtggggtctaatgtagcacatcatgataatattagctacaaggtcccctgttttccctatagtatactaaggaaagcaacacaaaatttcagtaaaaagaatttaataggtgaaggagggtttggtgatgttcataaggggtacgtcacttactgcaccatgaaccatgctaaaccaaatgagggtaaaccagtcgctgtaaaaaggcttattcaccggagttcacaaggccccgaagcatggaaggtggcctcttttttcttcactattaatcgtgacaagattaatttgaaaatgttatattcacaagtcaaattttgaaggaaaaaaaatgatttaaaatttgggtgactgcagacagaagtagatattttgggcatattaaatcatccacatgtagtacaactacttgggtgttgcaatgaaggtaaccatagaattttggtatacgagtacatgactaaaggcagtctagacacctttcttctcagaggttagtgcgccattttcaatttaaaggtccactttagaaaggaaaaaaaaatggtatctattctagtcacctttctctctagtttctactcatagctagttgggtctcctttctttcacattgacagaaaatcgggaagagttacactggcgcagaagagtccaaatagcaataggtgcagccagtggcttagcctatcttcacactcatgggaagcctataattcatagggacattaaagcttccaatgttcttctagactctgtaagttccctctttctggtggttttcataggaatagaacatagcagtcagtaaaaattgttttatggttttaaattatgtgattgcactgaatattttgccaacattggtagcacttcaatgccaagatttcagatttcggccttgctaaatatggacccgaagatgaaaatgatcacctcagcacaaaggttattggcagcaggggctactttgctccagagtacttctatagaggtaggtatcaaaaatcaacctttccccctcaccagtttttggagaaataaaaaaaatatatatattttttaacggttacagggcacttgaccataaaggctgacgtatatagcttcggagtggtacttttggagattttgtctggttcatgtgctgagaagagatgttcaaaggggattccagaagatctaattgagaaaacaaagtacctcctctgccggaacaccaagccggaactgcatacagtcatggacaagcagcttggaaacatccccatggaagaagctcaaatattcgctgagcttgcctaccaatgcctcagccaaaaccccgaaagcagaccaaccatgggagaagtggtagctggtttagagcagttgcaacacagcaaagttggagccagtactctccacaactccatggttgcgagattttctgcctggcctcctccctcttccaaaaggtcctccagataatttggatgtgaacaatcaagtttgttgatatgactatcctggaaagacctgcacgtgcctttggcgataaacctgatatctaacatgtaacaatgataatttgtgtaatgccaatgagcacatgctttctaaaacttcaaccatccacttgaaaagatttcactacggtccaatatgttgtgatgtgttcatactattactattatacaatgcgacacaacttgtcatgagtgctgcatgaaggataaatgtgtatacaactcaatcaaagaaaaaaagtgtataaatatagttgcgaatttagcttgaattattcacaccaatatattaaacaagtggattgccacgattttggagctccatatcatatgaaaaaaaggctgcccagtaacctgttccagcatacttcaaaattgtgtcgcatgaatgacatgcctcgtactccattctaagggaacgaaatggtaacagaagaaatttacaaatctgagcgccctttttaatgcactcgtggagattgttggatggatcgcaatggagatgcaatgggtggtggatttagaggagaacgatgttgtcgcattggagacttccgaggagaaaaggaaactgggtgctgctctggttggggaagagaagctgaatttcttgggccttcaagttgttcaagcgttgataatacatctgccatcttaggcctaagtttagcttcattaagcaggcactgcatggcaagcgtggcagctgtatatgcacctttctgaggatattggccctctaatttggtgtccatgatccgaaacaactttcttctgtcacccaaatatggctttgcccagtctaccagattctgctcaatacctacttttgttttatcaacagcacgtcgtccagatagtagttccaatagtacaaccccaaaactataaacatcactcttagctgtgagacgacctgttcattggcaaatccacaggtaagatgaccaccttaaaatcacttttaatttataaattgacaacaaagttaaaaaaaagcaataaacagagtaaaaatacactgttattctctttaaacactgttattctctgaattgcacttgccataaaagggtcgtttttttttttccacaatagctcacccaataacagatactaagaactaataattgtggatagcaaggtaagactacacaataaatcaaattgaaagcacataaacctgtagcaacatattctggagcagcatagccatgagttcccataacctgagtagacacatgagtcctgtcaccagtcggacctgccttagccaaaccaaaatcggaaagctttgcattgaagtcctgcatcacaatgtgtaaccggtatatgtaacttagacaagaatgcaaaacgtaatcattatataatcaactgacaaattttacattttattttaacataccgcatctaataaaatattagaagccttaaagtctcgatatatgacttgtgatttggcttcatgaagaaaactaagccctctggcagcaccaatagctactttcatccttattgcccatgaaagaggttgtggccctcctgtgaaccattaaataggactcagcattagaagaaaagttcatgaagccacaccaagacatttctaagttcaagtagagacgacaaagtttcaaaaggcaatagctctagatattggagaggtgtagaaacccattaaaatcatattttagccagtgacataagcatgtgattggctgtacatacagctcaacactgtttttccatcccatgcagactattttagcaagacgagtgctaccaacactatttttcaatctcttacaaactggcatgtgaattcagtaaaattatagtaataaaagaaactgataaatataattgctagatcttctcttttaagaaattaaaaagcagaaaaactaacgttcaggaagtacaaacaagctaaatgtaagggacagattttgttctgcaagacaacttcagagcagtgagcaccacttacttctaaatagatgattctctaggcttccttttggcataaactcatagaccaaaagccgattctcaccctctacgcagtatccaataagcttaaccagatttggatgatgcaactgaccgagataattaacttcagtctgaaattgaagggctttcagtgaataactaaggcataatatcgcaaataaactcacttaataaaattaaggagaagatacctaccaaccactctttgtgaccctgaaaaccttcaggctttagcttctttacagcaaccactatccctgaaccaggttttacagcagtatatgtgtgttcgtcaatccatcccttgaaaacaaagccaaaacctccttctccaagaagactgtcgggacggaaatttcttgttgcatttttcagctcattgaatgaaaaaggattcagatttgaagatgataatatttcaccttcagttcgtggcgtaggaagacttgaagagttgctcttttcgctaaaagaaggaatggtcaacgtggaaggaaccgaagaacgactagttctgcttgaattcttagaaactcctgaccctgacaataggaaaatgttgggtcagaaagaagtaaatttgcaggaaaaatggcactgcttcaaagaacacttaaaagtcaagtaatacaaataaaaaaaaccacaccccattcaaagtaactataattgtcatattttccacaagacttaattatttaatttcgaagttatggagtagattttgttttgtaaaaaaagctccgtcattgttatcttatttattttgtggtcactttcaacagagctatatacaatgtataaggagtattttaacaacaaagaaagttccatgccgccctggatgatgataaaatgcttaaagggtaacaatctttgacccagcaatctgcctagtaccataatataatatgcatatcatgagttatctcaaggaccacacaatatcactttataaacctcctagttctctgatagtctacaacctagaccttattataaatcaatccgctttaacacatgggcacagaacctgtcttgtgtctgctactgtaaaaatcaaattaagaccaagtttcaagaggatctaaaagaaaagctgaatactatacccgaacagtcaccatactgaactcaaaatctagtgctacaaatatcacaatctcttcaaacagaatgagactatgttcaacttgaagcaataagtagttttggaagatgggagacatgtttattcccgcaatagcaattagcaaggcttatttctaaagctccgcctttcacataacgaggaattgagtgaaacaattataacagacccttttaggaaaaaaaaaaaaaggtcccaaccatttaataagtactaaaaaagacaagtttttcaggatgtaataaaataccctttgaaactctcatctcaataaataggaatatacataatctaactataaatgcaaaaataataagaatagtaaaaaatcttactgatcttcaatgctaattcaaggaaaattgaggtgagaaactacgcgtaaacctaccataacatactaccgaggttcataatataaccctgagtaacgaaattggaaaaccctagaaagtaaaccgatctcaaaacgagaaagcaggagaaacccccgttcccactaattgaatccagtttcgaaagaaaaatagttgtcgcaccaaattaataaacccatgaaaacccacaaccagctccttgaacaaaaatgatcaattataagcatttatggagagagtaaaaacagagagagagagagagagagagagaatcaaacagttaccagaagtaacgtgggagctctgagctgtatctacttttgcggaagaaccaaaacaattacccatcaggaactagaagaaaatcttgctccaaaatcttttaatctcctctgttgctcagtaattagtaagtcatttccaagagaattacagaactggagcaagaaaactgaaacctagcccaacaatataaaataaaataaaataaaaaatacttaagaaaacccaaaactatgtctatagtttgcgtattgaatttggttttgaagatagtctcaaactaactgaaaagaattgatttgaaggatttggccgccgtggaatgaaagaagctggaaggagaagtagctaagctgagctgatgaggaaacagagaaggaaacacgttaagagaaaaagtcttcttaagtctctctctctctctctc

SEQ ID NO: 56426 - DNA, 1515 bp, Cannabis sativa
  modified_base (44)..(55): a, c, t, g, unknown or other
  modified_base (1139)..(1158): a, c, t, g, unknown or other
ttgtcatttaacaaaacacagggtccaatctataacttttgcannnnnnnnnnnncaaaatggtatttaccctaatatttatatttatgctttctcaaaacttaatagaatattatatgtaattgttaataaactaaacataataataatttgagcatctttaaactaaaattaaagtatataatattaaataaaattaatatatgccaacaactggccagttgtgtgcatacttgggctctcgtgcagatgctgtgcattgcataccatctgtgccaaatgcaagtttttgctatttttttatttttcatgatttttttcaaggaattaatttcaaaattttttgtgtatttttgtatttatatttttatttttcaaatctcaaatctaattattgatttgaaattaattaatttcatatattagtaaattttgaacctgaaaatggataaaatttatttattttttgtttaattggttatcttatttttaaaatttgattattttatcttatttttaaatgtaaggtcagatattttatattttatttatattatttaaataatttttataaaatgcccttatttgaaatttaaaataaaatatattttaataaaataatctagaaaattttgaaaatttaatcagatatttttgtcaacttttaaatttttattattttatttaaattaaattataaaattagataaataatatttatttatcattttattttattagacatttaattttattcttttaaaaaataacaaaatttttgaaaagttagttgatatttttgaatagattatttaggttttgttaaaaaaaaaaacctaatttttcaaatttataggtttatttttaaaaataagtatttaatttaatttaattatttttgaaaataatattttttatttaatatttttgaaattaatttaattatttaattaatttaaattaaataaatcttatatctaactatccaatttgttgcatgtgtgtgttttatatattatttattattaaaacttgttttataaaacctattattatttaatctagattgctatggttaacttcttgacagatccaatgatctgatttaaaccacagtccaattgtcaataggtcaaatnnnnnnnnnnnnnnnnnnnnattttgcaatcttctttcatctatgtagaaacctagtaacatgataggatccatccaaatcaatgtgtgtatgtgcctatatgtttgctttgggcctagatgcatatagggagcccatttaatttttgataattaaaatgaactaggttgctaaaataaaattgtcacttatgatagattttatttaggcctaattagtattgggcttattcgatgaataacaattatttaattaggattcaatttctctccttttgggccatgtgtgagcgatagggggccatagtagtgggtatgacatactgaacacaaccctccctcacatgaataactctaaatgtgaaggcccatttgcct

SEQ ID NO: 56427 - DNA, 963 bp, Cannabis sativa
agtatcaccctacaacgccttaatcggctgcccaaccctgtcaaatttccatctttcacctccatgtcaaatttcctaccaagggtggaattggttgtttgaagggcaatcaaatgggtagcacgagagtgttacaacctatccatcacaaccagggagaaagcagccaaatccatcaaagctacaacgagtagttctcagcaatgaggacttcccaaaatggggtcgaagacattgatccccattttggggatattgatacaggggttggtccaattgaagaattggaggaggtaccataagaccccgaacaaccttccaaattagtcaatatcggaaaggagcttcctaaggacataagatccgctttgatccagttcttaagggaaaaccaagatgtcttcgcctggtcacacgaagacatggaaggaataagccccaccgtgataagtcacactttaaacatcgacgtcaacaacttcaagcttgttcaacaaaaaaaaaggtaactcgacaaagagagagctaaggcactaaaggaagaggtagaaaaattgtggaacaacaacttcatcaaagaagcctactatgtagtctgggtctcgaaccatgtactagttctaaagtcgaatgacacctggagggtatgcattgactttacggacttaaacaaggagtgcccaaaagattgttttcccctaccaagaattgaccagttggtggatgcaacagctggccatgaaattctaactttcatggatgcgtactcagggtataatcagattagcatgtacccacctaatcaagaacatacaagctttcgaacggacgtcggcttatattgctacaaagtaatgttgtttggcttgaaaaatgtttgagccacctatcaaaggtatttaaagaacaaataggaagaaacatagaggtatacgtagatgacatgctggtcaagtctaagaa

SEQ ID NO: 56428 - DNA, 680 bp, Cannabis sativa
tcttggtatggaaattcatagagactcgaatggcctgtatctctcccaaacatattatattattgattttcttgtaagagctcacttggaaggagctaaaagttgttttagtcctactagtattgctcacaagctttaacttattgaaggatctacctttgaagacaaaaatctttgtcaaagtacttcaggaggcttacaatgtttgactctcactcaaccagatgtggctttcattatcaataaacttactcaggttattcgtgcacctacttctgtccattgggaagcatgtaaatatttactgagatacttgaaaggtactttaactgaaggtattcttcttaaaccatttcttgaatgtttattgaagcttatttggataccgattgggcaaattgtcttgatgataggcgttctactggtggatatactatcttttttggtccaaatctcatttcgtggtctgttaggaagcaataagttattgctcgctcttctacagaatcacaattttgatccttattagcaaatactgctgctgaaatcatgtggttacaatccctgctttttgaacttaagtccctcttgcggatgttcctatgatctaggtcgacaaccaaagagttgttgccttagccgctaactcagtatttcatgcaaggtgtaaacacatcgag

SEQ ID NO: 56429 - DNA, 948 bp, Cannabis sativa
agagagaagctttgaccttgtgggttgttttataaacgtgaaaaatgagcttataaacgtgaaaaatgagctaagagaggtgaaaaatgagctaagagagcaaaaatgagctaagagagctctccaatgagctaagagagctctcctttagctaagagagctctccttttatctaagagagctctccttttataggagagagctctccttttataggtgaaggaggcccacaaaaataggggaaaataaaaatgagatgtttttgaccgttgatgatgatctaacgataaaaattggctcttcgtggtgatggccatttttggagcccagcaggtctcattgagggtaactcatagcttattttcgtaactcccttgggggtaaattttgacgacgatagcttcagaactaaatttgcaaagtgagacatgactttatagagcattgaattagcttcgaaatgcaagttgaatcgtataaatcagatcaaaattgagtgtgttatgattgttttactgaaggcagttcatgacccaacagcgcccaggttgatatatgacatcaacctggacacttggtaagtgtaaaacatccaagggatgtactttaagattcctaagggatattttacatcacttagtcagtttttatatttttttgcgaaggtggtcacttgttctcaaagatgttgctattttgcaaaaatgagagactcgaaattcttaatttttggtgagctggaaatgagaaatgtagttgagaatttgaattttgtgacttcatagatctttttcattgtaaaaaactagatggacggtcaaaataaaatcatattcggataaacaaaacccagcgcactaggctatatgtcaacttgggcgatgggtatttactcccgagctcccaagatttcgtttttcatagttctaaggcttttgaacttgagga

SEQ ID NO: 56430 - DNA, 1281 bp, Cannabis sativa
  modified_base (55)..(60): a, c, t, g, unknown or other
tgtataaatgtttaatgggccggcccaaagtatttttgtaattttttttcctttnnnnnntttttctgtttttttccctttaaaaaacatcacctcataacaatattaaatactacaatattaaatattattaatagttaataacaatgctatttatatatgtacttctaatttataacttcaattttctatacaaatttttagtcaattttgttgctcaaaaatatatatatatatttttttgatgcggtgattaaaatcacacatgattaacaaagcagcaatcctcaattggcgacgacccctccttgaaccaagatagctcattgtctaactgaagggaatgctttgtcaaaccaaacactgcagaattcttatttcgagccgcatgggacaaaactgtccctagaaatttagacaatacaactataacgaagagtcaaacagcacaccccaatcacattaaaaaataccttcccaatataaattaccgttagagctagcaaaactgaaaaacatcacaacatcatctttataaatgtttgaaaaatttcaaatagttaatagtgcttattgacttcgcttttagccaataatgagtcttaattaaagcaataagaataaataaacaatagaaaacaaagagtaataagtaacgaaaaggttcagttcatagtagtggcaatagtctactcccctctttgttgtattaacttatgagtaaaatgaagtattctctctcgaaatataaagatctttgaacaaattactcttaaattgtgatttcacttttgagtgttttctctctgaataattttgtccccgcaaatagtaagatgagaccactatttataggggctaattacataataatagttttccttgatctataaaaaataaaataggaaagtagcatgtttctataattacaatgaaggcactactacatatttgggatttagaggcaatttttaagcccttttagcgtcaattttggcaaaattctttaccgacgctgatgcaggcaacgttgtagggttgaaaataactggcgctaaatgataccctatggcgtcggttattcacaaataatcgacgctatttgccaaaataactgacgttgtagggataaaaatcgatgttgtagggtttaaattatatatttattcataattattttttcagtttaaagcttaaaatttaatttatttaaattttatatttattaatttatattaaatattatttaatttaaatttaaataaaatctacttttaaaaa

SEQ ID NO: 56431 - DNA, 912 bp, Cannabis sativa
aaaaaacttaaaaaattgtagttctttgaataagtacaaatcttaatatgacgaatgaaataaagaaagaaagaaaaaattaaagattgatattctttgattaaaaatatatgtataccatacaacaaaattaatatacaatctaaatttttttattttattttctgaatggtataccatagtatacaaaatatatataccaccatacaaaatgtatataccaccgatagaaaaatttgactgagattttggtcgttgtttgggagcaatcgttgtaatttggagatgtgagaaaacctgaagaagaaaaaaaatgagcaaaactttgtggccttcgattgtgaggaattaggagaaaatgattaattgaatctaatgaatgaatcgaataaatagatgagaaaaaaatatttcattgctttttgggagaaatcacggtaacttactagaaatttttgaaaaaattgtccaaactaaccagaaaaaatggaggagaatgaggctttgtcatttggattttagagcagagcttctgtttttatttagagaatgaatataatgtgaataatacttttatataatcaagggtaatttaggtactaaaaaattataaaggtcatttactatattatttttaaaaagggacattaaattttgagaaaattatatcgtatatacccatttattttacttgttttgaatttttacctttattttcatatttttttaagatatatctacttttatagatgatgtctctattaaaccccttaaattatataaattatatggtagatttaagtacggagtgaagatatattaagcaactcactcaaaaaaagtgaatatattttaataaaaaaaataatataagattatttttaattaatgaatataaaaaaaaaaaaaaaa

SEQ ID NO: 56432 - DNA, 2477 bp, Cannabis sativa
  modified_base (1952)..(1953): a, c, t, g, unknown or other
tgcaatgtgtgtcactgaaaatacagagtgtcactaaagattaaattttttttttattatttttattaatttgaaaatttgagacttatagtgacacgccaagggtgtgtgggtaaatataccctaacacacctagcgcgtcactataacaatacactaatttttttttttaaaacaatacagctgtaatttaaaataaataaaaaataaaaaaattatcaaaccccaattaaaatataatctgaaaaaataaaaataaaaaaggtaatttatataaaaataacccctctctctctttcttctcaaacaatcagaccacaacacaaaaaaaaaaaccctaacttttctcttctgtatctcacctctctctctctctcccctgtagcagccgcagacctcccagccacctccggtgacctcgcccacctatcctttcttttctctttcttcctctccggaggcctagacatatggagcgcctcccctctctctctgcccagatgcgcgacctgcgcgtcgcctctctctctgcccagatgtgctgcaaatcccagtaatggtggtttgacagcagtgagtataagctgaaatcaaaatcgtatttatttttttttctttctggtctcattttgtggtaatgttttggtgagcaattgattataatagctattttcttttttctattcccagatgcgttcctattttttagggagacatcaacacttgagtccactaatgttgaaactgcattttggacctaccataaggtgaagcctagcagtgatcttctatggcgtgcgcaggtatacatataccaatatcaattatattttagtaataattatttagaaaagtgttaattataaacttttaatattttttttagttaatctttaaccacgaattcacacatgttagagtattatataaatatatatgttaaatcttattcatctttctaatttagaatataattcgttggaccaaaattagattatttgtagcaattttacattaatcttttctataatttatttattattatttttcccatttaaaaatatttgtttttcttccataattattattagctggtatataaataatactggtttttcacaaagttatggctatttaattttctctctgtctgttttcaactactcattatcaatgtatatataatatggaaaaaaaatttaataattacattaaatatataaacagttatgaggttgattcaactggtacttcaggtcttttaaaggtactaaaatcattgttcctcttcaggtagagggtccaaggaaaggctgctgctttttctcatcatacttaacttgtttaattaagtcttttttttgttctgtcattttttggaaattaatatgttccttttaggatgtcttgtgtaattctttgtaggaaaatgaagtttttttttatatggtgtgagcttacattttgtgctcacttacttgaaattaataacaaggagaatattgtctctgcccagaaatataatatttttctttgcaggctgacagtgatggtggcgatttaaggtttctgagttcttggctttggccggaattgaagaggaaatgtttggatttgataattttatttgttttttgttgttatattattcataccaatttctaggtttgtagtcaaatttttttactgttattgtattttatttatgtattttatttaaattatacttgtatttttttaatcacttattgtgtattactgctattaattataatataattatttttgtgtagttttttggttattaatttagatgtatttatattatttaaataaaatctgaatgtattatataatttgtaatttaaattgataattataaccatttaaattcttaatacaaatctgtattaaatcaaattaaattttattttttttagaaaaatatttannatagtggcactttttgtgtgtcactatatctccaaaaatattaataaaaaagaaaaaaagatatagtgacacttcatgtgtgtggctgttacattttcagtctgacaaaacctgactttgtacacctatagtgacacacaaaaaatgaatgcaaaaggtttcagtgacacgtgtgaagtgtcactaaaaattacatttccagtcaccctcattagtgacacgcgttgaagtgtcactatacacttttagagttactcaatgtgtgtcactaaaacccgattttctagtagtgcaaggagcttcgcgacttccagaagtaggctaagtcggaggcctctaaggctgctctgaaagctcttgtagctccaatcacttgtgagcagtgcgtgaagcgctttgagcacagtgtcttgatggcctgaagatccaataatttcaagcccaaacttaatttcttacccaaccatgaggcagctctagccctttttttttttggagagaaacaagaaattagaggccaaact

SEQ ID NO: 56433 - DNA, 768 bp, Cannabis sativa
aaaaataaataaaaaattaaaatataataattgtaagtgcaatgtaatctgtatggaaaattatgtggcagtttactagtttagtatattatttttggttgttgtcttagtttttgaattgatcatctaagttgatcttagttgcatctgcttagtttattatcttttattgtttgcaatgtcgactttttagcttttatgttttgtattcagtattaagtcagtgttagctggcttgagctgttgagttagttagctgagccagttcttccgcagtttggatagtgtgttcatgttgctttttctaactaactctctcatctttgtgagaatcttctagtgattcttactctgctaggacaaaatatctttttgtgtttctttgattgtaatttgcaaattgtaatttattggaacttcaagaggttggagtgtaatctgcaatgtctgaggagagttcattcagattgaattgctgggggaatttcagcttgatggaagcaaaggcagcttttcttcttggatctaagggagcttagatctgttgtcttgattgtattcaagaattaggtaatattgtgtaaagtcatttcaaattatattatttgatttataaaatcagaactggtgaatgtaattgaaataattttatagtggatgttactttacccggttcttggggacccaagtactactcggtcggaatgtgtttttcaatgcagaagaagcttgttaatctggtgctcattgatttatctttttatatag

SEQ ID NO: 56434 - DNA, 1114 bp, Cannabis sativa
ggtttagaactgttttggaaagtttgagtaggtttggtggagaataggttgggtttcgacgtggaaagccagggtttcccaccttgctgcaaaaactggttaatcggttttataggagctgagaaatcggtcaaccggtttgcctactggggaaaccctagttttcggttcggaaccagtttttctcaggctgtttttcagagcttggattagggtattctaaggatgtttaagctaattttgaaccagtgagagttagattttgtccggttgtgaaataggtttgtatcagggattgaataagtggttgatcaagttacgttattcgtgacataggacccggacgtcgagcatggttccacccaggttggcccgcacacccgatattggtttgaggtaagaaagctaattgcactactaggcatggtaagtgagaaacgattctcatcgtatgtgactcgattatgatcgaggtaatgaacactatcgtatgtgactcgattatgattgaggtaatgaacactatcgtatgcgactccattatgatcgaggtaatgaacactatcgtatgtgactcgattatgatcgaggtgatgattactattgtgtgtgacttgattatgatcgagataaagatacggtcattaccgttattgaaaaagggttggaaatggtcattaccgtcacaagtaattacttttgaaaccatgaatatgtttcttacttatcgtttattgtatcaggcaacgatagtgacatacgtaagtggtaagggtgctgtataaagtaccgagattatgtgattataatgatgtgaaattgattaagcatgttagcgtgtgatgtgttgtaattgggtacatttggttatggtgattaattatgtgctgtataaatgttgttttgtgtatgatggaattatatgctatgcattgttacgctatcttatgttatacattgtttattatttcttgctgagtctttgtgactcacaggtgcttcgtggtacatgtaaagggaggggaatagtggttcagccatgagtcagaggtcttccagcgatgtacatatcaaccgcgctgtttcgactaccagtggataggatccacccttt

SEQ ID NO: 56435 - DNA, 2290 bp, Cannabis sativa
  modified_base (285)..(292): a, c, t, g, unknown or other
  modified_base (1242)..(1245): a, c, t, g, unknown or other
  modified_base (1409)..(1417): a, c, t, g, unknown or other
  modified_base (1461)..(1474): a, c, t, g, unknown or other
  modified_base (1502)..(1515): a, c, t, g, unknown or other
ttagtaaactaatataattattgacttgagtactcaaccatttatctctattaagccaaacttgaagaaaatcatcatttcgcttctacgtgtagatagaaggtataagttatgtatctatgatttgcgctcccacttaattgaactaccatgtccttaatctgtatgtcatgagaagatctattagctgactttaacgaataaagtagagaacatacaaaatacaactaaactagaacctaaccatctcaggattgagaccatttgatctaagatcaactaggnnnnnnnnaattagatagatattacggtaagtttattatatgttattgaagttcaatatcagtcccttccgatgcatactatatacatccaatccaagcttattttaaccaatgccctagaatgacatagcacttatccaaggtacaagtaaactacattgtagattatcatatcaattaaaccctgtgtactgataaattatacgaattaatttaacacataatcttgattattttacagtgtgtggataagaaaataaacaagaacatcaatgtgataaggatttggatgaatttataaatcaactaaatgatcatcaaataaacatgtgaaccaaataacacattaaacaagtaatgaaatatatctatttctttattgataaattaatattcaagattacatagaaatagagttttatttagggcacaaaaacccaaaaaactcccacttgcactaacctaaaacaatcagtacatttcaattaatcctagattctctctatgcctttcaaatgtagagactgtcaaaatcttggtgaatggataagctaaattatcttcagtatcaactttttccactagtatgtcccctcttgccacatattctctgttgatgtcgtacttcctctcaatatgttcgcttctattgcggcttgtggctctttactgttggctatagcacgaatgttgtcacgaagtaaaaccagtggtttttccattctaggaacaataccaagttctatgaagaactttcttagccaaaccagttccttagcagcctcagcgacaactatgtattcgaccttcatggaagagtttgatattgctgatttcttgacacttctccaaacaactaatccaccgccaaagtaaataccatcccagatgtagacttcttgtcatcaagacaagcttgtactctaagtcggcatagcctacgggatttaaagcaccnnnnttgtagactaacacataatgccttgtactttttaaatattttagaatatgcttaactgcagtccaatgttcctttcctgggttcatctgatacctgctcataattcctaatttatagcaaatgtctggtctagtgcataacatgcactacaaaaaatcttactnnnnnnnnnaacaaaacttgtgactaaaaattaaaaaactgtgactaattatnnnnnnnnnnnnnnaaaaaactgtgactaattataaattatnnnnnnnnnnnnnngactaaaaggtccgtagctaaaggtattagtcacaaaaatcataatttattgtgactaaatgtatttttagacatattacttgttatgactaaaactaaattagtgacaacttgtaactaattactacgttttagtcacaagtaacattttgttgtaactaaatgtcacatttagtcataaaaaaattatattgtgactaaaaattttccactaaaaataacacttttttgtagtaacatatcatacattagacttccaactgctgaagcataaagaacctttttcatgccttctatatcttgtggatcagtgggacactgttccttagatagatggataccaggtctagaaggcataactgcccctttggtatcgtcatgaaaaatcactctagcaccttgtcaatgtaagctgcttgcaggagagcaagtgatcaactctttcggtttctattaatttgaataccaggaacataactagcttcacccaaatgtttcatttcaaattgagtgttaagtcatttcttaatgtcagtcattttcttaatattgttaccaataatcaaaatgtcatcaacataaaggaccaagaatactaccacaaaattatccttgagttggtaaacacaaggttcatcttcatttggtgaaagccgtaggttttgattatttcatcaaaccttgtattccaagagcgagatgcctactcaagtccatagatggacctatttattggaaattattttaccaggatcttagatctacttacaagtat

SEQ ID NO: 56436 - DNA, 858 bp, Cannabis sativa
  modified_base (168)..(181): a, c, t, g, unknown or other
acgctgaaagggcttaaaaaccgcctctaaagggggtttttgtagtagtgctatgttagacttttgtactaaaattggacaaaaatccttaaatccaatgaactcaatagttcaggatgcaattttaacgaccttaaaagtttaaaaggcatgatttggtacatgtcnnnnnnnnnnnnnnaaaaatcctaattagccaaaaaaatatatacaagtaagaaagaaatgtgggctttagatctttatttaagaaattaatcagcatttgtctcatatgtatgcacattatgaagaattggttacatataccagaatgaattccatatcgcatacgcatacatttatatagatatagatatcaattcaaataggacgattacaacccaaagtactaatcgaaatagtacattgttaaaacaatcacagattatgagtattgaaagaaaatattttactcaccaaccaatattactcatagtaataaattcaatatcaagtatttatttagagcatcaaataaaataaatacacatacctcccaatccatccatatgagccattttgcttcaatgtctccaacaagatcaccaacaagatctcaagattggacccaagccttagagccacaatatagagctatctcttcttttttaattaccatacaccttaaaaccactctatcaccaaataacatatatatatacatcccataccttataaccctaaggggttattcactaataaggcttaagtagtccttttatggtatactataatttaatgggccaattataatataaagggtgctctcatgtgcctctaatacataattaatttatcaaccatcccattatggtt

SEQ ID NO: 56437 - DNA, 1888 bp, Cannabis sativa
aatatattgataatcagagtcttgaaataatgacagaattgggattgagcacaccttttcaatatctgaactggaagagggtgtttgtctgtctaatgtttcttaatttgaccttattattaaacagtgattttgttttacaaagccacctgttcaagatttggtttactttctaactaatcttttgactctttaaaaagtatatatataatataggataattaggatttttccccctaaattttgacatttattaaattatactctcaattattaagattgttagatttaagaacttttatctaattttagtagaaaaagtctaacatgagtgaaaattcaataaacatgattaactacatgtaaaaatttgagggacataatttagtaaatataaaagttagggagcatggtttagtatataaacaatcacttgaatagttaaattgaatgaaattagataaaaattattaaatgtaacaatttgaataatttaaggagaatttttaactgaaaaaaatttatggtcatatatgtatgatttttttttttttttaatttattttgaaagcattttgagttttaaatttttctaacttaatccaaataattgtgtttcagtcaaatcgtgactttcccctcttatccattactgctgatcatcaaaattcaaaaccacatcctacaaaaagttcaatagttcaattattggtaccaatttttaccacattagtgactatccccgtttggcataattttttaaaaaactaaaaactatttcataaaaaaaattgtgataaaaaagtacttgctacttagataaaaaatattattgaacaatttatgaaaaactttaagttaaaagctaaaattagtacaacccgtaaaaacaaaaagactgttttgattaaaaaattctataataaattattttttactaaaaatatatttaattatttattctatattacaaaaaaaatattattttttgaaggaaaaaatatttaacataaataatatttaaattttttattttattttaaaaaatattttatatttatatttatattattaacaaacaacattaacccaagtttcttaaaaaccacaatttttctacaagtgaaaaaaacataatttaaaaatattataaattattttaatcaaatgcatatagatttatactataggaaaaataattaaaaatatatagaatataaaattttatataacatattatatatatatatatttgtgattataaaatactagattataacattatcattattataatagaatcttaacagctcgcagcattttaaaatttttaatttaccaaacactcaatttagttttatttcatagttctgctacaattggttttttctcacaacacaactacaattgtttttctccgtagtacaactgttccaaacttgccctatatgcttttcattgggtaggggctccgtacccttctcatacgtaaaaataaaagggaaatttgaatttctatgcatgcattaggggataattttttccctaaattaatacttttctacattgaaaatatatgatcactttttcaaaaccaaaaaatacccctctcaaaaactcaaaccctttctctctccttccctcaaactctctctgcctcatcttcgcccaaaaccccatcgtaggaaatccaccggccgtcgtcaccacctaccgaccgtcaccacgcacatcgtccacgccggccggccccaccatcgtaggaaactctctctgacatttttttttccaatttttctgggcttttaatgggtcaggtccgattgggcccgatgcccatccgatgaccgtccaatgcggcatttttttgggttttttaggtcgggtc

SEQ ID NO: 56438 - DNA, 983 bp, Cannabis sativa
  modified_base (30)..(33): a, c, t, g, unknown or other
tagacacttcttaagcttaagtgagttttnnnnagcttaagctccattaaaaaacctgttttaaccctcaaatttcacatgtactcatccatagagtagacaactgagtaccacatttactctattgacttgttattacctattgaacttaagactagatttttattaatattaagataggttaccatcaatgagtaaaacactaagggagtttaggtcccatccctcaaaaatacatgcttttatcttgtacagagattaagcgatttgttataactctcactattgattctatgtgaatcatgcatatcaaaatatagtgttcactttgtgaccatttttctttgtaagtacttaagctttaaaatttcaatcataaaagattaacttttacacaactcaaattctcaatcattttgataccaaacatattaaaattaaacactaatttagacaccaaacatgtctaaattatattttattttaaaacactaagcatgtctcaaatatacacattttagttttagacaccaagtatgtctaaactttctcatattggagtatgcacccccacactttcacatttcattatcaagacaatattttgattttaaaatatagaagaccactttgtctctataatttctcttaattttaacttccttcttaaaattatttccactaaattttggacaccaaatatgttaaaattttacatatatgcacatagccaaaattaatgttgaattttcatttcaaaatcaaataaactaatcaataatgtctttaacacatgttaattaaatttgtggctcgcccccacatttctagtataaagtaaaatttttataagaattatttttcaccaatattagttatctaaataatctccacattatttaaataactttaatttaatcatttttctaaaatacctcttagagatcattattaaaaatatatcatttgacatttttagtttt

SEQ ID NO: 56439 - DNA, 1071 bp, Cannabis sativa
ttaatgctcatacttaggaatttgaccagtccacatttcttgtgaagttttgaagttaatggatgttgagggacacctgttaattaaataacaggctatctttagtgcttctccccaaaacttcctttcgaaactagcactatttagcatgcatcttactctttcaagaagagttctattcattctttcagccaatccattttgttatggattcttgactacaatgttgtgtcttctaattccttctcttgtacaatagctcttgaactcatctgagaaaaattcaagaccattatcagtccttaaaaccttaatgtaacaccctgtttgtttctctatcatggttctccaattgacaaaggtttcaaaagctagattcttatttttcagcaagaacacccagaccttcctagagtaatcatcaatgatactaagaaaatagtttgcacccccaatgtttgaatcttgaaaggaccccagaggtcagaatgtatgtaactcagcttctctcttgttgtatgcatgcgctttgggaatttcactttgcaactttttcccaatacacaagattcacaaaactctaacttttcctttagaccacctttgaataccccttgtttgtcaagttcaatcaatcctctttcactcacacgtcccagtaacagtatacccatcaagatagtatatgccatttctaagttttcctttaacaataacaagtgaacctatagtaactttcaatgtaccatcatctatcttaacagtatagccatttttatcaaaagcaccaattgaaagtaagtttctattttgatcaggtacataccttacctgttgcaaaactctgatttctccatcatacattttcatctaaaccgagcctattccttcaatcttgtaagattttttgttgcctaataggacacttccaccttgttcttttgacagtgtgttgaagagctttctatttggagtcatatggaatgagcaacctgaatccaatatccattcttcatcagaattcatgcttgaggcaacaagtacattagcagattcatatccatctgcagc

SEQ ID NO: 56440 - DNA, 837 bp, Cannabis sativa
ccaaaagcagcccaaagttgttttcctgtgtgaaacgttggcacgtactgatcagttggaacgactgcgtgtgtcgttgggttttgggggtgtgttctcagtcgatgcaagaggaaaaagtggtggtgtagctttgttgtggaaggatagtgaagatatcaaagtgttggggtatggcgtgaactatatagatgctgaagtcatggaaaagaatggtacttgttggcggcttacagggctttacggtgagccaaaccgaagtctccgtcggaatacttgggatcaaattcgtactctaatggctttatatgctctgccttggtgcattattggggacctcaacaatgttatctcccaatcggacaaaaggggaggtaatccttatcccgcttggttaattgatggttttggtaatatgttggaagaatgtaatttggttgatatggatttgtgtggatatccatatacttgggagaaggggcgaggtacacagacatggatagaggtgcgtattgatcgggctctagtttctccaagctggtatcatgtttttccttcagctaagttatttaatttagaagtatcaacttcagaccactgtccaattcaattacttcttgatgatgtgaagcgaactgagtttcaaaagaaatttagatttgaaaatctatggctcagggagcctgcttgtgcgcaaattgtcaaagatacctgggagcttctttcgggctgttcagttatggaaaaaataagcttctgtggtgacaaacttatggtgtggggaaaggattatgtgggaaatttcaaggagcgtattcgggattgcaaaacagagat

SEQ ID NO: 56441 - DNA, 1446 bp, Cannabis sativa
  modified_base (796)..(806): a, c, t, g, unknown or other
tggtatagcagcatgtgagaatttataggtactgaagttggtaggcaatgtgaaagggttttatagttcaacggtctctgtttgttgttctattatacaaattagaataaagattaacaagagcataaatacttattatgtatagtacggtaaattaattaagttttttttttaccatttcacaattttattgttaagtccataaaaaattaaaaattccttcaataatgcttttttttccttttcatttaataattcttctcttttaattatcaaaattatatgtttctttttttttcttttttttttttttttgaataatatatgtttctttttaatttgaaaacttcttacattgttttctttaatttaataaatcttaagcattattttttcaaatatatatcaacaatatttaattttaattttatgaatttataattattgcttttgaatattttattaacattttgagtttaatttttatttctcaaaaatttacacaatgtatattttttttaatatattacataattatacattctctttcttcaaattattattattatttccacaattatcactctatattaagcattatttattttaaaattacgtatgacatttgaaaaaaaaccataactataactaaaacctaaaataaaactaactatgtggctaggcacgtaacttctgtctagtatatatatatatgtattttttttttggctagtgaggatttatatatatggaatacataagtattacttattattattaaataaatttaattatnnnnnnnnnnnttaaaaatattaaattattagattttgattcaataacgaataatgaaagaaaaatttcaatatgtatacttaatttatgtactttattaaaaaaaatatcaaaaaatatatctttttacactatattaaaaataagtttagaaataaaatatttaagtcaaactcaatttttttttatctcttttttattgccgaaaaacttttttttttaattttttttcagctgatggaacaattctaacccatataatataaaaatacgagattaaactaattagatagaaaaattatgtttaaaaactaaaatttacacatccatatacatatatatatttatatttataattaaatgtgataaatataaagataataataactttagcatgttggttaggctatctcatatatattataaagattaaaagtttcaatcctaataaaaatatttttacttttaatatttaatttactttttaccctcattaccaaaaaagaagtatgcccctctttaattctaagtcaaaaaatcttacttttagtcacaataaaaatttgtgactaaaagtgaaaaacttgtgactaattatgaattattattcgtatgttgtgactaaaaggtccgtggctaaagtattagtca

SEQ ID NO: 56442 - DNA, 831 bp, Cannabis sativa
ccttaaatctaacaacctcaatagcttacaatagcttagggggcattagggggcattatgaccttaaaagttcagagggcatgatttagtacatgtcaaagttcagacgcaaaaatcctaattagcccataaataaatacttaaaaataaaaatcatttttctttatttttctttcttttctggttctttactttttaggatctctgtctcctttatatctctctctatctctatgtttcttaatttcttcatttaaaaataataaataaaaaaacacatttttcttcttttttttttcttcttcttttttcttctttcttcttgaaaccctaaatgtaataaccaccattacaccaccatcactgaaaccacctcaccattacaccaccaacattgaaaccaccccgaccacaaccacaccaccaccatcacaaccactgcaacaaccactaccacaaaccatatctaaaaaataaaaaaaataaaaaaaatattctatacacaccacacctgttacaatatcagatctaatcctaccaaattaaacaaaacccaaaaaaaaaaatatcagtgatttatatatacctacgacccatcgcaagtttcagacctggaaggtcttcacgagaggaactcacttttgaaactcatttagcctgctaaaacttggcgtggccgaactgaagtcgagaagctccagcaagtttctaaacagtgatggacgaaggggatctaaaggccttggggtttaaatagttagcgaagctcgtagtggtctctattttggtcgagtgtcacttgtttaacgcccaaatgtgacttccactagc

SEQ ID NO: 56443 - DNA, 807 bp, Cannabis sativa
aatataatgaactttaatgttaaatcatttatcaactttgtgaatcaagggtacaaaatagctaaacaagcatatggatgattcttgaagcatttctttctttttactattgattacacctttacttactctcttttaatatttattatcaattcaaaaaatcacaaaatcatttgttaccattatcactatttattaaccttttatttctatttttctactagcgtttttgtctataatcacctctctgtggaatcgaccacccgatctatactacaactaccgctagtggaagacacattttgggcgtttaaccaaattttggcgccgttgccggggaggtaattttttttttcaaaggcttagtgaaatctacaatcacgaggttagtaattttttttattttattttcttgtgaatatttttcaagaaactcaaagtatgttctaaggttgcggttttacccgatcttccttatcagaaatgatttcttgataaaaaaaaaagagtttatttcctttaatttttatttcattctcactttgactttttagtatgatagtttatgttatgttttaattcttttttatttatctttttctttttattccgttttaatactcttagaatttagggaaaaaaaaaggaaaatacaaaaaggggaaaaaattacaaaattactatgggccggtccattcaacatttatacattccacatacaaatatttacaaaaataccacatgctctaaactttcagccgcacggactgaacgatgaagatgaacatacctcgatcgtttcaaaac

SEQ ID NO: 56444 - DNA, 1068 bp, Cannabis sativa
  modified_base (767)..(787): a, c, t, g, unknown or other
tagatgaaagttggaaggggtcgggtgccacgtcagagcataacatgctgacgtaggattacaggtcagcgttagcaaacgattaaagtaataaatgaatgaatatatataatgaactgatgatgagttaattaattgtgttgggttttcatgaaggtgagatatatatgagagcagacccaagttgacttttgttgtagacttgttgtagctactaataaataataataataagggaaatgttaatacctgtagtattattatttggtacaattaattctatctaattttaaaaaaaaaaattctacaatgtactcttttaccagatgtatttttatctatcttaatatctaaaataattttttagctaaatttttttttatagtcttgtacgttatagttatttaagacattttacaaaattttaaaaaatttaacacgcaaaaaataagattcaaataatgtgttgcatgtgtgattattttattttatatgcccgtgaaatagactgtatttaaacactatatggtaaataattttaaatctttaaaattttataagatatcttaaatagttataatgtaaacgaataatactgaaaaaatatttttttttttttataataaaacaaatgtattagtgtattccttttaagatgatgcattgtagaaacacctataatttaatataataatttttatagaatattatcaatcaatcgtaaatttttacctttaagtgatgccaaataataataataataatannnnnnnnnnnnnnnnnnnnnataataataataataatacataagccaacctttcggtttattctactaaaacttacaaaaatattagaatttaggttaacttttacaaaaatactgtcacactaacttcaacagtgaaacacaaaatagaacagttaaaaataacattgaaacaactaaaaaacaacggtagaataacagtaaaaatttaacacaatacacagtataaaatttacacaatatttttgaaaaaaattctacccacaataaaaaaaaaattcaataagttgtgtaaatatctc

SEQ ID NO: 56445 - DNA, 617 bp, Cannabis sativa
tgttgaacatgcagttcgcataagggagcccatttcacctactcggccatcccctcccgtgcttggaaaaggcagcccatcactttgcaggcccctttgtcttgtttttaagcttcttgactactatgtctcatgtttctgatgtctgttttctctaacaatgttgttttttgttccgtacggacatgtcttggtagatgcttcacgctctaaagaagagaatgggcggaagctctagcgcctctcctcctgccaagaagtctaaaggcggtgaggggtcctcttccaaggaaaagaggcctattggggaggtcattgatctttccgaggagctaacggctgcaaactcctctaccccaaaagctgcaaagtccaaggagtctcggggaggaagctcggacaggtctgaaccaccaaagggtggggggtctgagcgggcccttactccacctttgccggtgcttctagaggccaagaagggcaaagagatgcttgcccactatatgaaccggctgattcctgaggttagtgagtaactggctggtgctaacaatgactcttctttagagctattgacgggcggagtcttgaacgaattcaccagggtaagtctttct

SEQ ID NO: 56446 - DNA, 989 bp, Cannabis sativa
gaagctgaagccgaagcaggaagaggagcaagagccggaggtggaggttgagccatttttgttgagattgaaaccctattcctattctgtttggaacagtttttatgattatgtggacaatcagagctagggttctatcatattctctttctcttcccaaattaataagattgattacttattaatggtaagacaaccacccaccaaaaccgcatctctttactcttaaattgaatattgacataatgcctcccgtaagaaatgtgttatatttgggacaaataaaaaaattgtgatatatttgcaaataaaattataaaatttggagccgatgacgtaccgagcaggcgtgtcgtgtgtcgctccatcatccccggctaatatatatctttacaaaagtaaatttaagaacacctgacttgtggcagttacaagtaattataatttgtcaaaaatataatttatacaatatatatctatctatatattaaaataagttgtattctttacaacttttttttattttacaattttatatacattaatttaattaatttcaaaatatgtgtaaaaaaaacttattactattttctcataaatttttatatataattaaaaatttcttttcaatttttttataatgtatatggtaataattatttattattatatatatatggtaatattgattatatttatttttatgtttacaattataataaacataccaataatataaaatattttatacatgtgtttattttattttttattaattaaacatactaatttaataaataaaataataatattcacataggttgtattatatttattttttagtaatattttagtaaataaataatatatatatataaaaattattaatctttgtctttttctttgtttattgtgtcatgtttattttttctaattaaataatttttggagtttataaagttatgtttatttatttattttttaatgta

SEQ ID NO: 56447 - DNA, 1532 bp, Cannabis sativa
gtaaatattataaaacaagtatttctattaagccaaatataatcactactaaaaaaatcaaaattcccgtcggttttacactgtcggccaaagaattcccgacagtctataaaaccgtcgcctatacgagcgtcgcggatactggatagaatagacgatggtcaaaaactgtcgggaaaatagtatgggccacggtttaaaaccgtcgcctatagtgttcactataggcgacggttttaaatcgtggcctataatataagctacagtttaaaaccgtggcctatactataggccacagtttaaaactgacgcctatagtgttttaggcacagttttaaaccgtggcctatagtataggccaaggttttaaaccgtcgcctataataaaaatttcagtttaattataaattttttatttttcaacaacaatttttccagtcattggattgcaaaataaagaaaaaaaataattagaataaaatatatatatatatatattatcactagtaaaagggaaacagaaactgatttatacacaataaagttttgcttacattaattaatttttacatatattgtcactaaatagttagaatatataaagtataaacaaaaacataaactgatcattgtaatagcccttgtcgcattgcctgtacttggacgtattcaattcactgatcacgcagaatattcatctcgccatttgaatacaaatcgctcttaccctaaaaaaaatagaaagaaattatatattaattagtaaaagaacttgtatactacgctacattcttttttgatcaatatgttttaatagtttaatggacaaaatttgctttgcatattcttgaaaaatccagactttcttacttaacaatgtattatgtatagattcacaatccacttaattgacagcattttattaacaaaaattgatttggaaaatgattaattggatgggattcataaactggatattaaattggagccatactttctttgaggtgttcatgaatacccattaacaatacttattgttaaatgaataacatactcaaagaatacaaattaaccaaatctatatctatgaatacttccctcaccattctaatttaccattttaacaaactggagttgtagaattaaaaggatatctaccaaccatcacattctttatactctaaaactaacctagaaatatttatcatcatccccaaataatgaacaaaataatccccaaatttcagattaaataaataattaaatttccctaaatcagtgttcatacgaattcaccagttcatacaaaataatatcatgacaattcaaatgaatcataaaattatgaagtttatatatacttacccaagatcttgaatgcatataccatctaaattaaataaagaacaaattagatgacacataccatctacatttagttgtattagaaaaaagaacaaaaaaaaccaaaaacaatatgtagatgtactaaaatggaatacataaaaattctcaaaaatccaatagttaga

SEQ ID NO: 56448 - DNA, 1071 bp, Cannabis sativa
tataattaattagttacttaattaattacctatacaattaatatattacaacttttcacatgagaggcagtttttcttagacatggaatttaaattaaccatgtgaattaaaactggatatgcatatggttattttattttcttattataaatatatatataacgtcataattactagtatatatgaaaatgaagagccagctggtcaaattttttaacaatttataggcataatacatgaaattaatttttctagaaaacgaataaaataaaaagaaatttctaacttgttgaatcgatctgtcccatatttctcctacagtattacataatttttttttatataaagattaattaattaagtcaaaagtatttataatagagtataaaataaaaaatataaaaattttgatttctatggtgagaacagtgcgtaattaaggtgagttggaattaataaagtttaaagtaatttagagggtggacctttgttataggagttgggatcagaaaacattgggggatattattgacctatcaactaattaattcatttttcacatgagaatattcaatattgatccccacctctatgtcacagtactctaaatatttcgtacacgtgtcctcttatactttttgttttgggattacttatttatttatttattattgagaaataatatcacaggaagtttgttgatttaggtaattaagtgaatatattatatacataaaataataaattataattaattggtgacgtttctatagggttacgtataatgataatataaagcgcaattgtaaatctatctttttctaacatattgactttaagcaaaaagatggtttatttatactgtatatttttactataatgtatatacatatgcatgatcaatacgaaaaatatatatgtatctatttattactagctagtaattagtttcttatgtgtatatttatatgaattatgatacagcttattatgatacatgcaaaaaacgatcgaaaatataagcctctaattaccaaataaatcggattatatatatatatctttatata

SEQ ID NO: 56449 - DNA, 2490 bp, Cannabis sativa
taagttatcattacattaacagtgttgatccccctaataaaatggagtggcaaagaggaagaatggaaccatactcgacatggctcgcaacatgctcaaaagtaaaagaatatcaaatgagttttgggctgaacagatagcttgtgtagtttacttggggaatccctctctaacgagaagtgttcatgagaagataccttaagaagcatagagtagaagaaaacctagaatttctcacctcaaagtctttgaaattattgcttatgttcatgttcctgatcataagagaaccaagcttgatgacaaaagtgaaaagtacaccttcatctggtatgattcaagatccaaaggctataagttatacaacccaattactgacaagactatcatcagtcgcgacatagagtttgcttaagaagattgttggaattagagcatagaagaaggcgagtatgattttctagcctaatttgaagaggaagatgtagagagaaaccaatgatggaagaagaacttcaagagcctactactccaatggtctcgctaactagaatcttacaagaagattcaagtgaaatctcaaatggaaagacgccatgctttagaagctcgcaagaactttatgaggtaactgaaaatcaaagtggcatttctcttatgtgtctatttggtgattatgaacctctatactactaagaagcagtgggaagcaagaaatggagagatgcaatggatgaaaaaattaattcaattacaaaaaacaacacatgtccacaaggatacaagtcaattggagtaaagtgggtgtacaagaaaaaaaaagaatactaaatgatatgtggagagatatgaagcaagattggaaaacactacagttaaagagaaggcatcgactatgatgagatatttgctttagttgcttgtcttgaaactattagattaataatttttttaacagcccaagatagatggaagatccaccaactggctgtaaagtttgctttcttaaattgtttcctcgagaaaaaagtctacatttagcaatcattgggctatgaaataaaagggcacgaaagaaaagttctgaagttaagaaggctttatatggcctaaagcaagtgtcaagcgcttgaaatactcaaattgacaagcaatttctagacaaggattttaccaagtgtccatatgagcatgcactctatacaaaattaagaatgaatatattttgattgtatgcttgtatgagaatgacttgatctgcactggtagtaactcgagtatgtttgaagagttcaagaaacatacggcaaaagaattcgagattatagatattaggctcatgtcatattaccttggcattcaagtgtagcaagaagacaaatgaattttcaacactcaagaaagttatgctaaggaagtacttaagaagtttaagatggattattctaatccagttagcaaacaaatagaatgtggagtgaaattgtcaaatcatgatgaaggagaaaaagtggatccaactttcttcaaaagccttgttggatgtctgcgctacctaacttgtacaagaacatatattctctatgatgttggaattgttagtcgctatatgaaagttccaacaataactcatttgaagaatagaaagagaattcttcggtacatcaaaggtacgaccatttatgggctattttattcatcctttaacaattatgagattgttggatatagtgatagcgatcggagtggatacttggatgataaaaagagcaccattggatttgttcttcaagacaaatacaagctttacttggatgtcaaagaaacaatcaattgttatgctataaacatgtcaagctaattatgttagtgtaacttcatgtgtttgtcatgatatttggctaagaaacttgctaaaggatttgaatgtgccacaagaggagccgattgagattcatgttgatagcaaatcagcacttgcactagcaaataatccagtctttcacaaaacaagctaagcacatcgacacccattatcattacattcgagaatgcattggggaaaagaaataagagtgaaatatgtcaaatctcaaaattaagccacaaacacttttatgagttcactcaagagagaaatattcatcaaattatgaagcattcttgtcacaaatcaagtttaagggaggtgttgaaatattaaacttgatttaatatagttaatttttagaattttcttgttgttgctagagtttctagagtatttctacatttacgaaactttctagaatattcttgtgtttactagtttgtttgagtactcttaaaatttctagaattctcctttacttgtgttagtagtagaaattaggtaaaaaagtgtagaacctattcatttaataatgtttctagaatagtccacggatttctataaatagaaatgtaataccacaattttgtaccaagtaaaaaaacacacaaattgagtta

SEQ ID NO: 56450 - DNA, 1059 bp, Cannabis sativa
catcacatctcatgaagattaaactaatgtcttataacactctctatatgtaaatttgtaggtttttactaattaataacattttgagatctatgatctgtataatatgttaacagtgagaaagcagtgttagaaacagaaatgtcaaacaatgaccaaggtagttagtgactatttagatatgtgatcacaatatcttctctattgattgcacacttcaactatttaatatttatttacttttagcaccccaccacaaccaacttttcaaatctttctgaatctcatcaccccccaaaataaattcattaaaagaaaagaaaaaaagagtttataaggctaaggaaattatactctctatctctcaataacaaaatttagccaataattaattatggaatggatccactcttggctgaagattgcatttcctcccattatcatatttctacgctttttgattctaccaattatattccattcaagtttctacaatctataaaaacatccatagccactcaacaaaacgtggctagaaaagtagttctcattactggggcagctcgaggcattggacagtgtggtaaataatccactctaaacaaaaccagattttacctccactgctacttgaaagttagttactttcagttatttctcttcaacttgtatcagttagttgttagttattgtgttagtcattaactaacttcagttgaactgttaagagctggacatgtcagcatctaacaggttatatataggctcgatctctttggtgaaagggagcagaaaagaaggagagaaaacaagatacagagagagagtttagagagatcaagcagatgaaacttaagtctagattggctaaattgctctagttttgagtgttctagagcctagaaagactaagagtgttcatgatgatcttgtacagaaattggtgtttgtaattacaatttcatagtggagaaatctccttgggggagagctggagtaggactcaagatttgagatccgaaccaggataatttcttgtgtttttctctgtttttatgt

SEQ ID NO: 56451 - DNA, 811 bp, Cannabis sativa
ataaaattgtgccacgtgtacacattccaccatggcagttaacagccaaaaatggacaaaaatggctaacttctagcagaacttgagtttagggagttttaccgcaacaattttagaattgagggttagttgcaaaaacctccctactttagagggttttgccgcaaataactctctttatatatatatatttatataactactcttgcgtggataatgataataagaaaattgctataaataaatagtttaggccactacgttaatttatttctagattcgatacacgcaactgaaattatacacctctctccataaaaatttctattcatatatatatgtagagtatatttttctcaaaaatatatatatatatatgtacagtatatataaagtttttttttcttgaacaaattatatgtaaagttttgaagtgtgtctatgtaattcactagttctatattaaggttttttttaagaaaatatatatttttaagctcttgagtttaaaaaacatatataataattattcaaattacaaattattaatattcaatttttaaattgtaaaaaaaagatttttttctattatttttacacttaaaaacagttttttttttttttttattatttctacagaattccatacagaaatccctacatatagtaactaacgaagaaacctacatcgtcaccaaaatccgtataacaacacacatagaaacggagaaaccactgaatcaacctaaactgaaatttgaaaaaaaaataagttaaaaaattagtttatggcgaaatttctcaaaaatat

SEQ ID NO: 56452 - DNA, 2022 bp, Cannabis sativa
ttttttttttttttgaatggtaataatctttattaaccaacaacctctgttaccaaacatggtaacaactcagttgggacatcccccatactgaagctacgcccaggatacaaaatagaagctcttgcaaaagcatgagcaaccatattagctgaacgtttaataaaataaacagaaacattttccataccaacaagcaaagttttacactcttgtatgacaacaccatacacagatatcatttcacttgaacctctcaaagcttgtaccacattaagactgtctgtctccaacaacacccgctgccaagatttatcttttagccaactaagagcttcccttactccgattgcctccgccactaagggttgaacaacaccattaaagctactggtgcgagcttcaattaacagtcctttgtcgtctcgagcaaccacgccaactccaaagccacgctcccttccaaaaattgttgcatctacattcaccttgacaccatttcgttgaggcgcacaccaccgttcagcaccatcaccttccataagtccaaccgaaaatgaacttacctcgtgatcttgagcggctaaccattggtcaagatagttctctgcaaaagctacaatttccatagcagaagtggactttttcttccaaaccttgttgttccttgctccccaaattgcccaacagagagtaaccattctgcacttttttcctttgtccaatcccttaaacgattcaacacaccaatccagaaagcacataccagccgagaggtttgtcccaatacctgttctttcccacacttgcttgatcaaagaacaagaaacaaggcagtgggtaatagtttcctcctccagattgcatacaggacacaaattagagacttgaactctctttattctcaatgatacaagggtaggaaggcaatttgtacaactcctccacatcagattttttattttaggtggaacttttaaagcccacaaagtcttccaaaagatagaagagtcagaattattcccttgatcaaaggttacctgagttaaattgtaggcacttttcaccgagtatatgcctgagttttcatgagcccacacgtagcgatcatctccttgaaaaagatgagtaggaatggcctcaattaaccttcggtccctatcaacaaacaagtcggctaatatctcatcatcccacctttgatcctccatagacaataaactagctaccgtagcattgctccatagaaggaaaagacacttaggaaaagagaaaatagaaaaggagaaagttgatatttgcaccaagaagatataataaaggcaccattttgttcaattaaattatttttaatactttttctcaattttttaaacattctttacttatttttcttataatttttcatcactcataaaatcataaaatatgttataacaaaatttaattccataaataaatatattacatataattataagtgtataactatagatctaataatacatttgttgattcaaatagcggaagcgtaccttaatctataaatatcgattattttaatctatcttgtagagatgatctttgtagtgattttgagaaatgatctttcaagaaacaagacttaagattttctaattttctctcttgatggggaaagatgagaatagaattggctcttgtttcttggaggccactatcattaaataacctaataggttattaattttattatttctaatttagtccatcaataaattaaaaatatctcttaagatatctactttagctcatgacactttaatacccatgaccaacgattattacaatgattactttatttaggtcaaacttcaaataacaatacaccaatatatatgaactcatattgaggattttaatcgaacaatttctcacttgggctacatatggtttcttaaaatgtgtaaccttataagcgcttaaattttactatcataattataggtatttccaaacaatctcgtctattgattatactaa

SEQ ID NO: 56453 - DNA, 1217 bp, Cannabis sativa
taatagtattacatatttatactagtattaacaattgctaactagtccctataacttttcatgtaacactccccaacccttcaaaatcaccttgtcctcaaggtggtaaaaataaaaattactactaaaataagcacaaatataaaagataaaaaaaaactaattacatcccaattattcctttaatattcagcccatttctttgtaattttctactaaattctcagcccaagtttaagcccaaaattgatagggcaaagagagtcatgtcacttgatgatgtgccgcccttctacttctccttcgtcttcttctttttttttttttttttgttcgaagcaatgaggttcgtgacctccctaatttaaactttcatcttcaacattatcatcatatatgatatatgtatatcatatttgcagaaaataatccataaggacatatatgtatatttcttctacaaaccaatgaatacagagcaagggatactcgttaactccactgcttccatatatttctgcaatccggcgcgaccatgcttccgtccgcctggcagtggccatactccttcgatgaacttttgctatccggcgcgaccacgattcccatctcccttttgtgctccgatctggaccacgttcgagctcctccaccaatcgaaagtctcgtggtcggtgtacccttgttgcggcagaactccgtaacttgcctagccaactaaggatctcagcccagctcaaatctcgtatggctaagacaacaccggtatcagtatcattccaaggaatgaagagcatctcctcatctgttgatgttcttcgaggtgccttcgttgatgcagatcgagaatccataacatccgatgaagccacgctgatctcttccgctttcggtgttcttcgagctgccttctttgccgtaggtcgaaccgaaattggttgcgatctacctagatcggatccagctgaaatgccactatcgacaagatcgagagccttctccgatggcttcgcgattctcactggttcagtagagtcgtcgacctcctgaaccgtggttggagcctgagatgaggaatccagcaatgctgccttcgacaaactgtggcgctcaaacatggcgtcaatacgcaactctacagatctaatcatggatcttacgaattcacgaagctcgtcgtcagtcatggtgacaatctctcactgaaatctctctat

SEQ ID NO: 56454 - DNA, 1088 bp, Cannabis sativa
ttattcattttgtgtgctgaaggactgactgccttaattcgtcgctttgaatcaagaggattgcttcatggttgtaaagttgctaacggtgcaccccgaatatcccatatgttatttgcagacgacagttacctctattgcaaagcaactagcgcagaggctattagaatccaagaagtgttgcagaaatttgaagcggcttcgggtcagaaggtaaatttctccaagtcatccatcttttttagtacgaatactgctttggcaatccgaaacgacataagtaacttcctgggaatgaccatcgctggagagaacagcttgtatctaggcttgcccagtaccatgtctcgtaacaaaacggtcgtgctgggtttcctaaaggaaagagttcgtaagcgtattcaagggtgggaatcgaagtttctttcaagggcgggaaaggaagtccttatcaagacagttgcacagtcattacctagctacgctatgagcgttttccttcttccggtagacatcactaatgacatggagagggtgatggcaaagttttggtggcagtcctctagaaactctgggaaaggaattcattggcgttcttgggataagctttgtatccataaagacaaaggtggaatgggttttcgcaaccttcgggattttaacttggctctcttgggaaaacaaggatggcgcttaatctcgcgacctgattcgctagtggcaaaagttttcaaggcgagatatttcccacaaggatcctaccttagctcttcactagggaacaatcctagttttgtgtggcgcagtatttgggaagctcaacaacttgttcgtaaaggtgttaggtggtgtgttggggacggtcgcgacattcaggtagctcatgatccatggttaccatgtaatgacaatcctttcatcatttcatcgcatcctaatcttttgaatgcttcggtccacaacctgatgaaaaccgatggtgtgggatgggatattgagctacttgaagacatgtttgaaccaagggatgctcacctgataaaaagcatatggtctcggatcttgacaaggatagcttgatttggtgc

SEQ ID NO: 56455 - DNA, 2750 bp, Cannabis sativa
atttgcaaaaacatggtttttcagtatcggtgcaggtggttcgcattccatgctcgtggaaattccgatccatcaagtcttttgagttcgtatgttctatcaagcacttcatgttgtatttcatatgtccattcacagttaggttcgagggcccccattcatggctcctgagatgttagaaacactcttcttaagacaaggtcaccaactttaaacttctagcttttaacttttgagttgaagtgtcgagaaattttgttttggtacattttaagctggacttataatttttcgcagagttctttgattaaatctaacgattcctgaagtaaagcgtggttccggtgggatcataagtctctcttatgtgagaagaaacagtgttttctactgggattacaacttcacattcgtaggccatttaatacagagtgtgccccattgaggttctttatgtggtatggtatacccaaagaactcttggaagttcttttagccagtgagctttggatgcctgaagctttttcttcaacgtggtctttaagattttatttacaacttctacttgtctgtttgcttgtggtctggccacagctgaaaaactctttatgattccatgcttgacaccaaaattagtgaagtgatccctatcaaattgttttctattgtcagacactatcttatgtggatgtccataacaacaaactatttctttgatgacaaagtctagagcctttttggaggtgtcaatattcataggttttgcttgaaccgatttggtgaagtagtcaacagcaacgatgaagaatttgacacctccttttccgattggaagagagcctattaagtcaattccacatatagcaaaaggccacagactgttcatcaatgatatttctgttggtgaagcccttggaacctttgaattatgctggcactgttcacatttctagacataattgatacaatccttcttcatggttggcaagaagtatccttgccagatgatcttcttggtcaaacttggttcgaatgtatgatctccaaagaaactttcgtgcgcttcatggattacaacacttatttcggttccagatatacacctcagctatggtacccataaccctctttggtataactttccatcaaggagcacatatctcggagcttggtactgaatcttctggtggctgccctatcatctggaagctctccaaaactcaagaacttgtggagggggcctatcgaggaacaacttatcataagctttaacaagatcaattttaagagcaaaaatacctcattttccttttttcctcttgaatgaatgaatgacctcctataaaagaacattattatcatgaatggaatgcctgggacaaaagcagtttacactgagaaaatgagattaggcaagagaggttgaatactggccgcaataatttttgagattaccttgtaaaagacgttgcataaagcaatgtgtctaaattgggtaacctctccaccttagggatgaggactagattagaataatttaaccttcgtgcatgaccctagagtggaagaaggcagaaatagcattgtagaaactctcacccatagtttcccaataagttttgtaaaagaggagaggactacgggcctgaggccttgaaacttcccatggaaaatatagcttcgatccctaacatcatcatggctgggaatgtgaatcaaattcatgtgaagattagcaatgaacaacgatctagctaaatgaccaaaatcaagtaggacaacacaattcttcttagtaaataatcttttgaagtagtcaagaaactccataccaataagatgttcatcagataaccacgcaccacaaacagtctttatacaatccacaaaatttcttctcctctagatacatgtagtaataaagtgatatcgagtacatctatcaccatctttaagccaatcgattctagacttttgtctctaatgaatgcacttgcgagtaaggagttcatcaagggactttataagattcaatttagtttcatacaagatactcaagtcataatctttcatacatgattcttgtcctaatttctattgttctatttgtcattatgccaaacaaaggaaattaccttttgtttccaatcaaaacattgctaaagaatgttttgacttgattcacattgacttatagggaccatacaatactcttaatattaggggacataagtattttatcaccattattgatgatcattctaggtacacttcggttcactttatcaaaaccaagtctgaagaacaaactgccattaaaaattttattcagcttgttaaaactcagcaccaaaagaccatcaaaggtgttaggtgtgatattgcaaaagaattgtaatttgttgatgtgtttagttcacttgaaattgtgcattatcattcttgcattcatagacctcaacaaaattatgttgttgaaagaaaatatcaacacttactaaatgtagctagggcacttttatttcagtcttacattcctttaaattattgtaatgagtgtgttactactgctgcatatctaattagcaaaacacccacaccaaatttacaaaatgcttcccctttcgaggttcttaaatctgaacctcccacatatgaccatttgagggcttttgggtgtcttgcatatgcttccacctcattttcatctagaactaagttctcaactagagcaaccccttgcatatttt

SEQ ID NO: 56456 - DNA, 1073 bp, Cannabis sativa
taataattattagcttttctcaaaagtcaaatttagagttaaaaattgttaagtgatagattctaattcaaaactaattaaggtagaatttaaaaaaaaaaataaaaaaaaaaagtagttaacatatatgtatatagttttaggtaatgttttttattttgttaaataataattgagattttgtatttttcataatagtataaaatagtacagtttaatttttgttaaattaaaatttaataataatctaatcaggagatattataactagattatattcttttaatctttttgtgataataacttacttataactaatttatcattgaacaaaataaaagatttttataataaacattgatttgaaatagtatttactctatgaatatataaccatttgttttacacttttaatttactagttttaaaatgagtgtataaccattttttttttgtttactattgttttagagaaaaaccatgaaatcatatgtataaatttctacgtcaaattaattggtgatcaagggatttagttcaaattgttttcaacttctttttctttctttttttgttttttttttttttttttgaaaaaagaaatcaacatctttttgttttttttttttttttgaaaaaatctttttgttgtatatgtatatacatagaaatgatttcatttttttgttataaccgttaaatcaggcccaagcccaagcccaagcccaagcccaaataaaatgggtcaattatggaaccatattagaagataataaatgagacatggtctagaaaatatgtatggctacaattataataaaatatttatagtttataatttgaaattccatcactacattttacatcttcttcaatgactaatatgtccaaaaaaaaaaaactaatatgtaagattattatcgatgcaaatctaataattatgatataaatatatatattgaaaaggtaattaaagaaaaatatgtgtaccttaatatgagtgttgtaatattttagtaatttcattgttcaaattatctctaacataaataaagaatttcaatgtttgacat

SEQ ID NO: 56457 - DNA, 1787 bp, Cannabis sativa
  modified_base (446)..(461): a, c, t, g, unknown or other
  modified_base (957)..(958): a, c, t, g, unknown or other
atttatgaaaatactaccaataaaactaccaggtcggatgaccatatcaagtacaatataaaagaacatttactcttaagtgaatggccttttgggcgaaccacgtccaaaggttcgaataaaatttccaagtactcaggtcggatgaccacctctgaaagtacgattttttattttttgccatttgttttattcatgttaagctaaagatcaaatcagatcagcataatagctttgatgtaagttattacggtaacagacatatttctgaccaataaatgaataaagatgtttatttaaattaaaattgagtcgagttcattagcatgttataaatttaccatccagtgcgtaaaaaaggttttgtcgtacccaaaacccgaacagacaaaaaagcatacttgtaaaaaaaaaataagtgaccaagagttataagtctgctcggnnnnnnnnnnnnnnnntatacatgtacaaagcatttggtaaaaaacaaaacaaatacaattgcacgatgattataaaaaaaaaaggatgaaattcattaggaataacaaaagcattcaaacttgggattaaaggctgcctggtcagctagttgttcaaaaaatgaaaaatatattccaagtttaaagaccgcttggtcggtcaccttgtcttaagagaaggcctattagcctaaaaaacatataacaaaaggataataaaaagaaggcacttagacggcaggagttacaggctatttgtatgggttagctggatttgaaggggcctgagaactgtcactctaagtggaaggagcctcaacattctgatcggtaggtgaagtggaagtggtcgcctcgggctcctcgtagggcgcctgtgcaacgcagtagtcgagaaacatgtctgttgaagcgcctaggtaatcaaagattgccttggtattagctttccaaaagtcataaaatatctcgnnaccagctgtctctaaggcatttaccttctccctgagcctcaccacctcagatttctgcttctcaacctcgaccccaagctcctcctctttcgttttcttctcttcctccaacctgcgaagaagggtccaaacacccgagacaaagaggcaatatcagcctcgagctgctcggtggatggcatgtcctgcagatctttggttagttcggccactttggtctcagcaacaaggagcttcttattaacctctcccagctctatccgcacagccccaagttgaacccgggcttccttggcgtcctacttggccaagtccacctccgttcgcattgtgttagaaatggcaaggttcttaatagcagttgacttagctcgagaataggcataagccatcttcagaccagtctgtatgaaaggaagacattaaaatccaaactagttaaagaagaacaagaggaaagtgtaagataatgcttaccctcgaaagctcgttcaggattcctcccataaccagctccaaagacaggtcgttgtccgccccagccagttgttcgttcacctcagggactgatcgattcacatagtgggtgagcatatctctgcctcttttagtctcctagtacagtactagtggtggggcaggggccttaacctgtttagataagcttttgatcagcttggatccaccctttgcctaattaggcctgtccgaactacctcctacagaatctttggacttggtcacttttgagggaggagggtccacaacagtctgttcttcagaaaggtaaatgaccactttagttggtgccttctccttggatggggtc

SEQ ID NO: 56458 - DNA, 765 bp, Cannabis sativa
tctacaggttgtgtgcttcagttggatgattgttcctctaaagtgcattctattgttttaaacgagtttattaattaataaatctctttttctatttaaaaaaaatacttgatatttaatattgaattatactaatatcgataagatactttaaattggtattggaaatcacttttaaataaattgggattacgtaaaagagaatacactaaagcatggatattattacaaaaatccgaagttggtaggaccttaagaagatgagcattagcgccatatgacatggtatattactatacagtttagtagttgatttcacgttaaaattaacacgataagtaatacattttctcatgattttgctaagtttggtctagaattagatatgagttactttgcaatggttttttttacattctttatagaccttaaaagctttgtacttattgtttctttcttaatgaagcttcaagttgttaaaaaaaattaatgactgaagcttattaccatgtgaataatatacaattttgttatcatttgcatttaatcaacattttaagaacaaaaataataatatattttcgaaaaaaaataggcaacgtggagaactctttgatttttttttttttttacaatgaactaaactttcattgattgaaattaaagaagagtacaacaaaaaaagggtaaatagtagcataagtactcaaagttttaggttagtaagcggcataaacccaatgatttttttagtggcataagtac

SEQ ID NO: 56459 - DNA, 789 bp, Cannabis sativa
catcacctgatattcagaaagatattgtacgggctgtttgaaactctagatatcatcattaatggaattggggattcaattttttctattttagttgatgaatctcgtgatgtttccataaaagagaaaatggatgttgtattacggtatgtagataaagatggacatgttattgaacattttgtagggattgaacatgtggccaataccacagctatatcacttaaaggtgctatggataaattattttctagatatggattgagtatatctaaatagcggggcaaggttatgatggggcaagtaatatgcaaggagagttcaaaggtcttaaaactcttattttgaaagagaatccatgagcctcttatgtttattgttttgctcaccaacttcaacttgctctagtagccgtggcaaagaaatatattctagttcgctatctttttagtatggtaactagggtgataaatgttattggatcttcttccaagcattgtgataatcttagagaaaagtaagatgttattatttctgaagcactcaagcgtggtgaaattgcaagtggaagagggctaatcaagaaaccaattttaactgtccaagtgatacttgttgggattcacattatgctacattggtaagcttattaacttattctcacccataattgatgttcttggaacactagtagacgatgctcaagaatctgaacaaaagtttaaagcaagtaatctgatgggtttgatgttgatatttgatttgatatttagtctacattttatgaaa

SEQ ID NO: 56460 - DNA, 786 bp, Cannabis sativa
attgtttccgattattttctattttaaaccgatacatttctctcattgattattctgattccaattatagtttagtaaacgccccgtaaatttaattaaaaaattactgatgtgatgttcattggctcattcatgggacatgttcctttttttaaaaaaaaaaataataattaatgcatggttaacaatattacttaaaaattattttcttaaattatatgggacccaatacttaattataccaataacggtataataccaagaaatatgttagacaccaactgtaattttagcaattctcttaactaccaattaagttttttcttatacaactaggtacgtaatttcaaactaattaatcaataggaaaagtgtgtagttgatgaagatgtgtttttaatgcttaaagcatatacagtttaggaaaacttggtttatcctaggcagctcaatagattttttgattcatgaatttatcaggttttatattcaaaaattttagcatgtctggaacttttgataaaaactatgagccacctgtcatagcatatcacattttgcattgttgcctcattttagttttttgttttcagtgtgaagaattttattttacttagagatctcaaatcttttaaaccaaacttaaaaatgtatggtgactagttatctatatttgcattaaaataagtaaactaatgtttatctataaattaaagggaaatttacaaaaatattaaaatttaggttaatttttacaaaaatactgtcacacggaaaagttttcaa

SEQ ID NO: 56461 - DNA, 935 bp, Cannabis sativa
  modified_base (783)..(784): a, c, t, g, unknown or other
ccgacacattgccctccgagatagccaccacaatcccaattgcagcacgaagatctttgaacgctgcatccaccagtaacaccggattacctgtgtagattgcagaaggactatgctgcagaccaccaacatttttaggagactcccaagcagaatgaaggcaggcagcagcactaatcaccttggcaaggacgcctctccaagtaggagtaatctgatcatgaaaagctctgttgcaggcagtccacaaagcatcaaacaagcaaatcccaaatctcaagaactcacccgagtcatctccatcagcaccttgtaagaattcaggagataagagccattcgaccatgtctctaggagcaccaaagttaagtgagtcactcctaataggccaacgacttgcaaaccacacggccttagcaagcggacacttaaagaataggtgttgggccaagtcacatacatacttattcgcgtgattggtcactcagtaaaatagtattacttaaattaataatgtggaccatgttgatcaaagaatgataaaagcttggtagataattatactttcaaatgataaaaagtgtaaatttattcagaagaaataatatatacctactgtagccagttttgtttaccagttgtgttgacattaaattattctgaggacaattttgtaatatcatgtgttttggatagggatataaataagaaagttctatttgcgtcctataaaattataaatacacttcattattaaaaatatataaacttaaataatttttnnaaattactcttaatatttttaaaagaaaaaatttcctcacactattttattttaattgcaatacatattttgatttcattttaataattttttctaactcatgtatatttttttatttttttctaagaaaatttcatatatttttttattt

SEQ ID NO: 56462 - DNA, 643 bp, Cannabis sativa
aactgcacctcagcaagagtcaagttgtcttttgaagtcaagttcacaactacggcttcatactctgtgcctaggccagcaagaacgtacaggattaattgttcgtctgagattggatttcctgcagcacgaaggccatcagcaaggttcttcatctttaagagatactcatcaatggctagagaccctttcttggtagattgaagctggttcatcaagtgtatttgtctcgctcgagaagctgttccaaacaattgctccaaggtattccagatctcagaagatgtagcacagttcacaacatgcccaatcattgattcagagatagtcgacattaaccaagaaaggagaaattgatcaagacgcatccatctattgaattcaggattacttaccatggttgtggattctggagcttgacgaattcttgcctgtggtggattctgattacgaaggattccctcaaggtcatgtgctctgattgcaggaagaacttgagacctccagaaaaaataattgcttcggtttagcttcaatggtggaacgaacattgtggtagggacaatgttctggtttgatgtagtattgacagaggacgccatggaagaataccttcggctctgataccaagttgaacaaagaa

SEQ ID NO: 56463 - DNA, 1755 bp, Cannabis sativa
aatgtctcttaaaaatagatatttgcccttaatttttgtggattattaaggcccaattcgtagtctagcttgctgaccacgcattaagttgtacaccaaagtcctgccaggctaatgtctggctggccatgcatctacatgatgcaggctggctggccttgtgctgttcggaagctggccagcctatgatggccatagggacgaccaggggtggccggtcgatctccttcaggtggctagtccgtcattcgtcactcgtttgagtgtcgggactccccgttggttaaagtgctaagtagatgacttgatctttttgttggtgagctgtattgccacgtggcactaatatcaatcacgtagacatgcaacatcatgtggataaaaatcgagaaaataactttaattaagctatcagcaacatttttaatatttttttttacatgagcaataataattcaaaaaaaaaaacgtaagaaattaaatattggaagcaagacaacgcataagcgggctaggcctgtgcctagggcccacctagcccaggggtccaaaaaaatattttccttttaaaattatacaattttttttactaattttgaaaaataccacattttttttttctaaataagggctcaaaataaatttttttctatgacccactaaatttgagggccggctagtttgaatattatataattcatcataatattactaggggaattttcatttttatgtatattgtttgcaaagtttaaaataatataatttttttaaaaaaaaaaattattttgtgtgaaaattaaaaaaaaatatgaaaaatatgaaaaaaaaaaaaaaacagtttaaaataactaattactttatactattttttcatattatttttattatttttacaaaaaaaatatattttcttacaaattatataaaaacccataacatatataactaaaacctgataacatatctaacttttccactcttttatgaaatgcactatcaataaggttaagacccacccaacttccatctaccttagacgttctttaaattaggattcacaagtacgtgggcaaactctttcttctaattattttacctaattttggtacacatttagaaattggctttagtacatacacatttgtttaccctttcttttgacatttgtcacaatccaagtaaatatgttttctctaactctaaaccaaaacactaacgtgaaatcattattagcctctttttctctaaacctaatggacggtgaccaaaaaaaaaaaaataatacttttttttcaatgaaaacgaaaaaggaaaaacttcattataatacaacttacattcttgaattctagcgtaaatatcattttagatacagtgttttgtaaaatttattaattgtgatttttgtttaaatgacaaaatgaatcccctgtatttttttaaaattgtaaaaatagtactttgagctcaatttttggcaattttatattttaataaaattgtcttaaagataatttataacacgaacagatatatgtaagtagttttaccaaaatatctctagattgaattattattaagttttattttaacaaaaaatcagttcaggatcctatttatattattttgaaaaatacatggtctattttgtcatttaataaaataaaagatcgaattgataacttcggtaaaatacaggatccaaaatagtatttttttttaattctgttaatatcttaacaattaatttct

SEQ ID NO: 56464 - DNA, 1019 bp, Cannabis sativa
tatatatatatatattctaatttaactttactttctatataaaatatacatctaggacggatttttttgttttgacaaatatctaggacggatttaattcccttaaaaatcgatagagtaggttttctattttaataaaataatattatatttctaaattacttcaacatcatttatattactccatattgaaaaacataaaagagcaaaactaagtcccatccaaacttatatatttactaattaggacactcgtgctatgcacgtaagacatatttaacttttttaaaaaattaattattttgaaggaaaatatattattaatattattattagaacatttcattaaaccaaaataaagaaaattaaaaaaacaacattgcctagttcaaaaaagcaacaaagagtgtgacatccctaaaagaaagacatattacttattataaaaaccaaaaaactattagaaaaaaattaacttgacatattttatttacttacatacacattcaataattaagactctctagtctctatattgtctttctatatgtgtaattatattttttgctaaaggtatataattgttgagttaaagaattattaaggtaatcccgtcacaaaaaaaaaaaaaatacaagattaaatatttaatgatacaaaatttaattaagtgttggatgttatgttctgttcttttaaattttatattatatataagaaaaaattaatatctcttaaaataaaaatagttgaccataaaatagtatatttgagtcttaactataaaatagtcttgaaaataataatacttgctcataaaataatatattttattttcttatatatagttaggaaaaaaaataaaaaaagtatactcaacattgttaattagtagaattaaatgaataaacttaattataaaattaccaaattaagcaaagtattctaaattgtatataaaatttaaaataaatattcataaaaaagttttattaaaataaaatttaggataatttaat

SEQ ID NO: 56465 - DNA, 783 bp, Cannabis sativa
  modified_base (353)..(355): a, c, t, g, unknown or other
taagatggttgaggcattgatttgttcaaagaattggttaagttctgccggtaaaccaattgttattcaagaatatatggatgattgaaggttacaaagattgtgttgaatttcttccaggtaatagtctttccactttcaaatattattttattttattttgctttatttatatttacttatgttaattatatgataacttggtttctttatttattttgtttattagatgaggcctccagttttacacaagatttggaagtggttgatgagtaagaatgtaagataaattttgatacaaatatttttttttgttgtagttgccaactgatcaattatatatatatatatannnatatatatatatatatacttactcataatagtgttattatgttttcattttagattgaaggactaatggctagagggtatcgtcttcaatgaaatattgttttcaaaggattatattttagtttttaatttattaattttgggacttctatttatatttttctatgattatggactctaaacattataaagtattaggttttgaggaatgaggacatataattatgtgatttgttgagttagcattttattacacagacttttcacactttcaagtattaaatttagaatttggagacctaaaattgaattgttgatattatattatgttgagaaaatatttttatatagtatagttttatttttatttattttttaaagaataattataaactcaaaaccatggtttcgaaccaaaccaatccattt

SEQ ID NO: 56466 - DNA, 1811 bp, Cannabis sativa
  modified_base (238)..(243): a, c, t, g, unknown or other
tttttggtttaacgaaattttatataaaatgtgtttaacgttattttttagttttttatctttacttaatagaattttttttttaattttataatagggacttttttatttttacattccaaaacagtttttattttttcttttcgcatttttacgaaatttttcattgaaaccccttttataactagcgctgcaacctaattgcaacaaaaaaatcgtatagaaactcctattgcannnnnngctgcaacctaaattgcaacaaaaaaatcgtatagaaactcctattgcaactagcgctgctaccactttagaaacccaaatcgtaaatttgaaaagaaaaagttaaaaacatagtatttgaagtaattcccctttataatattattatatatatttaaaaataaaaattgtataaatattttataaggaaaatacaaattttgtagaatatatattttatataaggaaaatttaatttaaatttaaaatacttaaaatattgtagatatttttaattaattttttaattttgttgttttaattgtgaattaaaataggagacaattccgcttaatcgggcacacaacgttttatcacaatatctcacttagattttatacgtatatatataatcacatttaaaaggcataccaatatagccacaatagctaaaaaaaatcttcaaatattaaaatctcaaacctcatttattgtatttaacattagctaattaaactatattttctttaaaactaattataagttacatataacatcaatctaatatatcttatctataatataaatgcttatgaaatagaaattgttgtgacttcacaaaatttgttgcgacttaataaattatttttaaaaattctgttaaaaactaatagaagttgtttataaggtatgtgactttttacaaaggtgcaaataaaataactattgcattcttgatacttcacgtttatataaatatatgcactaactcatttttctttaatataattacacgtttatctttcgtcataaaatatatacattttttgttgcaaaaacactattttttctacactaaacaaggttttcataagttagcatattaacttaagtggcgtttagtaacacttttatttttaaattttttaatcgcaaaaataaatgtaaaatttttgtttttaaaattttgattttgaaaaacaaaaatgtattctataaacacttttatttttcaattttaaaaacaaaaaataaaaatgtattctgtaaatttcattttattttttatttgttcattttatttaagtcgggttcagagttgggtctgaggtggcccaagtcgggggttggggtcggattcggtttctaaggtctaagttggggttggagtccaaaatattgattaaaaaaagttgttaaaaaattttgaaagtgatttttttttatttttaaaatttagattcttaattaaaaaatcaagaagtaaaaacagttttatagaacatgattttagaaaatactttcacttttctaattttaaaaaaaaaaacaaaaaactgagaaaaagtgttaccaaacgcaccgttagttttttttttttcattgaaatttattcacttatatagatgaatggggaaaaaaaatttagattagaaccattgtaagagtggtaaatgcaagattcgaaaaagtggactcaatattctaatttaagaagttttcacttagatataaaatgtaaagcgcagggtattctttaagaatattgggcttattattttgggcttcttaatatggatttttaaaaa

SEQ ID NO: 56467 - DNA, 767 bp, Cannabis sativa
cgagtcgatattattacgtatctttagctagaaaagcctttggaaatacaatgagcgtaagttctctatttttcctgagcaagtatcacaagagaatttcaccctttatccaaaagatttttttgggtatttattgtgttaagagaatcatacttagtttctctttttccctctaatggggaatttacattaaattacataatttgggctattctcgtgaagtctagcccatgaaagagtcgatctactgactaggaagattggatacggttaatgctgtcaaaaccgtgtcctataattgtgggcaattaattatgaattaatttcttggtcttcatttaggtaatttccccttttagcttgatatgatcttttggcgagatcagaggagcatttacttccttatgtggtgcacttgaataaaaaaggaaactatattgatcttccaggaacatgttgtctgaccatcttgcatcacggtacttgagctactttttgatatggactgtcattggcggaagcccatctggtcatggagctaaggtgcgttcctggaaggttaaggtgacttgggcctggcccaaattatcttctttaggatccattggtgggcccttggtgctgacctggaatccacatgtcccttctagaaacacagataatattaacaaggccatttcaccataaaaaatatctttgtcaagaactttaaaggcaatacctttacttttgtcacttgagatgttttgcttaccttttttcttgat

SEQ ID NO: 56468 - DNA, 1961 bp, Cannabis sativa
gtaatacccattaaaaattgttccatatatatataattaatatttatattcagttattataaataatagcttatttagtcttggtttacaagattaataagttctttgtacataatataccaatagatgtcattaaattataaagcattaattagtagaataattaagcgtgtcattaagctagcgtacagtactgtactaaaaaatatctctgggtcttactcttacagaataatttcatttttcaaatatcatgattaatcagtaaagatttataaaatttcaaacagaataatattcataataacatcatcatatatgccctaaaaaatttattcatagatcaatatcccactaaccattattcttaattagtagtcactcttacgttttttttttttttttgctctatttttaattttgttcaaaccattataagtcgatttttttttttcaaacatatcattaaatgaaaatggacaaataaagtaaggtacgctcgccaagtctgattttatagttcattatttaattatatagagaaattctacttggatttgataattccaccgtacaagcttccaaaaacatattgaatcaactatcaacagagtattgctataaccttgtactagtaccctctattctcttgtggttgattaattacattaaattatataaaattcactagttaattatttcaatagcgatataacatgttaaaagatattaaacactactattattttttagtattattaattatcaatgtcactctccgtaaaattaatacaatcacactcacagctacaaaaataaatatatatcatatattttaaatgagcattgttattaaacatcagtagtgtccaatactttctatagtacttgtcaccttatgatttgttagcaatattttttaaaatttatcttattaagttatatagaacccactatttaattacactaataacaataggacactaaaaataataatagacaccaatgccctttagcaattctcatcttaaattaattaatcttaatttataatagtggtgccaaaataggccaccaaagcattattataaaccatatatatctttacagcttaaaacgacgacgtcacacataactattttagttaagtatgtatatatacaatagctaaccatcattaattatatttaatttattcagtgcaatgatcaccttgattggtttgagccttatcaactgtattaacaagcaagaaactttttgtttgatttttagcaaagatagaagaaaaatttacataataatccaaaaaattttaaaaaatacattaacacagaaaaaaaatttatttttactttttaattttttttattataaaaatatttctttactaaaaataattaattatttttttattattttatagtttatttataattatatttaattagttgtcataaggtagtttttctggttgtttttaattgttgtgagattgatttttctttattttttttaactttggctgaacaaaatatatttttgtaattaaaaattttaagtcataaaattgtaaataaaatataaaagaattaaatttttaaaaattctccaaatataattaatatataagttgaaaataacaaataaattggagtagaatattagtatatatatagaaaaaagaagaagattattttctaaattaattcatctttcgatttttcaatattcaaaatagatttgaaactttgcatacttttcctccaaattaatgatcaattaatccttaattgattgatgcgtgatgcatggtcgacaatattctcacttgcctaataatgattaattaagacatatatataatactaattttcttctgtacgtagaaattacatgcatagtgagtgaaaaaactatagtacaaaatcattttagaaatatatatatgggtgactatt

SEQ ID NO: 56469 - DNA, 1331 bp, Cannabis sativa
  modified_base (1265)..(1276): a, c, t, g, unknown or other
  modified_base (1303)..(1304): a, c, t, g, unknown or other
ctactctgttaaggctgttccagcgaggaagaatgcggctgggggtttctactatcttgggactcacacaggcgatcgcaagatcatcgtggattttcctaataaaacttctttcaaggatgacttcttctagacgactggcattccccccatcggcacaaccaccttccatataattgtaagtaatcatttgcattagacttggttaaattaatccatgccttttattctagtttttctgactgcaagtttactttgtttttgacaactgtctcgaaaagacctacccctacccctgagatgggtgaacaacgtaggctcttgctgagtctctcgtatggccttaagtcatgcgacttccttctgaacgaggtcaacctaaggtctatggatctcctaactaaaaaggagcttacttatgattacaaatatcccaattattcttcttggcagtagattcccatcccagacgaggagaaagctcaagatcgcgtggcttgggcacagtaccttcagaatactgcccctggggaagccgaagaaggagcatcccaaggtaatcaatgtggttggtcacccacattgcttagggttgagcgtaacactctagttacatttcgagatagctactttaacttttatattttgcatcccctactcgtagatcacattacacataggtttgatacttagtatcccagattccatgtctaaattagttgtactgagtagtactatggagtagccaagcagtacgggactatgatggatagggcgagtcatttagatgatagctagaatttagaaccaattaatccttatgatatattcaggatcacgggttgtagggatattagtggatattatggtccttctaccccatcttctagtgatacctcatcttctagggactatggtaaattccttaggtgaaaaattataccccaaactttccttttacttgtcttcaattaatgctatcactttatcttgtctcgcagaaatgcatttcgagggtctcgcccacaggaaagggaagaagagagtgaccacctcggaggctccttccgaggtgagggggagcgcctcaaaaggcaaaagaaaaccatagctaataagaaatgagcctcctagatcactaatctcgaggtccctaaggctgaaacccaagatcagattcctccttcggtcttcgcaagtactgacgagacattcgaatttaaatagaaaattaattgaacttgattttttatttaaaccaactnnnnnnnnnnnnttttcattattataatatggaataaannattatacaaaatacatatttttttaaa

SEQ ID NO: 56470 - DNA, 848 bp, Cannabis sativa
ttaatagatcttatgatttttattaaaaaaaaatagtttttaaggaatatcgctaaccaattgtaagacgtcacatataaaagctgttgggcaccactggtgcccaataacaatgctctatttaaaaaatactaataaaagttaaaaactatttttgtagtgttaattcatagagtaatcttaataatctcacatgagtttgtaatattcatgtatatttttagatctaatttttatcagtgtagagtagtacatcttcctaagggaatattttgatagatcctttatttattttgtcctctagaacaattttttttgtatgatcatatatattgtagttatttatgattatttataaattttcataaaatttcgaataatctataatgtcgaaaataagattcaatattttgttgtatgagtaataaataaccatttgaattttatagtaagactataaattattgggaattttttaaaaaaattagataaatatttttatatatagttctaaataaagtacacaatcataaaacaaaattaaaagttaaaaaaaatttctaaatgcttaaccaaagttaaaaaaaatttctaaatgcttaaccaaataaagggtccaccaaaacactttgagtgtactatgtaaatgaacacagagagaagaaatgctaattgagattagctttggcaaaagctaatctacaattagagaaagcttttatttatactacagaaagtctgttacaagaaagagaaaataaccaagaatgtaactaacaactacctaactacacataaccgaattaactaacataacggtcactcttatgtgttatcatcccccctca

SEQ ID NO: 56471 - DNA, 800 bp, Cannabis sativa
ttagtgaggatatctgcaatatgatcttgagtaggagtatgcttgacataaagccagtgactaagaatcctttcatgcataaagtatagataaggctcaatatttttggttctagagtgaagcacaagcttggcagacattagtacaatgctttgattatcacaccaatttgtaagaataggtaattaagaaagaccaacttcagtaaccaaggattgaagccaaactattttagtagtagcattgataagactcctatatttcgcttcagtgctgaatctaaatattatcatttgcgttttgagctcctagagatcatattggaacctaaatagatagagaaacttgattttgatcttccatcattacactataagaaaaaggatttttacaagtgtagttcattaactgcgccgacaaaaatcaattttttcggtgcagctaacaaacctcatcggcaaaatatggccaattttttccctcagctaatacttataccaaccacttattttgccgacataagttacttttgtcgactcagaaccttagttttaccggcaaaagttgataaaccaactgccaaaaggtgggaacttttggtggttcaattccactattgtcggcgcaagtacgtgcaccagcaaaaggtaattaattttttacaatttaattttattttttccagtgactaaatgcaccgacaaaagtattgaaaattttgacgattcaattggcgcagtaaaaatacgcgcagaaaattaggggaaattttttgtcggcgagcttaagtgcgccaaaaa

SEQ ID NO: 56472 - DNA, 1183 bp, Cannabis sativa
  modified_base (69)..(72): a, c, t, g, unknown or other
aaaatgagttccctcatcactaatgagagctcttggagtcccaaaacgagtgaagacattcttgtgtannnntttcatcaccaccttagagtcattggtgggatttgaaatttcttccacccatttttacacatattctacaaccaccaaaatgaacaaatttttaaaggacaggggaaagggtcccatgaaattgatgccccagacatcaaacaactctacctcgagaataacttgcaaaggcatctcatttcgagcaaaaatattaccaacccgttggcatctgtcacaccgtttagcaaactcataagcatccttaaaaatggaaggccaataataccccaattgaagtacttttagagctgttctttggcctccaaaatgccctccataaggcgatgagtgacaatgctcaagaatgttttgaacctcttcttgcaacacacaacaccttattacacgatcatcacactgcttataaagaaaatgttcatcccaataataagacctcacatcatggaagaacttcttgagcggctacccttttaaatcagatggaatcctcccactcactaagtagtttgcaaaatcagcataccaaggagtggagtcttggtttactaagcttaccatcaataatgcctcatctgagaacatctctttaattcgctgctcaacttcctttatctcatcatcaccttctagtctagaaagatgatcagccacttgattctcagctccttttctgtcacaaatctccaaatcaaattcttgaagaagcaacatctaacgaatcagtctcgatttggcatccttcttggtaatgagatacttgattgcagaatgatctgtgtacaccaccactttggtcccaacaaggtaagcttgaaacttgtcaaaggcaaaagccacagccaataactccttctccgtagtggtgtagttcaattaggcatcgactaatgtcctgcttgcttactaaatagagtgaaacaccttctatcttctttggccaagaacatcacctactgcaaaatcactagcatcacacattagctcaaaagaaagtgatcaatcgagggctacaataataggagccgatacaagagccttttttaaagttacgaaagcttcatgacattccttggtgaactcaaaagatctattctgctcaagtaaagag

SEQ ID NO: 56473 - DNA, 893 bp, Cannabis sativa
acctttaagatctcagataggagccaacccattttccctaagcagttttgtgactagatggtcagaattgcttaacaccttggattgttacttctcctttctaccttcattttgtaataaaactatgtgaagcatgtttaagaataaatgctcgattgcctgatttttaagtacttgctttttctcttggaaaaaaaatcacgtgccatctatagttcttccacattgtgtggtggttctcttttggcagcccccggttatgacactactgcaacgaaccagccatttttcctgaaaagagcttcacaatttgattttaaggtatcattttccttaaaatgtttagctatgcagtttagtatgtacgtgttggtcatattccattcttcatagttttgaattgaggttcatgatttcctgatggttggttgcatctatcaaattgaaaatccaatttgattcagtatgttattatcttattgatgatatttgcatagagtgataacataaataataagatacactagaaaattaaaagcaagtgtctggctcagaattgtgtatggttatcaaattaaaagatgggaacagtgaaagactctaacttctgtcttttacttgtgcccaggacatagttgctacattttataattcttgatatatgcttgttatggaaggtaatataatttaattattatataatattctcacacattacatttacaagactgctaaactctcatattagccatccttataagaggaaaaaacacagtaagttgttcttctaaaatcaaatgtaaactaatagtattatctttggaaataggaagctctttgttttgcccaattggcctaaactacaatattttctcccttatatgagtgattaa

SEQ ID NO: 56474 - DNA, 1074 bp, Cannabis sativa
gggtcttgggtccgggtcggggtcgaggtccaagtcgaggtccgagtcaggattcgggtttgagtcagggtttgggtctgggtcctgggtttgggtctggtccgggtccgagttcgacgtccaagtccgggtctgggtccgggtccgggtttgggtcgggattcgggtcccgagtccgggttcgagtcctgggtctgtgtccgggtccgtggttcgagtctcggtcccaagtatgggttcgggtcacgggtccaagtccgggttttggtcctgggtcacctgggtccgggtccgggtctgggttcggttccctggtccgggtccaagtccaagtctgggtccgggttcgagtcccaggtccgggttcgggtccggggtctgggtccggttcccgtgtccgggttcaggtcggattggtgttgaccctaaatcttttgtaaatattataatacaagctaatacaaaccatttattatgtattaaataatacaacatacattgtattaaaaaatttggtcgtaataattaatacaatatattgcttaatccaaacatattgttatttattatttaatacaatacgatccttatacggcgtaccaaacgagccttaaatgtatagagtaaaaagaaaatattatatgaagaatgaccacaaacgttacttacacacacttaaaaaaatgcatttagtaactttatagtgataattttttaatcatatcaaaataaaaaaaaattgactaaatatcacttttagtcgtcacaaaaaataaattgttaataaaaaaatagtatttataaattgttgctaataaattttttattataataaattataatttttgtgaataatattttactttatgtttggtagggaaaaaaatataaagtagaaagagagaaaaaataaaatataagtgtttagtaaaaaaaaagagaagagaaacattttaagtagagcttaccaaaaattttctcctcaaatttggaaagaaatattttataaaacaaataacataagtaatttaaggataatatagttattttagaatatatcaattttctgtcagt

SEQ ID NO: 56475 - DNA, 1357 bp, Cannabis sativa
  modified_base (62)..(70): a, c, t, g, unknown or other
cgatctgaatgtgttatgacaaaactggttacatttactgtatttgttcgtgttaggaattnnnnnnnnnttggttatattaaaaaaaattatcgaaaatttagttcattttagaaaatacaggattatcattttatcatttaacaaaacacaagattcaatcaataatttttgcaaaaatacaaagtctgtgatagtcagtagtctcgtgatttcgggtaagctgggtaagctgtaaaattctacactgtctgagaatgtcaagtgtgatgattctgagactatgtaggtataaaattatactgttaaagaagctttaaatatatactatctatatcaacaatgtgtattttatttttcggtaacctatcataaacgaaatgacctcttagaaaattttccatgaagacttgaagctaagaatttacatgatctaacattaacccttattattattatccattgcaggattaattgaaaacgaaatgtgtccctacttttgctttgagataaaatatcatatattttgatataatatctcaaaacacaaacttctatttgattgatttaataataataataataataacttctatttgattggacttttctttttgatcattatacattaaatattttcttaattattataaggtggtccttattttttatttatattaaatattatataataaataacaaggtggttctcaaacattgaaataatatatctttattatatataatatatttttctctttttgaagaaagatatataatatgttatacttatatatttaattattaaggattattgttcatgttgaagttaaaatataatttaacatgggcaattgtaagtataaaattctctttgaataaaaagctatttaatccttaaaaaaaacatgatcgttataattaaggaacattattggctggctagttgaatttgtatttttataattataattaattaattatttattttgccctttgattcaacaacgagccaaaattaaattattataattcattatattcttattcttatatagcttataaccattaactataagaaataattctttcaaaaaaaaaaaaaaaacctataagaaataattaatgaaagtcaacaatatacaaattaaaatgacatttttaatttatattaatttaaggagaattttttttgtaccctataaaattataactatattttaaataatatttaaattaaaaattttattcttttgaatcatatataattctttattttaattttattatcttaatatatctatttttttttttatttttatatgtataattttaagaatatgaaaaggaagaaaaa

SEQ ID NO: 56476 - DNA, 766 bp, Cannabis sativa
  modified_base (698)..(721): a, c, t, g, unknown or other
tagggcacaaaacccaatagtttccacaccacttggtggcttttatcacttgattttgacatgttgctgatgaaaatatactttcggcaaaaaatctcatccccattacttatggtcggccactaccacaatttgtgccacaaagatggcagtggtcggctatgcttgtatttttgtgagaagtgatttctttcacttgtgttgcactccttagtattgagggaacacaattggacaagttccctttgatgctttgtaggtggcgaccactgccatctccttgtggtagtattctccaaaaactggagaacacttctatctccatatggcactgggcgcataggctctattccatgggagttttatgaaactttgactttatgcacaagtgtaagcattctcattccaaaacgagtcaagttcttgttggtttccttatcgaattgaggtctctagggtgaaaacgctcgcgcgggcccatgaaccctagtttgggcatacttgcgtgtctgagtatcggtaccaaatggttggttaatatttttgagtcccctagaggtgccatagggccctcaagaaggatttcttaactcatttaacatttaagtcttggtcaaagttgcaaagttgactttttgatatttcaaaaattgggtataataataccgtttaccatgaaagtgttgggttttatgccnnnnnnnnnnnnnnnnnnnnnnnnatcagatttacttattaatataggtcagaaataacatttaatgtt

SEQ ID NO: 56477 - DNA, 4795 bp, Cannabis sativa
gacacaaaaaccacaggcacaggacggggacgatcctcttgaattttgtcttaagattcactggaactttgcaagattagtggacaagcttaggctaatacagaaaaatgactttcttgcaactctcatctgtcgcaaatgccttaagctatctccatgtctagttttgtggccaaaacacacaagtaactgaaagactctgggtagagtttttcaagctcaagttttgttcaatggacaaaagagacttggaaaagcattataaaagaatgactcaatgattctaccaaataggtggcattgatgatccaaatctagagcaagccatacttcctctattctagagccacttggagaagaaactttcaatctactctctagattgggaaaaaggctacctgattctacaattggagaaattttccagctagtcttaaagacctttgaaaaaatgtgctcccaaaagaaatttctctaggaaattatgaagtgatccaaaaaactaggcaaagtttgtagcagacgagatttactcatcaaatgtccttctgaatcttcgtgttcttgcaaaaacccaaagaatagaaataagttcaagacgttcaagttctaaagcacaaagggcgcaaaataaattttttgcaaaggaagcgcgacttttggaaaaaatcttatcgatgctatgtatgtgcaaaaaagggtcattatgcaaaatgattccttaaaggaaaaacagtcaagcttctctcagatatccaacaaacgactgtgatgtctcttgaggaaaatgacatagagtcaatattctccatagatgatgaatttaactcaaaatctctttgtgcattcgaacaatggagtgattcagacactcttgaatgttatcaaatgtctacggttcacacgatgcaaccatcccttgtcatcattgtgcaagttcttccaacaaaatatgtcaagttaataaaagtggtagcatttttcgacacgggagcatcatacacaataatgaaccctaatttcttcttaaagaatattagagaaaagataaacaatactttcatgctgcaaatggaagtacttttttgcagcaaactgattcgttacagttcttcccagggtgttcaattactcacagggtcattggatcaaattacctgaaaagacttgattgtcagctttgatttttacacaaagaagaagagtttgcgcattcttcctagtggacttggttactgataactcttgaataaagagttatttgtcatgttttttttagcttaatttgtgtgtttatttaacttatatttagttcttttccttccattttgtgagaatatatgttattttgtatttttatgttcttttgggtaatttggagttgttagtagaaattattaagttttatttggattttggtaaagaaaaagacttaatagaaaaagtgcaaggttttgctgaagttttgcaggaattttgctgtagcaaattaaagtggcagggcctgattgttgaaattaatgtagaaaaagaggatatagcacttcattaattgagttagcaaatatgaggctaaggtggcgaaagacaagtggtttagagctgatctagttggaaaagtctctaagtgggaattaaggaaccatgtggagggcatttttggagtgataaaaaaccctagctttaaagaaaggggggaacataatttttggcagccaccattattaataatacctagaggaatgaagaaaaagaagaagaagaaaaggagtgcacaaggaagaaggaagaaggaggatccatccacatagtttcttctactcctttaatcttttgtatttcattttcatacttctttatttttattttgggtatttttgtgtttttgagcatgaactaatttatcttagttagaacttttaatgaaccttggattgtgaatttttttttttttttttttgaaaaataacctcagttcaagacttaacaccaaaagagagtgggattcacagggggaaatccctcccctttacaaaacaaagaaccgctttgggaatgtctagcattcttagcaagttcgtccacaaaagtgatattgttccttttaacaaacacaacagaacaagaagtgaaagagttcattaaacttaaagcagaaaaaaattgagcagtgatatgccaatcaggagacttcaagtctcggaaagccttggccaacaccttggaatcagaggcgattgtgactctgtcccagccatagtcctttgcccagttgatgccgaaccgaatagcctccaattcagcagccagagcgttgtcgcaagcaccaaaagaggaacgaaagaaccagtcagaggagtcattgcgaagggccaaagcaccacagccgaagctaccactggaaaacaatccatccacaacaatcaccatgttggtactgataaggtaactctcaacagggactaaagcagcaccagggtccgaaggagctgaggcaaggatagtagaaaattcagaaaatctcttgaggatttctcttcgggcttgatcgacactccaagtgacattgctttcgtgatagattctatttttggtattccagattgtatcaaacaaaatcgcgaagcagctaagcattttacactgtaaatcctcgtcaactccagcacacagattacccaacataccagcaatactgtcatcttgaatagtatcaatacgaacagggtaaggacaaccgaaccacaggcagtgacaaaagagcacctagcgaacaaatggattggactctctcgagaagccccactgaagcaacaattgttgctcacagaagggcagaaaatgtccccagtaggcaaaacattttcacaaactcgccaaagcatcatgctgagacggggatgaaccttgccattccaaatccaaccccaaagtttattccctcccccgaacctatgcatttgagcatcccagtaggcccctttaacagagaaattccctaatcttgaattcttccaaattaggaaatcctcatctccatgcttaacaatctgaatttttccaatttcgtcacccaactcattcccaaaaagaaaccgaagataaccattattccagcttctcgtcctgcggtacattagatcagccacacaagataaaccaggggcaatgcttctaacattctccatgacggacttgaattcgttataattcatccacggaatccaaggttgccaccaaatgtctatactttccccattaacaatgattgagcaagagccatgagccacacattctctagcattaagaatccctttccaaacatagctgtctgaatttttccccacaacactccaaaaggactccctcggaaagtatttgcctttcaaagcaagacaccaaggacgattttctttggaagctagctgccacgctaatttagcaagtaaagaatcatttatatcctccaaacgacggaagccaagaccccctctttgtttgggttggcacaggacattccaagacttcacagcaaggaaacgattggtatcaaccgttccagtccaccagaatcttctaactagggaatcaagttccttacaggaaagccttgggagtttgaaggtggacatagaataagagggcatggataaggctacagagttaatgaaagtcatcctaccaatcttagatagatgtttaagtctccaaccttctattctttcacacattcttgttttgatgaaattgaaatcctttcttttactacggctgaataaaaagggttgcccaaatgtcgttcattagaatggatgttcccaacccccaatatcctttgaatagcagctttcacatttggatggcaattatttgacacaagaaggctcgatttctgcttactacacacttgaccagaccaatcttcgtattttttaatgcactgcaataatgtttccacttcagaggtgttggctctgcagaataggatagtgtcgtccgcaaacataaggtgggaaacttcaggcgcatcacgggccacccgtatgccatgtatagtattcttatattgctcatgatagattagccgagaaaggacttcattgcacaacaagaataagtaaggcgatagcggatccccctggcgaagtcctctccccgggacgattttacgcaaaggattgccattaaggaggatggcataggtcaccgatctaacacaactcataagcaacttagtgattattgggttgaaaccaaacagttgaaggactttctcaaggaagtgccattccatacgatcgtaagccttattcgtatccatctttagcgccataagaccacctttccctttcttctttttaataacctctactatctcctgggtgaggatagatgattccgcaatccaccttcctgggaggaaagccgattgcgtaggagcgatcatagaatccataaccaccctgagtctttgagccaaaatacgagcaataatcttctatacaaaattgcaaagggcaatgggtcgaaatcgatccacactatcagggttgaaacacttagggatgagacaaatgaaagtgtggttcaatcccggactcatgaccccagtgcgaaagaagctctggacgctatttaccacatcattgccaacaagatcccaacacttacaatagaaacacccagagaatccatcgggtcccggggctttgagaggatgcataagaaagacatgggactttatctcctcgaagtcggggatggccgaaagcatggcattatcttccaaagacac

SEQ ID NO: 56478 - DNA, 1124 bp, Cannabis sativa
gtatggatttcttttcttatttttttgattttctattgatgggttttgtgtttgggaggtttgcttttgtggacagatcgtagtattctgattgattttagttgattatggaaaactagaagtacagataatgatattggaaaaaattcgaaactgatctggcattcggctgttgtgtgatctatctagaacaccaaatagctattaaaaaatttcttttcacaaaaaaaaaaaagaaatggttgttgctatcttgtattatttgaagtaactgcatttaagcatgatatttgcatgtaatgaattggtttttttaataaaatttggggtgtcaatatgaatggtggtgttctgtttatatacacagtaattagaagactggttgtttcatatttttctcatgttcgtcacggtaattaaaaaagtccatctatttattattaataatagtttggtgttgtataagggtcagtttttggatattaattttaaatttaattttttttttgcatgcttgttttggttactgagaaaatgcatgaatgaaaagatataacaaaggctaagatcaaacatttctgaatggttcttatgcctcttgaaatccatttttgtggtggtcaataagcttaggtttccttcctaaagtttgcgaattgtggctatccgttactttcctttgtttgtctaagtactagatttgattttgtttcagctttggtaaggactgagaacagagtgttgcatgaaataaattattcttgattattgtaccctattcatcactaaagaagttttagtttagagagatgctactgcaatggttgcttattatatcaatgtgtgacaatgattggtagtgttgcttcaattggctattccttggttgcaggtggacatggtaactcctatgtcctctcaattaacatatgaggggtttttaaatgaggtaagttactatagctggagtgtggcagtattttacttattaaataacttttatgcggtatgatttgactagaaatatttacgagcaaaagagatgctgatgatacgagcaaaacaagcacatgttgtaaatctttagttggtcatgtgatattcattctcactgttcttgttta

SEQ ID NO: 56479 - DNA, 813 bp, Cannabis sativa
  modified_base (497)..(506): a, c, t, g, unknown or other
ttgaaatactttgagagaactcatcaaagaatcgatctcgactatattgtacttgttcttgctcaatcaattaaaaaaaaaaattggtagtgttccatgttggaatttatgccctaaaagcaagtaattagcagataatatattagagaatatgtgaaatacaattataagataaatgatgtatcaattataagagtataattattaaatatctaaaaatttcttattcatatggagaatgtataatcttgtaaggatgtacaagagaattaagattatataatatgagtaaaacaaggcggtattatattaaagtattagaaatctttaatatggaattgctaagtacagtttacatgtacactatatttctagtgtgtgtgattttgattcggatcacatatgtagatagacacgtagtaaataaattgtgtataattagataatgcatgactggactggtatgcaataaacatctttcattaacttgtcgtttnnnnnnnnnngagtttatcatatcacaataatgatcattagtagatcagcttgaatcttgagtatacatgagctcctgtttgtgttcattgagttctttgattcacttatggaaatttctcagagaagatgattcttacaacttctattttaggagcttaataacatgagtggttgagaatatgttatacaatagtagaatccaagttttcctaacggattaaacattagtttccttatagtgtttaattttaggagtgctaacagttgaatccaaatcgataataaggtacagatagggccggccttaggaatagg

SEQ ID NO: 56480 - DNA, 841 bp, Cannabis sativa
tcacttccaagctaaacaagacttttgcactcaaagatttgggtcaacttcacttcttcttgggaattgaagtttgcgaagacaacaccgggttatatttgacacaatccaaatatatatcagatttgttgtagagttatgacatgctcaacataaaaccatgcccaacacccattgttgcagggaaacccctgtcgaagtttgatggagaagccttatcaaatcccactgtctacaggagtgccataggggctctccaatatctatgtcacacaagaccagacattgcttttgcagttaataagctaagccaattcttacaagctccaactacaagtcattggagtgctgtgaaaaaagtgttgagatatttaaagggaaccattcatcatggtcttcatattggttttagtgatcacttaggtcttgtgggatactcagacgttgattgggcatgttgtcttgatgatagaagatcaattgcgggttattgtgtctattttggggaaacacttgttgcttggtcatcaaagaaataagcggttgtgtcaagatcaagtactgaatcagagtatagagctcttgctcatgtcgcatttgaaatcacctggattgaatctcttctaaaagaactcaagttcaagcttccaagcactcccattacatggtgtgacagtcaaagtgctagtgctctagcttcaaacccggtgtaccatgtaagaaccaaacacatagaaatcgatgttcactttgttcgtgataaggtgttgaagaaagagttggaaatatactacattccctcatcagatcaaattacagtttgccttactaaaggcctaac

SEQ ID NO: 56481 - DNA, 1054 bp, Cannabis sativa
tattcaagaaagtgaaaagccaactaaacaatagaataccatcctttagaatcatgcatcatgaccttacagaacttttcagaaactatcatgatgtatctgtaaggacattctgcaccactcaatatatatccattatactccacacagtacatcaagaaaaacattttcaattaagtgaagagttgttttttctcctataaatacagtggccattacatcaaaacgaaaataaactaccaaaagaaatataaagattaataatcatcgaaagtgtagggaagtaacaaaagaatgatgaagaagttgattattgtaatggcgttagtagtgggtgtgatggttgtagggtgctttggtcgactacaaccggatattcatctgaatttggtacctaacaggtgtatggtacctggtgaatattgtcatgttgcacaaggcaagatttgctgtagcggactgtattgtgaaggcgaatggttttggggtgagaatcgatattgtgcccctatccatgggtgtatcgaaactggtggtaggtgcaattttttatcaaacccttgttgctacccggcaatatgctcatccgtctcggaaaaggggacatgtcaagtccctggaaagactttagatgatgttcaacacagtgcttcatcacaaaatatttcaacttattagtactctactacctaaataatgttgcttattattgttctatatatgtacttgtttaattaaaagtactagcttggtgcatggctctatgttaagacatgtactagctagctgctcatgtatggtgtggtttgttaatgagtaattataataaaaactgcccttaattgggtcatttgttgttgttggtttaatctagctattgagatcaataattattccctgtatattgggcattttaatgggcatttctcattatctgtgttgggactaggtagtgaccgtaattttatgggagcaaaaacaaaaataggaaagtatcaaacaggtcgtcaattcattgtagcccgctataaaatagatatggtaagaaaaataa

SEQ ID NO: 56482 - DNA, 3505 bp, Cannabis sativa
  modified_base (3364)..(3371): a, c, t, g, unknown or other
ggggtgtttaaggtaattatatcatcttgaagaaatctcaaaattattattgatgaacaactaaattattttaggtcaaaaaatcaaatcttataaggtggcacaaaaaaaagttctatggtcattttaatataaaaaataattacaataaaataaataaaccaatctaaaactcaatatttaacaacacataatttctagagttataagattttttcttaccaatgtactacgaaatataaatgaacgcactcggtacgtgatattttgtacacaaattttactcagcatcatgcagaaacaataaatgtacacggtacgtgatataatatactcaactaccatcgcacaaacatgtagaagatatgaaggaatgaaaaggcaaaaataactaccccaaacagtaacttcgttgtactttttcataccttaactaccccaaacagtaatttgattgttcctttttattttttaattaaaaaatcaaattgacaaaccggtaaaccaacccacactattcggttgttaaataaataaataaattcacacattattacgtaccctaggactcacttgccctacaacgaaattcattctagcagcctatacatatatatatatgtatatattattctaacagtgttaataacaaattaatgaagaactccacttacttacatgtatcataacttaaatgtattggaccaatctgtttaacttttttacagaattttttccaattgattccaactgatgctcgctatatgttttatctaaattcaggttatgaatatgtatatatctgtatatattaatttgttattattgtatatttaggttatatagattatatatatgagaggaatatatatttatatatgtgatttatattgtatgtttaggttttaggttttgtaaatatgtgagagaataatgagtgatatatataatatattgttagctagatttataaagcgtgaaagaattaaagagagaataattaggagtgtttgaagaatcattataatttataagcgttattagcattatttgacttttaactacttatggatattacagcacgacctaaggtttacgtttcacattccttcaaaagacaataattagctagatatacattatttcaaaaacataactgtaaataaataattagagataatgcatatatattaattattatatatttcaaacttgaataaactgctccaagaggctcaatatatgtatatcgtttttctttttttcttttattatattgggttttttgcggaaaacagatacatattactttaatttttatttattgaaggacatgaataatgcctatcatttagtccctccgtttggcatagtcatctgaaaactgatatcttgagcaatattctgtgcatcttgtgaaatgcccagtaatcctcttgatgagaacccagcgcagtaaatcccacttttgcctttccaatactcattcggccacctttgtcgaggcattccatcttcgttgaacagatcttcaccaccctgcgcgccgtttattaattttccataattattaataatcagctactccacacacatatactgatatacacactcatatataatgtatttaccttaagccaatttctgacagtgcttttgtaaccagtggcaaagattatggcatcaaagcaacgagttttgcggttctcaaattcaacacagttttcttgaacatttgttatggacggaaatacctaagtatattgcaatagtcattatatatattggtctccatatatatattaatgtatgtatccgtatatataacgcatatatatttggtgtattatttataccttgatttctgctgatttaatcttcgccacagatccaacgtcaatggttggagatcgaccagttgttgctttaaggaagaaaggtcctttatttggtgtttgaagtccatactcagacaaatttccatgctttaatctacccaaagccgaaacgatagcgtcgacaattttgataggcatgaatttcaatagaaacattcccagtttgacaatattctcacttagcaaatgcacctggacaagtagagtaaaaatatcaaatcattaattattaattaatactacaaataaaaaaacgttttcttatttcaagaaagaaaaaagaaaacttccagttttataacaattgttaaacgtatagaattatttaatacggaaaaataattaattcatagttaatgtgaaaagaaaatttatatcaaagaaaacaaaataaaagttatcataatttcttttaataatgaattaccgggctccgtgctacgatggaagtgctagcaccccaatttgataaatcgaaggcaatctccatgccggagtttccagcaccaacgaccaaaacacttttatcagtataacactttccacagtcatactggctggagtgtatgactttcccacgaaaagtgtctaagccctctattggaggaatatagccatagttattctccccagtagccaccacaagaaatttagcaaagtacacttcgtatgattcagttaccatgtttttaacgacaacagaccatttagatatgttgtcgtcgtagaaggaggattctacgtgtcggttcaggagaggtgacacctggaaccgagcaacgtagctgtccatgtatcggatgaagtcgtttttggggacaaaagttggggtgcctttagggaaaggcatgtgaggaagctggcagtattgcttggccaaatgaagcttgagtcgatcgtaagatcttttcttccatagagaagcatagcagtcttctctttcgataacaatgttggagattttgaggcgattaaggcatgcagaagtggctatgccagaaggacctgctccaacgatgactacatcaacttgctccatttctcaaagaagaagaaaatacaagaacaatgttgtatgtgaatggtctaggtgtgtgtttgggggcaatttatgcttgtatttatacacccacattgccttttttttgtacaaattgtctcccttaaacggtttttccttttactaccaaattaatgttatacataatttggtgttagaatccaatgttgcaaaataggtaagagttacaactgtatacaggagcaaatattagacaaattctaagtatgtatttaattaagtggattttccataataataataataattacaaaaaatagttacctttagtcacaacctttatcataacataaatttttgtgattcaaaataatttctagtcacaacaaaaaattatgtgtgactaaaacatcatattttaatataagttatcactaatttagtnnnnnnnncaataagtattgtgactaaaaaatttaggtagcgattggttggaagaaataaaaatataagaataagaatagaaatggaatggaataaaatttaaaatgcataaaaaaatttgataaaaaaatcattcaatttt

SEQ ID NO: 56483 - DNA, 1116 bp, Cannabis sativa
  modified_base (57)..(65): a, c, t, g, unknown or other
ttaaagtattagaatgatattctaatagaatgatctttccaccattttggtagaatnnnnnnnnnattttgaaatggaaggaaaaattattctaatgtatgattagaaattttattaatttttttatgcattttaaattttgttccattccattcttattaatatattctcattctcattcttatatttttattccttccaactacaaaccacctaggagtttttatttattttgactttcttactatttcttttacctacctaaattttattttctataattctaaaataaaaataacaactacattgttaatcatttaattaaaaagtaatacaccattgtgatctactttttaagctgatcattttaatatgtgggaaacatatatttttttattttaccaaaaaaatataactaaaatcaatagcaattactcactttcttttataatttattattaaaatagtaatcaaattttaaattcaaataaaattcaatatatcaactaattacttatattactataaggttgtttgatatttcttaaataatagtttattcttttaaacaattttcataggtaagaaaactaattggtatctttttttttctgaacaaaaaattaaatggtatcttaaacattataaaatttaaaaaatttattttagttaacactatactcttttgctgtttaagatgcttttacgtttttttttttttttgtaataatatttaaattaactttaaaatccgtttgagagtcaaacttaataacatcaaaatattaccagaatcaaaagcaatattttgatttttttttttttaatatattattaagagatatgtaacaaaattttaaattaataaaattttatatattaactaaaaaaagacttaaactcaaataattgtcagagtaactaaaaagattttaaaaatcataatatagacaatataatttccataaaaagtaaattattataatacacagctcaaataattaatggttcaactaaaagaatttgagcaatttgcggcgaaacccccttatgttttgatttttatacacttaacccccttatctttatttttggtggcaaaatccccttatgttt

SEQ ID NO: 56484 - DNA, 2006 bp, Cannabis sativa
  modified_base (1950)..(1954): a, c, t, g, unknown or other
gattgggacattgctggaaggagatagcaatcccaattcttagatgaaatttatcaaaccaaaagttggtaaattggagaaattcaaaaaaaaaaaactatgatctgcctaaaccctaacatttattcatagacaattcaaccctaaaaattgttaaaaccatataaggtaacaaaggggctaactattaaattagtgatcaaacctagaaatgcagaattaagagcatataagaaaatagagaaaatacacttattgtttgaatttggtttttggaacgatgagcgattctgtactcgacgaaacaacgaacggtgtgaagattcctctgagtgcttgaaatcaaaaattaaatcggatgaaactcgcagaaaagatgtcaatgacaaggatggcatgcaaggttttgaaatgatctgggtatggttttctgcagaaaagattgaaaaattttcagattttttgaaatggcaaaggtattgaaaagaatggttccttttttcgttttatactcttgggttaatctccgtcggatcagggagacaatcgatccaacgggtagaatttgaaaaagaagtggaaaagattgtcattaaatgctgatgcaccatgaaaccacaaaatcgccaaaatcagaggacatgaattttgattgtgacaaaataccctttgtaatcatttataaagcacttttcattaaaaagaactttttgaggggcaattgttataccaaaaatttggctggtacttcgaagaggacacgtgtcaacctaggagaatactaatcaatgaatataaaatataatgataattataattataaattatattaaaatatattaaaatggaataactcattaaatgcatagctgatagactatatctataactcgctaattgtaaagtcttaagcgagataaggatatacaaactatttcctcatgcgttgacgagaaaccattcagcggtaaaagacacagatataaggatgacatttgtggtacaaagcgagccatcaacctcgctacatataaagagatgtagacgagacatgttgactgtttaaaaacttagcgtatattatacataataaaaactaagcattacaattgaatgaatctgaacaacgaatagtgaggcatccttctcgctataggaaggcatactcgtggtaccttcactaatcagcttcatacatctttcaatgagatccactgttccgttgaggcagctctctcagaaagaagctgacattcaaatgatgttgactactgaagttcaccttatcaccaagaactgtgattgtcagatggagcattatgtcttcattagcaaaaacgacgagatttacattaccaacctcggaaagacatgagaaaagctacagctcattgccagggttattgttgctatgttctcagcgagatgccccaaaaagataaactttacagcttgtctaaacccatgttagccttgacccagtaaaatcggataaataacagctgtgtgattttcaaataataactgcatttattttacgtgggatataatcaaatcccataattttaggaaaaatattgttgtgggatattaacctaaatgtaattaactgcctccctatgtaactataaataggggcagagtgtactgaaaaagggacggaaaatccttaagagaaagaaccctagttttgtaccagagaaatctaataagatagactcgtggactatgcagaactttaactgcaaaaccacataaaaaagctttgtgttatttcttcttcttagactattattatttctgtgcaaatccatcacgaaataggctttaattaaggtgttgtttggtaacacttttgttttctaattttttaatcacaaaaggaaagtaaaattttaaaaacactttaaacaaaaatacgttctgtaactacttttgtttttcaatttnnnnnacagaaaataaaagtgtgttctgtaaactttatttttatattcattttttga

SEQ ID NO: 56485 - DNA, 1402 bp, Cannabis sativa
  modified_base (756)..(757): a, c, t, g, unknown or other
tatactaaaataattggaagtattggaattaaaaaaaaaaaagtaaatttgttgtggcttatgacacacatcagatggataactggctatctaagtacacaatcactcctcctcttagttgtttcaattcaaacaaaattccacgaagccataaagtttccttgaacgcttccgtagtggccataaattctgcttatgtggtggaaagagcaaccacgaactgtaactaggcttcatgtagaattattcaagcttgttccaaatccctttagccgtcttttatgcaacaagttttcttctcacattgttggacagatacatgatgatcgtgtaataagtcatctcctccatttcactatctcatctagtttcttcttagccaataatttctcatctccaagaattttagagactttctagtgcactaggattcctttcaagctttctctccatagcgtgaagtctcctgttccatcgaatttctctattcaaatcttgccattaacaacgttaatttttttttctagaaatgcaaagaaaagaatcttgattctgtgttcttgatcgatgaccaagttctaatttgtgagaaaattacaactaatgtacggaatcaaatcaactaaaatttagtcaacaaaatattagcaatgacacgattaatcattcacaaactataatcatagataaaaataaagatgaacaaagtatctaaaatcagagaagatagagcaataaaataataaaatcaacacnnagatatatactggttcaagtcctatagattgaattgatatatggctctactctagttttgaaacaccaccaaaattttctttattcattgagcaagaacatagtacattacagtcgagatcaattttttattggatcctctcaaagtgtttatctctcacactcttacctaacaatcttcttcatctacaaaagattctccatacaaaactcaaacccaatctctctcttttctctctacctctcaatctctcccttcgaattcacctctcgaaactcgtctgtttatcatcacttactataaatgataagtgttagtgctatttatagataaagaataaggatatgaaatagggatggcaattatacccgcaggtacccgccctaaatgggacgggtacgggggttgaatttcgggggcgggggcgggtatgggtttaaggattcatacccgagtaagaaacggggcagaggcgggggaatagatacccgtcccgatatgatatatgtaatatttaagttttaaaatcataattactacaattaaaataccttcatgctttaggctttttatctattatacttttttttttactatacacactattccacttaagtttattgttttattaagtttttatgatta

SEQ ID NO: 56486 - DNA, 977 bp, Cannabis sativa
cgtcgcgacgaaggcttaaacaaaattttccaaaactttctgccaatccctgttgcgacaaaggtttttcctcgtcgcaacgcgattaggcagcaaaatgtcttgtttgtttttcttctcaattctttcaccacttctcctcaatccttgtaaatactttctttaaacacccgaggacgtgaaacaaaagaatcaagcgtaaaatagccctaaaactagaaacaaagagtgaaaactaaccgaaaatacgacccaaaacatagactaattttagcataacacttgcgaacccacaaggcatgtaggttagacagttgtcaaagtattctcaagaccgcatttagggtttatcaacaatttactcatatatgttatatatcttaaacagtttacaaaagtaaagattacgaaaccgtgagttgaactcgacactggccttgattgtacatatcttgacggccttcagtgaacaacctggtggctctgataccaaactgtaacgcctgtatttgaaatactaaatttgtaaactaactttaatatattataattacttaactataaagatcgggatcccgagttataaaacatagtttaaaactatatttgttattacaaaacaccttgaagatttttttttttaacaagtaataggcaacacaaaatacaactcaaaatattgaaagaccaaaaccctccaagttgcattgccgcaatatgtacaatcactgccgagctccatctcactattcatccagctttgcttttcctttacctacaaaaggtagcaaactaatgagtcatcagactcagtaagatatgcataacatatatataaacaatgcgatatcgactttatgtttaagccgctctgagctctacaactgagcccaccgaatgattaagaacgttattaaaggaagtacgaccactgtaccaaatgcactaaagtgccaaccctgtactcgtgttggtag

SEQ ID NO: 56487 - DNA, 764 bp, Cannabis sativa
gatgacgtggaacgttaataaaaagctattaaattaattaacggtaatattaataatagattgtattttaggtatataaatgaaaatttccctatatacatccttttaattttatacatatacaagaaaaataaacaaaataaaatatggaggatgtttcaatggttacatcaaacatgtaatcatgagagttacatttatttttagccattcgatcattatattagacggttgtgattaatttaaaaatatattaaatataattaataaattacatgtaatttgataattttatttttattcaaaaaaaaacatgattttatttatttctttaaaatgaaaaaaaataaaaaaattataaataactaattagcttttatgatcattttcattaaaaactaaaagtgcggcaattgaaaagtgaaaatgagttcaagaacaacctccaattaatattgttataaatttagagaggtcaattcattatttatagattttttatttcttttttcgagtgattataatttcgatatattgttgacttttcctaaaaaaaacaaaatatcggcagccccacaaaataagcatttataatttttttataattaaattggtttcaaaaaaatttgatttatacggtgtgtttcatatatatggtatatatttttttttgataaatatatatggtatattttaggtaggagagattatatttatacctctaaaaattataattatatcccactttatttactaagagggta

SEQ ID NO: 56488 - DNA, 1217 bp, Cannabis sativa
gatgtataatatgtaaaaaaaaatcatttaaaataaaaaaatttaatagttggcccccccaatgattcagtcctggctccgcccctgactatgatagctggtgtagatgtagcactgtcatttcttgaatacttcatgctatctctgatgaaatcacagatagcataatgtatcatgacaatgatgctgaaatcttaactgagctacatgagagatttaatgagaagaatgctcctcgaatctttgaagctaaaaagactatgcagagtcttactcaatgatcgaactctgtgactaccaactacactcgattgaaggctttgtgggatcagataagagaatatagaccataacctgtttgtacttgtggtgcaatgagaattattcaagaatatcaggaagaagatcgattgctggaatttttggttggtttgaatgattcgtacagctttgtcagatctcaaatcttgatgcgtgatcctcttccaagtgtgaataagacttatgctactgtggttcaagaagagaggcaaagaagattaactagttgatttaacaactcatctgacttagataaatccacatcgagcaatgctcgagagtttgctgcagttgttcaacgttttcgatcaaagtacaattgtactcactgtggcatgaatggacactcaattgaaagatgtcacaaactcaatggatatccccctggtcacaaacttcatgacaaatttctcaatcgtgatgccaagggacctccaggaaagcctgctggtgtgaatttctctagtactgatgaaggaaaatcagaaaaaaggccactagaaagaaaccttgtttttagcctgtccaatgtgtaatgtcagaagcttatgggtgtggtgtagtgtcactctatttttttagagaaaaattatttatcaaattattattatttaattaattaattaaaaagattttttttaatgtatctaattaattggtaaacagaggctttggcttcctgatttttagcatatttcccacgatcctacgttctaacagtaacgtctttcttctcgttactaccttcggtgcattgcctatataatgcatcagaaccaacgggagaaacacatctcttttttttcactgaaaaaacatatacgatatatacatacgattatattacatatatatatttcgagctgtaacgccctaatgctaaggcacgctacagt

SEQ ID NO: 56489 - DNA, 2679 bp, Cannabis sativa
ttagcactttcctagctctcaagagccgttagtattcagttttatacacaagttataacttttgattttcctttcccatcagataggttttcaaccaaaaattattattgtttgatcccttcttcctcaaaaaggttttattaagatgttataacaatttgacccctatttcgtcaaaaaggtttggtcagggagttataacagctcgactccagtttcgtcaaaggggtttagtcgagaacctttgaatttcaaaaaagttttgaaatggcaggttcgcattataccatgtatttccagatgaattttggttaatcatacataaataccccttaagtaagttttaaggaattaaactttgtaattacttaaaataaatgattctctttatttataactaaaattgtaagtttacatcatctatttattggtagtatggtcggaaatgttccacgttccaatagttctttattagctagttgttgagtcgagccaatttataaactccaactccaactactgcttcgatgacatatggaccatcccaattcgagttcaacactcctgcagatgcatctctcgtatttgcaaagactcgtcttagcaccaagtctctaacattgaatagtcttttcttgattttttttgttgaagtatcttgtaactcggtgttggtatgctgtgttggagatttgcatcttagtttgtttttcctcaagtagatccaaagacaatttcaaaagttcctagttttcttcttgattatataactctcttctatgagctgatatgttcacctcaacaggctgcattgcttccgagccaaatgctagcgagaaaggaatgtgtccaatcgctatcttctctgtagttctgtgggcccagagtacctgagggagcttgtcaacccatctgcctttggcggcatctagcttccacttgtccatttgcctgaggcctcgatactgacgagaaacttttgataattttgttactctcgcagaatttagtgaacaagtcgccatcaaattgggttccattatcggatactatattcatgggaattccaaagctactgataatgttcttcatgacaaagtcaaggacttacttggcggttatggaaacaagaggctcagcctccgtcaatttagtgagcaagtcgactgctactaccgcatacttagcttgtcctcgcccagtaggtaatgccccaattaggtcaattccccatatagaaaatgggtagggcaaggtcatcattcttagtttcgttggcggcacgggaggtatatgtgaaaacctctgacacttgtcacatttcttgacaaactcgtgtgtatccttattgaccgttggccagtagtatccttgtttaatgatccttatagacaaactttgccagcccgcatgatccccgcagaagccttcatgaatctctctgatgatttcatttgcttttgcagggagaacacaccgaagtaggggcatcgagtaccctcttctatatagtttgccctcaatcattctgtagcgaggcattgaatacaatagtttttgtgccttgtttttgtcatttggaagttgcccatcgagtaaataattgataataggagtcatccatgtaggagagttatctatcatctcgacgtcttcagtttcacatatacttagctcgttcagaatctctcccagaactaagttcaattcacccaagtaattccgcgaggctagttttgctaaggcatcggtgttggagttatgttatcttggaatttgtttgattttaaagtaatcgaatctttccaagttcttctgaactttctctaaatacctcgccatttttaatcctttggcttggtattccccgaggacttgttcataataggctacgaatcactacgacatatgaggtttttgacattcaatgcctcagttatctttaagccggcgatcaaggcttcatactcagcctcgttatttgatgcgtcaatttggaacctcagagcatagtgaactttaaagccttatggcaatattagtattaccgctgcacccgaaccctgttcgttggatgcaccatccacgtatcacttctaagtttccgtgtctcactgtataggtggaatttcttctagagttatacattctatcaagaagttagccaaagcttggcccttgatggatgttcgaggattgtatgttatgtcaaacttccccagtttaatcgaccattttatcaatcttccagaaacatctggttttgataaaacttgtctcaagggctgatcggtcaacacatttatggggtacgcctagaagtatggttgtagttaacgagacgcatggactaggcacaatgtgagtttttctagagggggatatctggattctacccctagtaaccttttacatacatagtaaataggttttggtgcttgtcctcttctcgcactatagctgcagtgatcgcatcttccgagatggctaaatagagaaacaacgtttctctagttattggttttgccaaaacttgaggcatcgctagatgccttttcatgttctaaaaagcctcttcacactcttttgcccactaaaattttttgttgcctcgcaatatattgaagaacagcacacacttatcagttgactttgaaatgaatttgttaagtgtcgcca

SEQ ID NO: 56490 - DNA, 1494 bp, Cannabis sativa
  modified_base (40)..(53): a, c, t, g, unknown or other
tttctgatctatattaataaacaaatctgattatattgannnnnnnnnnnnnnagggcataaaacccaacatagccctccttatgttggttcgtaattagttttggccaaattactattttacccttctaattacttctttatcttttagtaccgttaacttactagtgaaagtataatttagttcaaatctaaatttgtacacaatttttcagttctagaattaacacttacagaaaactaagattcgatttgttaggaaagttaggattctattattgtagataatgttcccaatcatccacaattagattcccaaaacagaagttgtaagaatcatcttctgtgataaactttaatgagtgaatcaaagaaccaataacatgaacatgagttcatgattactcaagatttaggccgatctactattgatcatctttatgatatgaattaggtctttatagtaaatagtaagtttgataaagacaactttattcatatcggtcattatcatatataatctctattatatacaacaacttcacttagatatcatgctacatcagtaatctgaatcgagattatttgtatcgaataatgggtatcaatgaattgcactgacaaccattgattaaagattcttaaactttaatatgttggtgactattttattcatggctaagtgatcttaattctccatacaactacaagtcacaacctcatgtatgagtaagaaaattttcaatatttatatataaatttttattaatattaataatttaacattcatgcatatatcataatattcaactgttattaacaatgagaaatgtctttacaattgacaatcgaataatcagatatatcaatctgatagaaccacactagcttcacatccactcatctagcaaagagaagtcacgaggagaaaggcatgtgcttcagcttcaagcagagacaaggtctaaacctttgccgacaaatcttccacaatttgatcatcttgattcaaggctaggacaacagcaaaagccacgaaacctctcacagcagcatctgcaagcacattcataccatttccacgagaatgagtcaccaattgtttgggagaagagggatcattcgaaataataaacttgattcgacgaaactcttcaatatcactcaaagtcctacagataataattttaggtggggcaatactcccctcatggaaggtagaatttctcaccttccataagtccatgcacaaaccaacaaccacctgggtaaccttcttcctctcccccacaacaatcgcaccagaaaaggggtctaaaatccaagaaaccatctcaagagtagactcaaaccgcaagggctcacttcgaatgcctcactaagttgagaaccaacattttctagccaaaggacgcttgaagaatacatgagatagagagtcatcaccatagtcacataaaacacaacacagattattaaagccttaccatattga

SEQ ID NO: 56491 - DNA, 1440 bp, Cannabis sativa
taatcataaccataatataacacatgagtgccaccgcgcttgactctacgtgcaaactactatcttacttgatgtctcgtaaatatggagattccaaatccccgggtgttcacgagcaagcgttggtagtcctagtcacacattcttggcatttcacaaatagggttaatcccaaaattcactttcaataatcacataattagcattacatttacagattaacatataaagcttaaaacgagctttccaacgatataaagaacatccaaaatggagtctcaagtcaaaagttatggccaaaacaaaatttggtcttccccaatacagtccaactggaatttcagttggaacagccttgaaccaaccggaatttcggttttctgggcagaaacaacttgaaaaatctcaacttttaagcctccataacctactaaaatcttccccaatcaccaccaaactttctagagcatcatcatataagataataaacatattttacagctcaaacacaataaatgtaccaagaatcaaaaagtgccattgttgagcaagctttgagttcttgaactcaaacttgctcaaccacataattaaacaataacaacaacttaattaggtctaaatctttaatagtacataacccaattgagtgaaaccaaaaccaaatcaaaaatcacaaagtgccacaattactcaaacattcaagcttgaactttaaagcttcaaaccttcaagcttaaaactcagaaattcaagcttaaaaccaagaagttcaacctcaatttgcagccctaaattcccccaaaactatctagatgtataactcaataatgtagcaagctcaaacaacaaaaaagctatcaatttacttcaatcctccacacatgcatcaagaacacttacaacatataaacatgctcttcaatcaccaattacagcagcaaattcaagaattaaaaatggtagaaagactacctttagctcctccaaagtccaagcaaaaaaattccacaaatccaagcttgaaacaagatcaattcctcaaagatttcaacaaattgatatgtgaaaatagagagatagggttggtccaaaggggttgagaaacagtccagaaaattcatttcatttactcacaatttccttttgttgaaaaataactcaattaggcaaaatgacaaaaatgcccctagggtcacattccacatatacatgcattacaagggcaaaaatatcattaacacatatcacattattcaaataatttttagaatactcatatatcaataaaatgccaatataagatctcaaaattgtattttggccccaaactcgtttcgacctaaaatacccgattgtcactataccgcgccgacttgttaaaaaatacctaaaaaaggacacaacaagtatactatataattatatagtccataagca

SEQ ID NO: 56492 - DNA, 985 bp, Cannabis sativa
aaatctacacgaaattcatccttgatatttggcagtcggatcatttgaccccgcattagtggcttggtaacacaaagtttaactccgacacgtaaaaaaggacctcaatcttcattagtagagtcatcaaatacctctataaacttaccaatgatattactaagtgcttcagccaacaaacttgatttgcttaagaaaggtcgtcgatatatttgtacccaaaaaggagtgtatgtcatatttttctttgagatattttatatagcatctggtgccaaaaatatgatgagatagttttggaagtgctaaggttctttattaagaacgtgatgtttgtctccgtcacaaccaaacaatatatgaaataaaccatcatcacccatgtattctataattgtgactggaaactgaccctgctaatggccaaacatttgatcaaaaaagcttggtttgtagatattttaagtgatgagaattttggctaagagaacaaaggaaggtcgagccattggtttaggaagtgcaacatcaggaagtgaataatagaactctcctcatcagtaggagagagcattgaatgcaagttgttcattagaggatccatgaaagtaggagaagaaagacacaagagtaagggagtaggcaccagcgagaagggaaacatggcaaattgtgatggagggaacaattaacatgaagaaatttcaaaataaaacaaaaaaaactagttgaaaaccagaatatagttaaaaagaaaacttaacttacacaaacccaaaaaataagtaccatattttattaattcacccattgttgatcttattattgtatctatttcttcacttgaactaagccagatttaatttatagtataatcgtaatcataataaaataacttatttttgttattttttttaaaaaaaatcttataatacttttataatgtaatcactattacactatttatagaaataaaaattacact

SEQ ID NO: 56493 - DNA, 935 bp, Cannabis sativa
acaaaccaagaaagatcatcaccgaaatcaggtaataccacaggttgatgatggtcagacagatcacattcagtgagatacgcccttggtgcagacacatttggttttggagtgacccatgatttgtcaaatctgtagtggcacacagcagctgtgtgcccagacttcatacagacttgacaaattaatcgagagcttggataggagccacggccgaaggttcttggttgagttctgaattgattttcactgggagggtctcgattgtgagattgaaatggtctgaagttgtcatttctggaattttttgaggcaagattagcttgcattttcagagtgagatcagagacagagttgtgatgatctagtcgactttcgtgagccattaacaaggcttggacttcttcaagagagagatcatcacttctggaagtaattcctgaaaccacagggtcatattcgggtcctaacccattgagtaattgcaatatgagatcttggagaccaacagcagagccagcaatggtgatcgcatcagagagagactgaaccttttcaacataatcagagatagaaagagagcctttcttgatgtgagaaaattgtcccttgagctggagaagccttgtgcgagactgactggtgaatcgttgttctaaggcggtccaaacagagtaggagctggtgtaattggcgacagaagcaagtacaccttcggtcattgacgatcggagccatgaaaggagtaattgatctcgtttcttccattgacgatattgaggatttggttcaccggagacaagatgctggggagggggaacgccaatgaacagagtgtcgtcgagatcgtgtccgatgacggtggggacaacctgagatttccacgcaaggaaatttgatcgatcaagcctaacagtgagggaggcagagagaga

SEQ ID NO: 56494 - DNA, 786 bp, Cannabis sativa
  modified_base (524)..(532): a, c, t, g, unknown or other
caaagcgggaactgattttatcaataataaactcaaaatccttacttctattgcctttgagaagcaaaggattgcccaaaaatctttccccgccatccatttcctcaaaacccaacaggtttttaattgattctcagcgccagagagggaagtttttggagaagaacaccttagatttccttatattaatctgctgcccagaccaataacagtatttatccagagcatccaaatttgcattcacattaccattctcagctttagcaaaaataagaagatcatccgcatacatcaggtgcgtaataggaaaaccctctctaccaactgagtaaccccgaataagaccttcctcttcttttgccaataagagttttgagagaacctccgcacacaaaatgaccaataaaggagatagcggatccccctgtctcaaaccacgtttaggagcaaatatatattaattgatttaatatacatttaacacatgagattaaagaaaaaaaatcttagatttaaaatattannnnnnnnnttcctaaacgctaataaaattggcaataagtattgaataaattttattttttaacggttttactatgagatcataaaaattaggttggactaaactaatgtttattatatatgttggattattaagttttaaattatgttttttatacatattttttttctatttaatgaaagtaagttaaatggtagctaaaatggattgaatggatccaatccaatccaataaaaaatcagtcaatgcatccaatggttgga

SEQ ID NO: 56495 - DNA, 3632 bp, Cannabis sativa
  modified_base (1071)..(1073): a, c, t, g, unknown or other
ggcagaaaaatctgttttttttttttttacatttctgacggttgtcctaaattttaaaatggtctacaagcttttttagcgatgtcgtcagaatctaaagattctgatggaagaattagatgccattgtgtgagatgtataaacaataggtttaaaaaattagataatgtgagagtacacgtatttaatcgaggttttatgaaaggatatgagaagtggacttatcatggggagtcagaggatgatgttgatgatgaagaggttggggattatgaagaggatgaaatgatccctattctgcaagacttccttcctccgacaacaaaggatgtacaagagggaccaaccacaaactaatattttgatgacttatttgagaaaattgaagctgaattgtatcttggttgtgatttgatttcgtctctcaattttttagcgaagctattgcatcttaaagttagagaaaaaatccccaaaaacatatttgataaaatttacatttctgaaggaaaataaaatttcatcaacgtactatgaggcaaagaagagattgaagaaattagggttgagttacgagtctatcaatgtctgtcaatgcagttgctgcttattttacaatgagaatgcatctaaggaggcttgtccagtttgcagaagtagctgttgggttacttctgagaacagtataggaaaaaaagttctttgcaaagtgatacgatactttccattgacacctcgactcaaaagattatatagtttcaggattacagcgaagggcatgttatggcatcatactggtaaatcaaaagatgattgggtgatgcgacacccgattgatggtcttgcttggaaagactttgatgcaaagcatcctaagtttgcaagagatccaagaaatgttcgattgggattagctgctgatggatttaatccatttggcaacatgagtcttgcatacaatatatggccagtggtgttggctaactataacctaccaccttggttatgtatgaaagacaattattttatgctaatcgtccttattcctggtgcaaaatctccaggtaaagnnntggatatatttttaagaccgttggggaacgagttaaaagagttgtggtataatggagtacccaccaaagatagtttgatcgacatgatatttacaatgcgtgcaacacttttgtggacatcttgtatgaatgattttcctgctcgtaacaacttgtttggatggagtggttaaagttataaaacctatcctacttgtaatgaagacacaacttccattcgaataattgggacgacctcttatgttggtcatagaaggttctttccaagtaatcatgcaatgagaagggacactcagtttgatgaaaatattgataaaagacctcattcgagatgatttacttgtgaggagatattagaacaagtcaatgctctcaaactgcaaattctaagatatcatcaggattttgggggcgtgaaacgtagaagagttacaaaagcttttaattggaggaaaaaaaatattttatatgagttggagtatatattggagcacaagcattttaaagcacaacatagatgtcatgcatattgagaagagacagtctcttaggcaccatcttagataatgataaatctaaatatataccaccaatgcaagacatgatttaaagaagaagggtgttaaggaatcgttgtggatttatgaagatgggaacggaaggttgatgaaactgcatgctccttatgttttgactcttgaaaaaaataactattttgtcaatttgttacaggaatcaagtttcctgatgaattctattcaaatttaaagagcaaagtttctctggatgagtcaaatattcttgggttatcccacgattgtcatgtcatcatgcagcgagttctttcggtcggtatttgcaaatttctaccaagtgataccgcaaccactattacccagccatgttattttttcaaacaattatgttcgagaactttaaatgtaaaagatatggaggatgctcaaaaggatctaattctgatattgtgcaagatagaattgattttttcttctgccttttttgaaataatttttatatatattaaataataatattaagcgtacccatataaatctgacacatgtataaaagtgtacacataagcagtctatatatattggcagttaagtgtgaaaaatagatgataccttatatttattagcagttccgtaatttgaagagttttatcgtcaaaatttaaacttaaagaatcaattgcaagtataataataataattgagagagtttagcagcaaaatacttaaaagaaaattattaaaattaaagttacaaattaattactacaattcttttttcttaattactgctgggctactattcattaaattttggataatgacaagtatgcccttattggttacaaaaggtaatcatcatgtccttctcatacatttattccatacaaccaaacacgcctataaccaaaattataggcatgcatattgcttattcataaatacttataattattgtttggcaacattttaatttttttttccaaagtaacatagtaaatattacttatattatatattgtcaaacaaaataagtactattactccttaacaacatgttccggcacaataaggtcctaccggttgctctgcgggatagcaattacatccacggggacatttaaagttattgcacaaaccgcaaacacggtttccttccatcaataatatattgaacagagaaaccctatcattgccatcattcgaagaaagtatctttcgagaacctataaaagtgtaaaaccaacaaatatatatgttaaattaacgagtttatatgtaattgaaatttatatttaattcaaaatggattacataatttataagtgtgtgtttgtctctaacattgtttggccttggaaaagagaaataaaatgtttatgtaatcgtaattaagtgtaatttaaaacaattactttgtttttaaattataaaaaataaaaataaaatttttgttttttaatttttaaacaaaaagaagaaatattttgcaaatttttatttatttatttaagtgaggagtgatcaaagtaaatattaattttcatttttttttttaaattttgattcttattttaaaaaacaataaacaaaaacagtttacaaattaaacatgtcttttttcaaaaataattttacttttttaatcaagaaaatatatttaattacattatttatgtaattagttacataataattaccatataaataaatctaattgataattagtctaaattatattcttcgattcttataactcgtataaaaattgataataattatactatcaaatattataatttttaaataattaagtattacataattattattactttgtataattactacttttgtaaaatataaaaataataataggaaagaccaatataaataagataccttcaattgcaaaagtggatggaagaaaagaaataacaaggcacaatgctatcatggccatagccaaacacttcacaaaattaacattaatattctttttctccataatattaatatatag

SEQ ID NO: 56496 - DNA, 764 bp, Cannabis sativa
  modified_base (51)..(55): a, c, t, g, unknown or other
tctgtttctttattgatgttgaataaaatagattacattgaaatggagttnnnnntagggcataaaacctaacatacatgtgaaggaaaataaaagatacccaggattaaagaattcttggtcaatcaatccatgataaaaatctttatggctaaataatagtaatgttaaaaataagagtgcctataggcaaaaagtacaaacatgaaagccctaaggctaaaaattagtactgttcaaaagtaaaaggccaataggccatgtagaacatgaaatcaaaatgtctatgaaaataaagttatacgtttgtagtaataatcattttatgctacttgtgtccaggtgcaggtggagctgaatcagaagctgtagtgtccaaattgccaaagagtgggctagccgaccaccttgtgaatgcccttgccatccacctcctcagtaggtgtgtcagccatggcctcataaaatttccccaattacaattcttttggcttgacggtggtcttgtccgtctccatccttctctcatataactctttcctctggatcaatgtgcgctaaaggaaagaagctcccatgtaggaaagatcaaccttggtgttacacagcttgatctcatagatgatctccaaagataagccaacgtactcgttccttatggtcttctggccatcaagggcaagctttagttaatcattactcctcccgagttctgcctctaggctagagacgttagcaggaagtatggtattctctttgttcct

SEQ ID NO: 56497 - DNA, 2340 bp, Cannabis sativa
  modified_base (975)..(980): a, c, t, g, unknown or other
  modified_base (2260)..(2275): a, c, t, g, unknown or other
tttaagaacatatacaactttcttttgatgacataattattaaagcacaataagtactattcatatcatataagaaaaacttcttgttcattagtacaattatttgatatatatgagccactaaaaagcaatagagagaaaagtaggctccactaattaattatatatatatatattaattattcatatgcaagtaaggcttatacatatgaaaataaaaatcaaaaaaagaaaaaaagtactatatattactattaatgggtcccatattagcaaatcaatgagagctatgtaagcaagtttgaaagaattaaaatagaagaagaagaagaactaattaataagactatctacatttatataaatatatataaatatttatagatatataggagacaacataattactataacctatatgaaatgcataatggaatgtaaaagaattattgtcctttttgactagagtgagtaaaaagagaagagataattatttatgaaagccaagcatgagcctagaaaaccttatagctacaattaatgacacattgaaaacctttttatttattttttcccaaaaaaaaaaatcacacatatatttataaataatttatggtataaatttttaaatttaactctcagtttaagtttaattttagagaaatgttaaagtgcaccaatggtgtctagtatcttcatgtcaatatcgctattggtgcaactaagtatcgggtccatataatttaatataatagcttttaggaagtatcgctagccaatcgcaacgagacatgtcgagaatgtgctagacaccactagtgcctaatagcaatgctcttaattttagaagtaataatatttaagttatattttcaaaaatttccataagtacataaatgctaagtgttaagagaatggtcgcatggcagttcctgattagtctaagttattagatttttattttttatttaaaannnnnnttaaatataccaataaaaaaattatacgtgagtaataataatacttaacggtcaaatatctacgaaaattttaaaaatataatttaaatattattaacatcaaaaattaaatttaatatttatcaacaactaaaaattaaatttaattatttataccataaaatattatatatatatatatctatatatatacatggtaggctgtcttctttgcttaattacttaaaagaacaaaaagaagcatctttagaaggtgcaaagcaatggtctttattcttatgtaagaaagaaaatgatatgttcaagaaaaattaagaacaagttgcatgggaaattaaataataataaatcacaagtattaatgttaattttgttgagtctccaataataataaccataataataataatatgtgtaagaagaaagaaagaaagaacaatcttaatcaaaatgtgtgcaaaaataggtcaagagtcttacttagattttttttcacagtaaaaaagaagagtgagcacacctccctatataccattgtaatttgtacttgccactcaaaatcccacaaaccaatataaagctatatcatcaaaaataaactcttactataattatacactacaaaaattttaacatttcatcacaataaaattttagactaaaaatatatattatcataacttttatgttattattaaaatttctatagctaaaaatattaattataaaaattacatataatttgttatcactagatatatttttaattgtaattgaaattaattagtgataacttatatttaaatactgtttttggtgacaaataataatttttattgcaattaaattaaaagtgatatttaattacaaaaaatttatattgttaacaagaagttatcactaaaaagtaatatttttagttgtaatatttcatagttgtttatgtattttttatcacttttgtaatggttagattaatgattgagttaataggacggatcattttaatcactaaaaatcttaaaagatattgaaatgaatttatatatagtatacataaatgtattctaaaataaattttaacaatttattttttttaaaatagaaaaattgctactacttcaagcaatgtgttaggttattaatatttctttttttgtaaaaaaaaaaataataataataataaaaataaagcatctctcttccctattgttgcagaaaaaaggttattacatatatctctgtgctagctctgatatatatatatagggtgactattnnnnnnnnnnnnnnnnattgtaaccatcatggttacatttctttttacctgcaatagcaggttacgaacaggtaaaaattc

SEQ ID NO: 56498 - DNA, 900 bp, Cannabis sativa
aggacagggcaaaggtctagggccggatctcgaggtccatttgagtcgattttaggggttcaggtatggtttggggtttgagtcccggtccgggttcgaggtccatgttcaggtgtggggtttgattttgggctttgggttccaggtccggtgtctggggtccgaggtccaagtctgggttcgaatttaggtctaaggtctgggtcgaggtccaaatctggggtctggggtccgagttcagtttgtggtccgagtttgaggtctaggttcgggttcgaatccgggtccgagtccgtgtttaggttcgcggtctgggtctgaggtccaaggtccaaggtttgaagtttgattctgggtgcaggtctgggtctagggtttaggctggggttcgagtccaattatggggctaggtgcgagtgtgtgtccgagtctgaggtctaggccggggtctggggtcacgtttgggttggggtccagggtttgagtctaggtgtgggtgtgtgttcgggtctaggtccaaggcctgtgtccaaggtccagggcccgagtcttgggtccaaggtctaggtcggggtttggggtcctatttgagtccagggttcgcgccctggtttggggtctgcgtccgtgttcgggtccacgttccaagttcgtgtatgtgagcaaaaatataaaaaagaatattttaagaaaaaaaatatttttaaaaatagaaaacaacattttaatattttctgttttctagtttttaaaaatacgatttttgaaaaactatatttaaaaaatttggtcaaacgtcccctattagtttttagaagttattttctgtttttaaaaagtaaaagcagtgtttaagttatgaagccaaacaacccttaatattttattttatctctcttc

SEQ ID NO: 56499 - DNA, 737 bp, Cannabis sativa
ttttttttttgaaagtgattgaacaccaattatatatataactaattaattaacaattgataggtaagtaccaaatcggagaagctaattaatgtaagtgatgtctattaatattttcaactgtatatatatagagagagagatttggattatatatgatcgattatatattaaaccctagaacttgatagaaccatttaacatgcattatctattttttttttaaaaaaaatgtgacattatttttgcttttattataggaccaattataatttttttaaatacaatatagtgtatatatctatattttttatatataaattgatacttggacatggttatgccaacaaacacgtaggcataaaatccaccccataatatataatttaaatacaatatattattcttagtatcgatatagtttattatatatatttttatcagtttatagtttctaaatacataaaaaaaaaaataggcatggaaaaataagttaattatatataatactattaatttatgtttattttttatttttatgtaatatatatatatttgactcattaattagtgtttaaaaatggtatttaatttagagattaaattaaatatgagacttctccctcaaagagaaattacaaaaatattctttataaatgcaaggatatatacttaattaattaaaaatgaaactatatatatatgcatggctattaattttttttcattaaaaaaaa

SEQ ID NO: 56500 - DNA, 564 bp, Cannabis sativa
atgtgtgtggtctacatcatttaagaatatcttctcttcctttccaacaataaaaccacatgagttattatacaagatgaattattataaatatatgtagtattgtcaatttcgacataatgtatttaattagaagaaaccatgggtgcatgcaagtttattacagtaattgatgatgtttaatttatctaaataatattagaaattgctacatattatgttattctaaaaatattttttggtgacatggacatcaatatttgacatatggcaagaaaaatgatatcacagagttgtgtagtcccgagtcatagtagtcgacctgggaggagtccctagccctgcacccacgttgcctctgagaactacaaaatggaagttcggattccaataagttgtttctaattcagtatctttcaatattctgtaccataaagacatgagacaaccaagtccaagccctgagagctgaaaacacacgaaccaacacttcaaaagtcaacctgggcacctagggtttcacctagcgcccaagttgacaacctcaactagggttttagtttt

SEQ ID NO: 56501 - DNA, 546 bp, Cannabis sativa
tgtttgtatatatatccagatatatatatatatgtatttcatcaaatagtcaaaatatgtgtatatattttttctcataaattttatgtagtgagatctgtttttttttattattattgtcagatcttgttttgaaatatctttgttttatttttaagttattgaaataagttaaatatatggctttgctttgccttaaaaaaaatagatatgggtttgaaaaacccagattagttattcatatatattttgaaatgggattactttcaatgtacatctaagaagatgatagactaaataaattagaacacaaaaatgaagaaccaaaagtccaaaatttcaaattttaaaacggaacatattggaaatgacaaataataataataataataattttttatttgacaataatatttattagcggtggaccccgctcgtactatccgccggtactagtctagtattagcggcggacatttaatccgccgctaataataacaaatagcgaccaagtattaccggcggattattagcggcggggtccgc

SEQ ID NO: 56502 - DNA, 916 bp, Cannabis sativa
taaagttcaaagcgctccgctggatgacacgacattctcgtttaaatagtaactatagaacatgaaccgaatgcatttacaaaatgtatcacgcaattagggtcgattggcttaagaaagggcattttgaaagaagaacagagaaaaaaaaagaaagaaagagatttctgactagcttggattaatgagataatgtaattatggaaaaaagctataccaacttcatgttacctagttgcagagaacaatccgaactgaggcaattgccggctaggattcctcatgtgaatgcctatactagctatgatacctaggatttatttaagcataagataattatttccttccaactgtattttagagaaattcgggatctgttgcctctttttaatttgctgagatctattatctttccctccacatatattattattatcttgtaatttagctgttcttgagtaaatttttcctcattttgcacatagcatcagagctttgaatcctcagaaattcccttatttttaagatatctcccccagaagaaacacaaaagaaattcagaggttactaccagtcaatcattcccccccacaagcagttcccaaagttctgatatttccatctgatacactattgttccaattcagttctggaaagaataagaatataggtatttcattgatatcacaaaagaattacgaattgtccaaacgttttgagacagcttggtaatccattactctctttgtaacaaatcaagtccaaatctcttacaattattacaactaatcagccccctctatttatactaacgcagccctactgttttaagctaacaccttaggactattaggccagctaacttagagacatttcatctcagcaactaaggatttgacaactcggcctctataat

SEQ ID NO: 56503 - DNA, 741 bp, Cannabis sativa
taacttaagagcagcttgcataaagttctctccagcacagagtgcaaccccaaggcttccccgacgataccagatcaggttctatggatggtgcccccgcaaactctccccgacgataccagatcaggttccatgggcgcccccgccaactggagaactcaaactgaatgtagatgcaacattgaatgcttgtcgaaacaccattggagttggagcagtgatccgtgatgataaaggccaggtagttgccgcccttgcaaaactggtaattgaaaatttcacatcatatgagattgaggctaaagtaatgtttcatagtttgacttgggcccttgatatgcaaattgttatttctcatgttgagacagatgctttgttggttgccaatgcctttgaataccccttcaacatcaatttcttcattcaaaaatttaattgttgatatatcttgtctgatctattcttttttcttggagttaatattactcatgccaagtgtacagttaatataactgctcacgatttggttaaatttgttcttcgatgaagctatatagcttttagtgttggagactttacttccacttatttaatctattattgtaaatgatttgtttaatttatgataacatagtatttcccaaaaaaaaaaaggtataattgtaacgagaaattaattttttttttttattattattattttagaaagggaaatttgattttctatacttagaaaatcaa

SEQ ID NO: 56504 - DNA, 1357 bp, Cannabis sativa
aaacaagccctaatcggaatcaggcctcaagaaaagtgaatttctcgatccttggctatataaataagtcaaattttcaaaactatcgaaacgacatgtcgttggcgaccaagatatgatttgtttgctcagtcgttggataaacataacaacatagtcagaccatgaattaatggctcagattcacttagagactctggtgacgtggcagcatctgagcgcttaaaatagggatgagattcatgtcgctggcgggtattattactttcttgcttgaaaatgaactgagctgagctgagagagagcgagctttatcggccatggattgtcttctccgacctctctgcagctcaacctctattattatcccaaaacccatcaataattcactgccattaatgccaaagccagttcccttgctttcgctcaaccccagatcgttccccttcttatccccaaaacacctcccactttattctcgctctccccgttatggtgcgtcaactcataacttttttactttttggctcttttgaatgtttacaaggaaagctgtattggcttgggtaactggggtggaattttcgtgggtttgtttttattttgaaaatcgcttgtttacccttctggctgatattgctggagcgtaatgggtttcatgaaagatttactttttctttggctactttaagtaattatattgaatttgtctgttctttggatgaagttttcttattgacattttgggtgcttcagttttgtacgcaacacaacaaagccaagtaagtgagggagtcaacaacgagaccagagaatgggctatgcaaggtgtgttcttaatttgatcttaaaaatagagcgttccgcttgccctatgattaacatttatagaacttagtaaagtgtttctacttttgttagctttgtttgagttagaatttaaaaacaaaaaactcagctccgtggtttaattttcttttggttcttaattttatcatcttgtggcattttcaattgccttagcttaaaggactaagctttttagttacaagtcaattgaatttgtcaattttctgttttgttttattctttttttggttaataatttatgaacttatgatgactttgatttgggcgcagatttttattcccttagaaaagaagtagaagcagcttctgaacgtgttgaagagattagagcctctgctggtcttcaactactagaaaaagaagtttcagctttggagtcaaaagcatctgatagctctttctgggatgatcgagccagtgctcaggaaactctttcagctctcaatgatgtcaaagacaagataaaactgcttactgagttcaaaac

SEQ ID NO: 56505 - DNA, 573 bp, Cannabis sativa
acgtttgtcagtatgaagtttatgattttggactaaccaggacttttttatgaggcttaagttaaaagaaagaacaaagttctctagtggagagtcttgctagaatgaataggcctcgttcatattttatataagttaattatttgtcgtataagtaatttatattttcgagtttatacacatacattatatatttttttccaacggattaaataccacaagtatttttctgttacattcgttactaccaacaacgttaaatgttgattaggctaaccacattgacaggtaacaaaatattattagtccatatcattatatatattaaataaatcttttggaataattttaaaataaaaaaaataattataaattattataaataacataaattaattactaaaaaaaatctaaatattatttctcttggggctcgtttggtacgccgtgttgtaatgtattgtattgtgttaaattgtgttgtattgtattgtattagtattatttaatacaatacaatgggtttgtttggcataacttatacttttccttttaaacagtagaagaagagaa

SEQ ID NO: 56506 - DNA, 1265 bp, Cannabis sativa
tctatactaatttgctttgctttctgcactttccccagttatcatctttctttaaccatattacttgtggataaggcaaggcctagacttgagtcaaaccttctctttttttaagttttgtttttatttttgctttgtgggcattttggactttttcccctttttgttttttgtgaagaaagaaaaaaaaaattgtatatataatgtatgcttcgccctctaccagagggcatcatataccaattttttaatatgcacttgtttattaatttaaatttaattaatacaattgatggagctttggctaatttaatatgttatagtaaagattcaacgttagaataaaggaagaggaatacttagaatacttgctctgcactggatgaatattctaagctggtagctttccttttggttttaccacataagttaaattcgcatctaactaggatttttcttttaattttaatcatcattagattaaccttatcgtttgtctgttcataataaaaatgattgcttatgtagagtttatactaaaactatatagtactcaagtctgcgtgaagaaaaaaaaaatcataaaatgttctagtaagttttaatttaaacaagtttatcttcatcttttggtctaaataataggtttccagtatgatcgtaaaatcaattggcttcttacaaaatatatataaaatttttatcatttaactaaatttaaaaagaataattaaagtggttcacacaaaatttacaaactaattatttattatgaagtttagaataatatatactttttacatcaaatttataataataataataataataatactattattgacgtgacacgatagctaaatttaacatattttgacgttaataaagttccatgtaatataacaagctaccatttttatatactatttggttattttgaaagctaattagttattgtataatataattaaattaacaaaattataaaatgaatattaactatgattttaaaaaaaaatacaaaacagtaactaattattattatattaataattaaatgatttttttttagaaaaagcgaaaaaaaatatatgtttccacatttttaaatatttactttgaagagtagatcataatattatttttttttagatttaattgagtaatgacgtaactaaaaattattttttaagttgacaaaaagaaaaagaaagagaaaagataaaaaaaatataaaaaagcaatgaaaatttgctaaaagttag

SEQ ID NO: 56507 - DNA, 754 bp, Cannabis sativa
aacacgctgcagaatctattacttttcgcttgtgtaatgcagcagcagtaggaatagcattgtgcatgactttccaagcaaaaattttgatcttggatgggagagacaaatgccaaaaggttttccaccacgaactatgaagatccgaggttgcagcttggtcacattcatccaaagtagcagataagtggtaaccagacttgacattataaattcctgatgttgcatgatgccaaaccagcctatcttcagatggaaaaaaagataatggaattgataaaattcgttcaacatccaatgggctaaaattatcctttaagagctgaagattccactccctactgtcagtaatcaaagaagaaacattcaatgtaggtggaccagtgtaatggagcggagtgaaattagtatgaccaggtatccacttgtcgacaccacatcggatattatagccattaccaaccttgtaacgaagacccttaagaagcaattctcgcccccaaagtatgctctgccatgtaagggagggagtgttaccaagccgagcttccaaaaagcaattatttgaaaagtatctgctcttaagtagtcgactaagtaacgaattgggcatgtcaaagatcctccaagcttgtttggcaagtaaggcttggttataatgaataaacgaacggaatcccataccaccttcaaatttagacttacaaagcaaattccatctcttccaatgtattttagaaccatctttagaaga

SEQ ID NO: 56508 - DNA, 742 bp, Cannabis sativa
  modified_base (655)..(655): a, c, t, g, unknown or other
aatgcataataaatatttgtgagaatattgctttaattcaatttttttttcaattattttaaattatttttttctatttttccttaaaggatacccgatgggttctccataatcgatgggtatttccgtatcccgaatccgttggttattagacgggaacggggtggggatagggttataaataggtagcggggatggggcggggattgcattccccttacattaattgctcaatttccatctctagtgataattgtaatatcacaataagcctaatggtaaataattagggtttatatttatattatgggttaatcaggtaataagtgcgattatgatcctactaatttatttcaacataaaatttaaattttgctataagtgagtaaataggcgtaatttattaattacagtgatttatatagcatgtgtgaatgtaatatgagttatttgtgaaataaaaatattttcaggttcggcgaacctggagacccgatttgaggccaaaaatgttacaataattttagttagaaatattgataggattattgggataagttgattttaaaaatacagagttattttggggtattcaaagttggccaaataccctaaaaatagagatttcttagtaactaagaaataataagataantattaataataaagtttttattagtattattaataatattatattattatactactattatattatattactattattatattatta

SEQ ID NO: 56509 - DNA, 1128 bp, Cannabis sativa
taatttcaaaaattatatttattgttatgctaaatttaacacactaaactttaatatttttatattctcgctaattaggcttgcctgtcctccaattgaaatgtcagtatttaattctaaaaaatagtcatttgaatttttttattattggcacatttgtgcttcataaaaataaagtaaaaataaaaaaattgaaatccaagatttaaatcttgttgtgaaacttaattaaccaaacataataattacttatgcaatgtatagaataataattataataataaaattttatgagatcacttacatcgttaatgagattatcaagaacagaagaagctgcagactcaatgaaattaattttttgatcaacaccagctttttgaatgaacggtagtccaacttcataggcttctctatctggatcaatggctgttatctacaaattaatccaaataatctcaaacctacttaccttattattaatcggtgatattcattttaaaattattgacaattaataaagaacccaaaatatacattatttaagattaataatattacaaataagattttactttggcatcatgaggaagagcaagagcggtggtaagaagagaataaccagtaaagactccaacttcaatagtcttctttgcattcatcacttttaaaaatatcgatagaaactgtccttcatccacaggcacgcccatgacactcctgcaattattatgtatatatagataaattaattaatttatatatatatatatatatatacccaaattaatatatgtatatctactgaatgaaataataaagaggtgagctatttatttaagaatatttataccatatactaatttttctttaaatttatgtttttttatatctacactttgcctacctattttttatttattaaagtttctataattttttttcttatattttttttaattcacttcttcttttttcttggttgacttctctttttttctttctttttcttatgtaagccatctctttttcttctttctcttctctttttatttatcttgttttttttccaattctctctctctttctatctgttttttcacactaaattttatatatatatatata

SEQ ID NO: 56510 - DNA, 1143 bp, Cannabis sativa
ctaacatcactgatgagtgcctcgatgaggacttatttatgtttggcaaagtctttatcaggggatactggtattcctttactgtgaaggatgtggctgaagctctaaatctgcctataagaattaagccaactgatgtggagtttgatcgtcaaaaggtgtttgggtatctcactggtgataatgatgtggaactctccaacacaatgcatatgtctcaatttacctatcatcatgctcctcttatgaggtttgccctatccaattggtttccttgctcaaattcggtaaatgtttcaaatgaacttgccttgtttttgtataaagtttctactgatgctaaaattattctggctgatgttatttgggagcaaattgtctctcttagaaagagcaagaaacctaaactcaatcttatttttcctcacttgatttataagattttgtctaaccaagaggagttgattctagagaacgaaaccataataatgcctgctgttggtaccagtttcaaagttccagagaaacctcctcaaggaaagtcttctaagaaaaaggctcggtctgcttcccctggtgctactgatgaacctgctgctgcatctacctccacttttacttctactgaaattgctgaattcaacttgcgtttgggaagaatgaagacaagtcaagccttacttttgaggaggatggacaacatcatgaaattcttccgatccaatgatgatgaataagtggtccattttatctgtgttttgaactattttggcttagttcaagttttttgttgtctttggctccttgatagacaaaaagggagagtagtatttatttttttggattgcttgttacaactctggacccttgtttagggggagttgtcttgtttctggtttgtgcatttttccgttaaaaaggttgttttatttgtggttttgtgaactattccgtttaaaaagttattttattttatgtgtcataatactttcatgcaggggggtatttcttatactcttttgtttttgtttctaacacttgatgtaagttttttccaaataaaatgttttgtcaatgaaagtgccaaagggggagattgttaattctatttttggcatgtttaattgacaaaaatattttatt

SEQ ID NO: 56511 - DNA, 1049 bp, Cannabis sativa
  modified_base (310)..(311): a, c, t, g, unknown or other
ttttttttaattaatcctttaaaaataaagaaaatatctaatttgatttgaattcaaaattcaaattcaaatgtaaatatctaataactaattaatagaatttaattagtaaaagataattaatgaatttaatttgaattgttttagccaataaaataatcaaacaaaattaatataggcatttatatgtcaccctacacgtgtgactaggtctacacgtgtggatcatattttaagatctaaaattaatttctcaattttgtcataaataagatttattatttattctaccaataaataataattgatnnattctcattaatctcttatttcataataattaaaataaatattattttttctaaaataatatatatctgcctttaatattatttaagaataatattatatttaactaattaatataattttatctaataaaatggttaaatactattcattatgcaattcataactgtcataattatttttaaataataatttcacaaattactatttcgcccttaagaatttatttctcatagaaattaagtcttactcaaatgcactcatcaaataaaattttcccatgtgcagtgttgtatagaggtgactcgggaaccatgaacctatatttcgaggctccaataaatacttaattattatcgatctcatcaatagaataatctagtttattatttttattattattccactataaatatgaaattgtcatctttgatcatatagaattatatttacaaaatttttacttgtagtccattgatataattactttaagtagttcggcctccaattattagttcataattagagttggtcaaaattactattttacctttctaattatctcttgacttattatgtactgttaatttaatatgaactattaatctataacttattacaaatttggatccaactatattagcattcccaaaattaacactataaggaacctaatattcattccattaggaaagtttagattctactattgtataacatgttcccagccactcatgtta

SEQ ID NO: 56512 - DNA, 1814 bp, Cannabis sativa
  modified_base (1126)..(1150): a, c, t, g, unknown or other
ctttagcatttctcaaaagaaaatgataaacataatgataaacatgaaggtttttttacgtggttttgtagttaaaattctctatattccacgagtcaatcttattaaatttctgatattgttctctttactcttatgaatttttcgttccttataacttgtctctatttataattacatacttaggcagttaagtacagagttgactgtaatttttacaataattatctcctgaaattgtgaggtttgattacatatcacgtaatataaatgcggttattatttcaatatcacatagctgtgattaatccgcttttactgggtcaagataatcgtgtattaaacacgttttaaatcgcaacgtcctgggatgtctcgacaggaactcagtactaatgactttgatagcgagctgaagcttttttccctatctctctgaggttgataatgtacgcctcgtcgcttcttcgcttgaaggtacaacgcttcattttgacaatcgaatttcttaataacaaagagtacttcagcagttaacataatttgaatgtcagcttctgactcgtcaagattataaatctcactgaaagatgtcagaagttgattagtgaaagtaacaggagcgtgccttcctatatcgaggtaagcgcctcgcttattagctgattgggttcacccgactgttatacttagtttgtatattgtatattatacgttaagtcttgtcatagttattatatctcacttacgtctactcatacgtaatgaggttgaggtctcgccttgtgcatccaatatcgtatggtttctcgttaatacacaaggtaacagattgtatatctttatctcgcataagaccttatagtctgcaagttgaaaatatactctgtcacctccaaatttaatgagttattccatcaaatgtaattatcgttacacgcattgatccatatattctctttaatttgacatgtgtcttccaatgaaatagtagccgaatttcgagtataacagttgttattatatatatatatatatttctattataaggtatatattttttattatatgatgtataaattgtattgtatagtacgtatgtcattttattttagatcatgcatgnnnnnnnnnnnnnnnnnnnnnnnnnaaggtgatatataattttgtaagtatagtataattattttatggttgtatataattttgttaatatggtatatacaatttattttaataatattatatgattttattttttattgtaggtacatatgttttgctatatggtatatgatttttgttgtctatagtataacatttatttaagatgatatttagtttctattttattatatataaagttattttgtatgtatatatattttaatagtggtatacataattttgttagcatgatatatatattttttgagtattaatttagtattgttatattttttgatggtatataattttattactacggtatattaattttgagtgatacgatatattaaatattgttgactgttgtatgtatttaatgatttaatatatttattcgtttttgttacaatataataatatgcaatacaaaaaaattatataacttaatttaattattatatattttaaaaaataataatttgaagtaaatgtatttttataatttttattagttaatttattatatttggtttttttttaattgttttaaaaaatgaacatttattaacttaattaaaaatggggtaagttgaaaaatgcctcttttattaatctattaaccaaatttacttctaatttttttt

SEQ ID NO: 56513 - DNA, 2035 bp, Cannabis sativa
  modified_base (689)..(690): a, c, t, g, unknown or other
cccttcttgcccatagcttgggccagcactcgtgacgcataaggaaccacttttattttatctctctctttatcattttgtgaacattggcttttagaaaacttgccgcatttcactattagtgcctttccatgagaataagcatgcatattgaatattttcaagatctgaacaatgtaagttttctaagacaatcgaagaatacatttagtcctatcttagaggatttgtatcccaagtacatatgaagcctcaccaagatctttcatatcaaaatggtcagataacaattgttttgtctcagataataaatctttattgttagaagcaagcaaggtatcatcaacatacaatactagaaaaataaagttgctcccactgaccttcatatatatacattgatcaactttactctccatgaaaccatttacagtgacaactgcatcaaacttgagataccactgtcttgatgcttgtttaagtccataaatagacttattgagcttgcaaaccatatgttccttgacaggcttctcaaaaccaacaagttgagtcatgtagacatcttcatgcaaatctccatttaggaaggtagtcttcacatccatttgttcaagttccaaatcaaaatgaacaactatagccataatgattcgcgactctttgaaatcaataccttctctctggcnntatcctttagcaacaagtctagccttatacattaatatttgcccacttgagtcacatttgatctcgtaaacccatttgcacccaatggctctgcaacctttcggtaggacaactaaattccaaaccttgttttgcgacataaaacttgactcatcggccattgaattcaattatagcttagattgaggactccttgtggctttttgataagtaacttgctcaaaagcgtctccaacatcataatcataatcttgcaaatagacaatgttgtcatcatgaatagtaggtttgcaagctctctctgatcttctcaacacaacttcaccaccctcaatatcagtattttcatcttgcatgtgatcttgaggttcatcatgagcttctattagaattttttcaatcacaggatcattagtaggagagaaaacaaaagcaaaaggtacagggacctaattatgttcttccccaaatacaatttctcttacctttgacttgaaccaaatttatcttcaaaatagacagctctatctgattctatcaccctggtggtgtgagaaggaaaatagaaccttttctttaagcattattggtgctcggtgggtaaggatttttgtgaggatgttgtggactttttctagactgggaacatgcataagggcataaatgcgactaatattattatccccaaagtgcttaactcgaagaaagtcactcaattcagacccatttctctgtgtaatggggtgtacaaggtgatcttcaaaatcattgctaatagaattagaccgattctccctcggttgatatgccctactcaagcagattttgttcctgggcatagtattcatgataataatatgatggtccaagagatcattcattcctttaagcttaaaaactctgtccaaggtgggtcgtgctactttgatcaaatatgttgggctagctatgccggtctataccatgcagaataccaagctttcaaaaaagttggcttccaaaattgatggtatgattagatatttctggtggggttgtgacccaagtaacaggagcctctatttgaaggcctgggatcgactttacctcccgaagtcaaggggtggcctaggtttccgaaagtcactagaaatgaatcaagatctgcttgctaagtggggatgggccctcttgaacgaagatcaattattgtgttgtaaggtgctaaaagctaaatatctgagaaacaaatcattcttcgagtgtgcttataagaattctgactcggttttggaagaatgtgaagaaaaccaaagagatcctttagaaaggtgcttgcaaaatgatttcatatgggaaagagact

SEQ ID NO: 56514 - DNA, 721 bp, Cannabis sativa
atctagagttcattaagatcattgaactgcatatatcaattacgttctccatccctattagatcacaagatcttttattaaataaaattataataactgcttaagaattgacaattattcataaacattaaatttaggttcaagtatttatgtggtattgcttcattgcagagattatcttgtaaaaatgaatattaataagatttatactatagatattgtatctataataaaatacaaaatacataataattaagataaatagacaaatataatttagtattggcataggtgtatatgtcatagaatataaacttcaatttcataaaagcatctcataatgaaatttgtttaaacagaaaaatttaaattaatactctaaaagatatcgtaatgattgtttgcaataatatgaaaaaggaaatataattcccaaactaaattgtctaaaaaataaaacaatttattcaaattaaattaaaaaaaaaaatcgagctttgtcttctagcttgaacatttgccacctctctatctaactatctgtctcaactcgctaggattgtaatccaagtttaagcagttggaactgaaataagaagaacataaacatagttagtaggtctagaattaataacctaaagggataaaaattctctaaaacacatgaatcctcaacaatggaattagaaataccttaattctttgccaaaaacttaggaca

SEQ ID NO: 56515 - DNA, 607 bp, Cannabis sativa
ccctaatgcatgtatagaaattcaaatttctcttataatatgatgatcttataacatcattgtcattgtcatacattaaagtttttggcattaaatattgatataatgttgcaaaaacattaattcttttctagcctaaccaaataatctacgtaagtacgtacgtggaatctttagtagtgaaaaaaaaaattataaacctttcctaccaacttattgcttcaatactaatctttccgcaccataacattaaaatatatcattattattattaagtaaggcaaaacattctcacaaaaaaaaaaaaaaaaaaaaatgagatgcagttgctacagtgcaatgtagcaaagactgcacatataatgtgaagatggtactatattggagaagtatatctattgcaacctcaaatttgaaggcacctcggagttgctcttagtttattactactattctattaaatgctaactaaagtgacatgtattacatttttattgatctgttcatattaattttaaaaaaacaattaaaatattatttaaataaataataaatattaaaatattttaaaattattaaaacctaaaaatcttccatgcaagtataa

SEQ ID NO: 56516 - DNA, 617 bp, Cannabis sativa
tattaaaattatcaattaaataacaatagccagccataattattaatgggggcacaaagaattaattaaaagagtattaacgggataagaataaaaatatatatgtaaataattaacaatgaaaatataaactttagtgataaagaacattatgtaagataaaattaaaattaaaattgtgtaggataataatgataaaaatgatctatagatataatattatctttgatgtaatagttaagcaagattataaaaaggatagatagaggtcaagagttcaaattgttacttaaaatttctcccaaaatacatggcagttcaagagaaagcgaggtgatactaagacctacgccacaagataggtctccctaattattctcggagtccttcatttcaaaggataatgaaagattagtaatctccataagtatccagctagaccgcaagcatccctcgtctgtccctcttcgcaagtaaagtatattcggaggacggtacaggaggagtagtgaaagataacgtgtcactcaaggaccaagacattgtatatgcatttaatgcagcatgggaaaaaacatcaaacgccttaccctaacaagcgtgtttaagggtttaaa

SEQ ID NO: 56517 - DNA, 1582 bp, Cannabis sativa
cgaaaaacctttcaagtattttttatatgtggtcctctcatccatgttatgcaaagatagtcaaaggagcgtggaatcatcaaatttttggtaccaagatgtttcaagtcacctctaaacttaaaatgcttaaagcagctctcaaagacttgaatagaagggaatattctaacattcaagaggtagtaggacaagcaaaagaagagctatttgagatacaaaagaagcttcaagcaaacccgttgcaacatgaactcattaatcaagagatggttgcaagacagggatatggatatttactcaaggggctgtcatccttcctgcaacagaaatcaaaaatcaactgtatcaaagatggagatgaaaattctgctatctttcatgccaacattagagagagaaggaagcaaaatagaattctgtccatagaagataaacagggaacaagagtagatgatccaacacaaattactaaggtgtttctttcattttattatcaactccttggtagtaaaatggaaaataggaggaaagacttagatggagtcatgaaacaaggcccccaagttacaaagcaacaggcagattggttaatgaaagatttttcaaaggaggaagttaagaaggttttctttgagattccaggagttaaggccccatgaccggatggttactcgagctgttttttccaagacaattgggatataattggtgatgatattagtgaagcggtgctgtcattcctacatactaggcatatgcttagagaaatcaacacaaatgtcttaacacttgtccctaaaagcaggtgcccgaacacagttagcgacttcagacctattgcgtgctgcaatgtaatctacaaggctgcaacaaagctgatttgttctcgcctgaaaaccattcttcttgatttaattgcccagaatcaaggaggctttgtatccggaaggtttattgcacaatataatgatctgttaagacctgattaggcattatggaaggagatcatctaaagcggggtgtatgattaagcttgatttacaaaaggcttatgatatgctcgactgggatttcttggaagaaatattacaagcttttcagtttgctatgaaatttatcaagctggtaatgatttgtgtgcgcactcccaggttctcgatccaatattcaatggaactcttcatggattctttgaggggaaaagaggattacgccaaggtgatcctatgtctccattactttttatccttggaatggagtacttgtcaagaataatgatctaagttggggccaaagtagaattcaaataccatgatcgatgtaaggagctcaaactgaaccatctaatgtttgctgatgatgttatcctactctgtcatggagacttcaaaagcattaatttcatgttacaaggcttgaaactttttcatgctccttcggtttacaaccgaatccatcaaagtctgccatctacttatgtggaatggaagaaaatgaaatacaacgggtcattgatagctctggattcagcaagaaagaggtaccctttaaatatttaggtattcttatatgtgctaaa

SEQ ID NO: 56518 - DNA, 1032 bp, Cannabis sativa
gctcaatcaaagacccaaacaaagtcctggacggtattgatttggaagagcaaaccaaactcatgtctcttgcataatcatgtttgtaaagtacaatgtatttttattgaaagcaatttttagtgaaatgtgtgattcgtagcattgatattgtataaataatataaagtagaggaagaagcaatatctcgttttaaatgtagacagattaatatagtatgtttgaaattctgacctggaaatttcatttggttctgttccccttccccggccttttttaatctcacaacattttatttgccaatgcactcagatttgtgaatttattattacaatgttagatttttatttgaatttatattaatttttattagttttaatgagatatgagttgattagatagttttttatcgtgttagtctatattgttagtgattaatagttaataagtttaatatttgtctaactaagattaagtagttaagtgtctttcctaattctataaatacatattattttatctcaattgtatatcttttgataatcgaataaaataaatctgtttctgatttagatatttagaaaaaaagatttagttgatagtattgcactactaaattaaagtaattgatatggagtaattaggcatgtatatctaattattattgtgttctaaattatttataaattttgtatcatggtttatttcattttctaatattatgtggtatcaaatcgccaattctatatgagttaggatctatattttatttaacaattgattgatatatgttaatttttttaaattatatattaattttgttattattttatggtgatttttttataaattaatcttgaaacattagggcttttattcttcttgttataagttttcttttgatatattatatgcttagaatcgttgagtgatttgagagaattttaagattaaaattttagagtttatataattatataatgttaattttggaatttttgattgtgttgattataatctgaaattgattg

SEQ ID NO: 56519 - DNA, 637 bp, Cannabis sativa
  modified_base (294)..(295): a, c, t, g, unknown or other
tgcagattagtctttaaaatatcttaaacaattaaaatcacactagtcaatattttgaataatcaatttaagatattaatacataaattgatcatatttataagacaaatatggactcataaaattcccccacacttgactattgctcgtcctcgagtaagttaatgataaaataaatgatacttaaacaaatcggtctttaaaaaaaataattttagtttcaaaaattgtacagccacttattattctaagaaaatccaaactcttcaatcattagaatttcaactcaagatnnttacttttcaaactcaatttttgtgtgtgtgtattcaatcaactaatcatattactaacattcaaatcaatttatgcatgccaacaatctatgatcatctcaaaagatatgtgtatttcaacgaaaaatctactctgtaagcttaattatcaaaatattctccactaatgtaaatacacacaatctaaagatcaataggattttataggcttataatgtaaggctaggatgaaaggtaaataaagaagattaatttaggctgaaatcacaccataacatacatatacaacattctctcaaataattcccatttgtatgccccaattacttctcttaataatg

SEQ ID NO: 56520 - DNA, 1665 bp, Cannabis sativa
tggtactattctcactaccaaaaatatttgcaagatcttgactaagagagaaagcctcccctgtttagaactcataaaagagcttaaaaggacaatcaatacattagactaatgagattgagagagattgaaaatatagaaggttaccattcgatttgtgtgacttagaacctccattgataatataaattgatccttggatagtgcagcaactaagcttctctctgaggtgagctccattgattttgcaagcccttcttgctcttctctttgagctaagtttctagaattttctttgtagctctgaaacaaaattaatttaggtcttttttctttctttttggttgaatgcaggactttcccaaataaaaatttgtattccttttaatgaatgaacatattgttttggtgtttattcctcaaccacacgttacactagtaaaagtgtgaaaggtcttttttaaccttgacaagctaagagtcactcttttttttgcctattattggtaagcttcaataataatatatatgattgaattgaatgtatttgtcatctaattttttttttttaaaaattaataactagtttcttttaatattttaatttgatactttttttcttatagttataaatggataagagttggatgcaccattctagattaagtgattcatatgaaaaaggagttaatttttttcttgattttgcatttaaaaatgcaagtcttgaagaaaaaattatatgtccttgtgcaaagtgtggccttgtaacacctgtcactcgaataattgcatttgaacatctcatatgcaatggatttatgaagggttacactaaatggatattgcacggagagacttcttcgcatgctgcacagcatattgagagtcctattgatactcgtgagtcaaattataccattgatatggaaggaattattcatgatgcatttcaacataatattattggtgaagaagaacatgattttgaaaatgacagccttcatggtggaagcaatgaaacaaatacaaaagcaaaagaattttacaatttggtgaaagatggtgagactgaactttatccaggttgtacgagttttacaaagctctcatttgttattcaattatttcatattaagtgcataagtggatggagtgacatatcgtttgaaaaagtacttaagttatttaaaagagcattaccagaaggtgaaacattacccaattctttttatgagacaaaaaaattaataactgccctaggacttgattatgaaaaaattgatgcttgtccgaaagattgcatgttgtatagaaaggaacatgcaaatgacatagaatgtgaagtttgctctacaccaaggtatgttattaaacacataatattttttatatatttttttaattcatagatacttgttaaattacaataacaccattttatttaacaaaataggagtgaggctaaagtgttgcgccattttcctttgataccaagattacaaagattatttatgtcatcaaaaacatctgattttatgacttggcatcataataaagatcgtaataatgacagtcgtatgagacacccaagcgattctccagcatggatgacttttgatcacaaccacaagaattgtccagcagatcctcgaaatgttagac

SEQ ID NO: 56521 - DNA, 890 bp, Cannabis sativa
  modified_base (268)..(270): a, c, t, g, unknown or other
cgtgccaaccaattggccctccacttgatatggagcgaccactgactactgagagaaccaacagaaatcctccaccaggttctccccgtcgtcctctaacaataccaaacctcgagtccttacaaagagaacgagacctcctactcacatcgaagggggaagtcgaagactctactttgacactgaaggttatgagtgttagaacttattttactaggatttagatttactaaaatatatcttgattataatctataatctaacatcnnnaatatgaattttctaaaataatgaaataaatgcataagagattaagaaatccttacattgatggcaacggaagataatgacttgccatttagatctctagcccctgattcttgtctgtagtagagcattatcaagatctgaacctggatcttctcctccttcaatttggttagacacagtcttcctcactatgataggtattactttgacatgtgtgcgcatactctcaaacactttaggcttcaaaaatttgaggaacaagaagagggagttcgaaataacagctctttatattttctaattgtttgacaaaggagtctaataatcaattaagaaaataagagccatcttattctatttataaggtgacttctagggctaggtttagaattaaatgaaataaaaaaaaaaattgatggctttattgaacccttatggccgaaccctatatgggcctattgggtttcaattttgccattttagttaactaatctttcttttcacaaacgatatcttttaattataactctacaaatgtcaattctatcaattatataattataattaattatcaaataaagttactatttaatttatatattaattagaccttacaaagt

SEQ ID NO: 56522 - DNA, 1327 bp, Cannabis sativa
  modified_base (1296)..(1301): a, c, t, g, unknown or other
ttaaccaaatatatagccttttacagaataaatttactacaaaatttaataataataatgaacaatagatatttttacgtcgttttgtatttaaaatctacatactccacgagtctatattattacagatatttatttgaataaagagtataattctcaataataataaataatagaattttctctctattttgtagtccctttttttatggatgctgcccctatttatagatgtataggttggcagttatttttattgggattgattctcttacaactactgatgaaatgggaacattccccacgtttcatttatttgcacatgggataatatctaataactatttaactgctacttgtctttatcctttaaacggttatgttgtctaagaaggttatttctcgctgagtatgagttatccttcttatccatctttagaggaaaaaatgctaaaagtagacatgcttctgctcgcagcattctcatgttataatgatattagcgagatgactactacgtcgcgtagaaagcaagatggttgagtatagttattttcacgctgctcatgtatgtgggttgatgaggtgcaagcttttattcccaagtatgtgggtcaataagctacaggatctttgatgtctcatcttccacgttcttattatttactctgtttatcgcgaagcggacatcttgcctcgtcaattatatttgttaatagttatttattcttttctcacgtatgctcacatagtcggtgagtttgaatatttctatcaactaacaagtaattggaacgagttattttaaattgcttttaataatgtaatttaattattatattctttgagctgattcatattccttttgtaggacacatgtcagcttctgattaatattgaatattgaaacataaagaatgaaattcaaattgaaacaaaataggggagaggcaagccttttatagcttggacctcagtacatataaaacccaagaaaataggactcaactgttttaacagaataaaccgactcctatgctgacacaagcaacaacaacttaactgattaaacagaataaacataaaatgaataaagacctataaacaccaataaacactaaggactgtatgcagaacacactaaagactatatacataatagaaccagtaaacttaataccccctcctcaagatggagagtgtatgtgataaactgacatcttagagatatatgaagtgagaattggtgaagataggggtttggtgaaggcataagctgttgggttttatgccctnnnnnnaactccatttcaatgtaatctatttt

SEQ ID NO: 56523 - DNA, 765 bp, Cannabis sativa
tccatgttggagcagctgcttatatgcgaacttatttggcttgaaagttgtttgaatggttgacacatggctaacctcatgtgtcgtcctttatttgaggtgactttctcggatgatgcaaattcttagttgtcacttcaacatcctaggaatttaatgattgtttaggaaagaggatcttggacattgtgaggacggttacagggaaacatgcttatcatagttatacactttaatgggtccttatgttggtttttatagttcatattaaagttgaaagtaaaatttgttgttatacccaaaattcggctggaggacacgtgtcaagataaaggaaatgtgaatcggtgccatatctttttatagaataactcattaattgcgtaagtactagagtatatctgcaactcgttgactgtaaagtcttaggcaaggaatcaatatacgaactagtacatatagtattaaggagaaactatatgtcgctaagggataaaatagctgatagcataatgtatcatgataatgcagcttagatccgggaagaactgtatgaaaagttcaatgaaaagaatgctccaatgatcttcaaggcaaagaaaaccatgcagagtcttagaaaggggtcaaatactgttactacatacttcactcacctcaaatctctatgggatcagatcagggagtatagaccacaacctatttgtagttgtggtgctatgaagactattcacgaatattaagatgaagattgattacttgaat

SEQ ID NO: 56524 - DNA, 1682 bp, Cannabis sativa
aacatataaatagaaatgttaaaaagatattaatggtgcctaatattatctatggtgtgatatcgttatactattataattaagtatcgagtcccgcataatttaatttaataactattattaaaaatcgttaactatttacgagacgtcacatataaatggttgcatcattgatgtctagtaatattaaatataagctcaatgtggattgtctactatttctcttttaatccacttaaactgtgtctaataaaaagtttaaatagtgtgctaaatttaattcaagatacagacaaatgttatatttgttatgatatttttcattatgctctaatgcataatatcattttaagatacaaatttagaagaaaaaaaaatatcattctaaattaaatatttaattgctctatgaattcggtggctcatagtctcaccaaaattgttttatcttcagatttggcaaatgtgtagtggctagggctacccaactttgtttaagtctccagacttttgattagttgtctgcctttaatgaaagttcttattcaattcagaaaataaaattaaatatttaaaaaataattgctaataatattgtcattcaaaaatgtattgatgtctattattaatgattagtgataaaattgtaattaaataaaatatatttattatgtgctaaattaagcagtattagagttgtacgtcgttcagtttagtcgatttatgttatattttatttaaccctgtgtaaaatttgggttacaaaaatataagtgaaatctgtctaattaagaaaaaaaaatagtaatttaatgaaattagtcggtttagacagattaacaactattttttttttttacattcaattattaaattttagttaattgtaataataagacaaatatataaattgatttcaaaattcaaatcaactaccataaaacaaacatagttgtttgaactttatattttttaaatatgtatgtaaattatatgatatgtaagtatatataataatacatttatacacatatataaaactctcttaatcaggttagtcgggttagttcagattgattgtgcgggttggtattattgtcaacccactcaatataaagattggatgagttatattttcgtcggattattcggtttgtattattcgtcgagttatgtcaatttagtttaggcggtttacaaaattttatgtacaacccatattatttatttggtcaaattcgacataacttttaacatctgtcaaatttaacataatttttttttttgagaaatcaaaatttagcatattattaaagaattaacttttcaattaaaaatatagcattggacaagcttttacaatatattagatcattttcaataattatactaatttggtgtaaaaaagtttatttttagtgctactattttaataattcataccaaatatcatactagatatttcattaaataaatatattttatttaaaaattttagttttttatattatttatattaataacacaaagtaattattttatgatataattatattacaattacgatttaaaattttaaaagaatttaataaaataaaatatttattaaattaattaaatattacacattttacataaaaaaaacttaaataaaatcaatttattaaattattattttactt

SEQ ID NO: 56525 - DNA, 829 bp, Cannabis sativa
  modified_base (27)..(34): a, c, t, g, unknown or other
  modified_base (453)..(461): a, c, t, g, unknown or other
gttaaaccaagaaatgccgttagatannnnnnnntaatatataaagatatgtatttaatttttaaataattatgttttacattaaaatattatttgtttatttttttttaaatatatataaatatgtgtagattggattagatccgttaatttatgttatgttatttttagagttaattttcttctttattgtcactttttgaagaaaaattatacttgttttctttaattttaagtttcgacaatgtataaactggtcaaatcttacaaaaacatgatctgaaaaatagagaaaattgtgcaagaaaataaaactgaaacttcaagcttaaatttaactatgttttgatcatattttggagaaagtcaaaacataaaagttttagatctctcttcaatctttctggaacatcttaaatcatcaaattttgagcaatatcgagagagttatgnnnnnnnnnctatcagtcgtcgcagtaggaaatttctaaaaaaaaaagatagcaaaaaaataatagcctttcaagtagagttgtgatttttatcttttttaagtttaaattttcaatctttttagtatctatatacacattattattaatgttttgaagatattttaagagctcaaaaaactcaaaaacttttaattagcaaacataaaatacataaaataaaataaaaacttgaaacaatattaaattaatataaattttagggttaattgcggcaaaaccccctaaagtagagagggttttgcacataacctccaaatctaaaattttggtggtaatactacctaaaccactggtccgttagcaaatacactccc

SEQ ID NO: 56526 - DNA, 962 bp, Cannabis sativa
aaatcaataatacaagctattccggtctatctaatgagttgttttagattaacaaaggggctgatccgtgagattcaaagtcttatcgctcatttctggtggggatcaacaaaagataaacaccaaattcattggggcagttgggataagctttgcaaagataagtgggctgggggtatgggattcaaagatttggaggatcttaaccaagccttacttgccaagcaagggtggaaacttgttacctacccagatagtttggtcgctcaagtgctgaaagccctctactacccaaattctgacttcttaaccgctggccttgggagttattgctcaaatatttggagaggaattatatggggccgtgagcttatagtaaagggttcaaggtggcgtgtgacaaatggtaataaaataagaatcaatgaagaatattggattcctcgaggggcccctttccttctccgaactccggctatggttccccccaactcatatgtgagttctctaatggatgaggtgggcgattggaacatagagactctcaaggaaacaatgcacgaagacgacattacttggattttaggcatacaaacacacaaagatgtggggaggatgaactaatatggcatgatacaatcaatggggagtatacgatagctagtagttacaagacaattcaaatagagaagcagggggctgaaacttcaaataaatcaacagtgagggggtggtggaagatgttatggcactcgaaattaactccgaagatgaagaattttatttggagggtgtgtcacaattggattccttcaaagagtattctggtgcatagaggaattcaacttgaccgctgttgcacaggttgttggaatcatgaggaaaccataggccatgcgttgtggaaatgtcctcggttgaagattgtttggcgttcagcggggttctggcatcttttcccc

SEQ ID NO: 56527 - DNA, 1219 bp, Cannabis sativa
aaaattggaaattgagaattaaatgttaaaccatataaagtaaatgtaatcgaaattaatcaccctaagctttaataattgttaattttaccttaattatttattttcttattactagaaataaaacatcttttcttatttttatttttaccaaatagaattaggaatttatttgtttggtaatcaactacagtccttgtgagatcgacctcactcttgtgagtctattacttatgaacgatacatatacttgcgtgttggaaaaatctataacaagtttttgctgctaaggacccttctcagatcgattgctatgattcgagactactcaactctgagatgtcatctttcttgccatgtatgaaacattaatgtccacgtcaccagagaaagttcttgggttaacatactgtggtttatttgtggggattttcactcaattttgagttttgatgacaaattgagtggaaggcctgtgagtttgaatgagatagttgatgtaagcacctggtttgccttggggttggctaatgaattaaagaattctggttctcaatttacttggagtaacaatcaagatagaagggagtggatcttttccaaaatagattagtttttagaaattgaggcttggcaagatacccacctgaatacagaggctttttgcacatgatcaggattcaaatcactattttttcctaattagaagtctttctcttagctgggtgtttcaacccttcagttttttcaacatgtggactgagcacacagattttaagaagttggtggtagatagttggacccaaatggctcaaggtaatgatctttttaccattatgctcgagctgaaaagattacaaaaggttctaaacttatgtaataagaataagaatggtgatgttcatagaaaatatgagatggttggagttccttacaatgaaacccatattgatttgcaacaagatcctcactcaatatctcttcaaaaccaagaagtggctgcaagatctaatgtggcttattgtagtaaaatacttggcttctttcttaaataaatgagtaacatagactagctgaagtttggggatgaaaaatttgcattttttcatgctagcctaaagaagcatagagaggaaaatcgtattgcttcctttattgatgcacatgtcaagtggtagatgattatcatggggtggttgatcactttctcactcatttt

SEQ ID NO: 56528 - DNA, 1524 bp, Cannabis sativa
ggcaccacccatactcggttccagcagatccccacatatcaccaccctcccttcactcttgcccttagagatagagctcaaaggcttgctcaactttgtgaagtacgggctgagagagctcataaagttgatgaactcattcaacttaagcgtgaggctaagttgagggtaagttgaagggattttcaagggccaaacagtctgctcatgagcccttgaatcctgaagatgaaggtgtggaagagcaggtgactccgctcaaaagcaggaagaaacttccagcctagactaggtacgttgaacatgaaattcgcattagggagcccagttcacctgctcggccatcttctcccgtgctaggaaaagggaaagctgttatggcggagataagagacttgtcaggtgatgatggactttcgagttttgctcggataatcgtcttgcaggctactccgttttgtttttaaacttcctgactattatgctttatgcttctgatgtctttttcctctaaccatgctatttttgttccgtgcagacatgtctcagaagatgttcgatgctctgaagaagagagttggaggaagctcaagctcatctcctccagccaagaaatccaagggccgtgaggcgaccccttccaacgaaaaggcacccgccggggaggttattgacctttccgaagagctaactgttacgaacccctttactctaaaagttactaagtccaaagattccccagtaggaagctcgaacaagcctgagcaatcaaagtgtggatcagagttggccaagagcggatctgagcagatgcgggctcctactccacccttgacagtgcatctagaggccaagaaaggcaaggagatgctcgcccattacatgaacctgttggttcttgagttacgtgagcagttggccgacgctaacaaagaatattctctggagctgctgatgggaggagtcttcagtgaattcacaagggttagtctttgttgaccatttcctttagtcctttttttcttagttcagactctaaagtttttctatgtgtaggctggtctgaagttggcttatacttattcccgagctaagtctgccgcctccaagaacgctgctatgtccaacaccatgatgtcggaggtggacttggccaggaaggacgttgatgatgcaagggtggagctctgagctgttcggatggagctaagtgaggtcaacaagaggctttttacggctaggaagaaaatagccgagttgactaaggacctcaaggcttccgaccaacttgatgctaccatcagcgccctgtcagcagaagtaaatagccttcaagaggaaaggggacttctttagattgtcttccgtcggctggaagaggagaagaagaccaaggaagaggtgcttaaaaactgagattgggaattacaagtcggaggtggcgaggcaggaagaaaaagtacatgtcttagagacagctggtctcaagattttttatgacttttggaaggctaaaccccagga

SEQ ID NO: 56529 - DNA, 1762 bp, Cannabis sativa
taattattgtttagaatatcaagacttggcaattacaatggaacttacaaactcattgttcgcaaaataaaccaatgcaatcttctttcaaaaataataataataataataataagtactcactgaatttcaaactgaaaatcttgaaacaaagatatacataacaaatatatttcaaaagcgagcaattcaatctatgaatagtttgataatatgatgtaccagtatatcacatataaatagaataagtaaatgtgccatcatcataaatcatttaaagtcatggaactaaagctcaacacccaaaacattcaaatggttatacaacatagaacaatgtgttagactatagaatcataaatatgttcacaattaatcactatcaccacttaaaatcattctaaatttaaaatcttgatacaaataataaaaaatcaagcacctcatgcgagcagaggaaagaagatttgaattcctgctttatacctcttatttatctgcaataatgaaacaaatagaagcatgatattagagaaagaagaaaaaaaagataaagaattaataaagaaaaaatatagagaacaagtcgtttgagtcttagagagacgtacttgtacctcttcaagctcccagaggtaaaaaaaaatgaggtggttcaagtatgaaatagaggtggaaaatatttaggatacaatatatataatatataatatataatatttaactactaggttatatatgatatagaatataataagttttgatttaatatttacgctgcgcctttttttttttttttggctgatcttatgatcaaataggctcaatgtagaatcattagatgaccacaacctctctaaaataaggagttgaatttaaaactctacgaaaaaaagaaaggtgataaaaatgaaaggtaataaattaagagagtgatcacatgacatgattcaccttatttgattctttagcttatttatttatttatttattctagaaaaatataaacatatatgaattaattttcattatcaaacaatgtcaattatacatattgtttagcttgacgacggtagtgtggtaccataatattattagtacaatcaagttttacatgttacaaatctcaatttaagaattctaccgatgaaaaatcaaaataaatatttagagttataaaaaatatataattatgttaaaacatacatataaatatttctttgtcgtgtagattattttttaagttaatttgaagtacttaaaacaaaagcttaataaaaacgagctagagtctcgtattcttcttatcaaaagcagttacaaaaaaaggagtacttacggtgtttctaaacactattaaaataaaaaaagaacaaaaaaaaaatttcacaaaaaaaaaatcctaaacaggtatctaccactcgtgatttattctatggttatagtggaaaactttgggattaagaacaaagagaggatgagccaagtctcgtaacaacgttcattcaaatgacagaggatgttcctgagttcatcagaactacgatcttctctccatttctcaacggcgacaagcttaccccgccaactcgaaacatcaccctgaagtaggataactaaagaacataaatattccattgtttctttagatgaggacaactcctcggttagccttaagagctcagcacgaagctcctccatagttttcgtgccagtatcatggaaacacgaacgttgcttttggtaggaacatgaatgatag

SEQ ID NO: 56530 - DNA, 1321 bp, Cannabis sativa
agggcataaaacccaacagtgtatagttgtgttttcaaactttcttgccccatgttatcaatgatttctcgatgtgttttcaactgattctcaatgattgattggttattattttcaactattaatattgattacttttctacaggttcttgattggttctcgattatttatcgacattattttctactattgtaattttttgttttttttttttttttgttattttgattcaattgtttgttgtttgtattgaatgtcaggatcgtttgtatttttacttgtatcgtatgatggtgctcggagtgttgagggatttaattgggtatataaaatcgaaaaaagtttgatgagtatttattaagaaaagtataccttcaaaaatcaacaacatcaaaaaaaagaattatattagttgatgagtatttattcatattgactacttcgtcgataatatatcaataataaccaaacttccaacttttttgcaaaacaattcaaaactataacatgtcaaggacatgttgagattcaatcgataatccaacaatgataacccacaaaaaaaaaaaaaaattctaactcatatcgataacatatggacaacccgtcgataatcaatcgatagtcaagcgataataattaaaaaaaaatgaaatcacaattcttttacaatgcttcatatgtcgagaacctatcgagaacatttcgataacttgtcgataatagctaaacttaatgactatactgccataatagataaacttattgactataccaccaaaggttaaatcttagcgataacctatcaacaattaattgatattcaaatgagaatcaacgaaaaaaaaaagaatttataatttttttttacaatgcttcaactatcgagaacctactgataacatatccataacacgttgatagtacagattcagctaccaatttggtaatcttcaaatcatctttgactcaatgataattaaaaattaagtagcattacctgccaatttaaaagattaattcagtacaatatgaagcaaaaatatactaattaaaaaaaaagcttaattgataaataattaaatataaaatgtaacatttacagtagaataagatagaaagagaaacacaagcaccatcatacaatacaattagaaacacaaatcatcctacaattgaatacaaacaatgcaaaactgaatcagaataacaaaaaactacaatatttggagactctctcgacaaataatcaagaacccatcaaaaacctgtagaaaagaaaacaataatctttgaaaataataatcagtcaatcattga

SEQ ID NO: 56531 - DNA, 1513 bp, Cannabis sativa
atcatcataacttattatcccgacttcaattgttaattgtttattacatataagtttacagtattgtaattagatattagtgtctagtactatatcattaaatttagagcattgttattaaatattatagtgtcagtacacttttatgagttagtcattttataaatagtttgttattttttataataattattaaattaaaataaattagactcaatattaaattgtcaataacaattatatgaaatttcacaaaagttataggcaccattagcatttctcttaagttaaattagcttggattgtgcatatcaaataccttacagtattagatacagtattagatagactattataattctttgtgaaccttattagctagccttaaatttatatatatgtacattgcatggatatgtatatatgtgtgctttaaaaatgtatatttctggtttgttttagctagcccaatagctatgacttaagttgacacgcgcgtacgtaagaaaagcttaaacttccatggaaattagtgaaatgataaatattctcaatacacattaaaagtatttctacatcgcattgttgaatgtttttcctttcattttataacattagcttccgcataacggctggaattttatatatgtatacgctttgtatttgtttttcagcttcttcttttagggtataaacctatatattacaagaaaaacaaacctcacataaaaaacaagctagccaggaatatataatctattccacttatttatatctctttgtttgttaatcaatgtttttgatactcttagaattgtaattaacgtgcatgggttttatttcaaaattaattgagaatgagagtattagttcatgtattttctgtatggtatttagtttgccaatacaagactctctaataaatacaattaatagctatatattgtatataggccaaagatagagattagctagaggatatatatattaaacaaggagaaaattattacttgaagataatattaatttgttttagagtgattaatcaagtctttcattttacttatattatgttgttttattattttgcaggttgaatgaagaataagcaatgaaaggaatttaagatatatgttaatctgggtggccaatatcttgaagtttcattctggtgttgattttaattagtgctactttctgcttttctactcttacatgcatgaatggggtttgatagctatattatcgaaggaaaaagtacgtacgtgtgcgtatgtatgtacgtgcggacttgaatgatatgtaattgatcagtgatcatttgtaggcaacatgtatatgctgccctggtatatataataaagtttttaatttcatttgggaattttaatcttcgacacattaataaattagtatatgtactgcaccagaactcctcttataaaaatttaatttcggtctgtgcatgatcataaatttcttattgatgtgccttattgtatcatcatctcat

SEQ ID NO: 56532 - DNA, 781 bp, Cannabis sativa
cttgatccacctattgcacattcaaactagaagtgatagtagatttctctaggtttattttctgaccagacacatcctcataagttagaagaatacgctttatagtttcagtatcacctccattcgccctaccaaacactaggctatcattcgcaaaaaacaagtgagtaacccgaggtcccgatctagaacatctaaaccccatcatttcagatcttgcctttgcatgagagaataatgaggacaacgattccgcgcagaagaggaataaataaggagataaaggatatccctaccgtagccctctaatcgaagtcactcgacctttaggtcaaccattaattgaaaaagtatattctagtttcgtcacacaatccatgacaactctaatccaagccttagcaaaaccaaactgtcgcatcatactggccaagaacctccattccaccccgtcatatactttactcatgtctagcttgagcgccataaatcatctgctaccgttatttcttttaaacaatgaacgatgtagctcaaaattgaccataacgttgtcatgtattgagcaccctgggacaaatacactctggaacgatgagatgagggggcgaagaacatgtttcatccttagtgataaaacttttgtaacaattttgtacattacattatacaaagcaataggtcaatactctttaactaatcttggtttttgtacttttggtatcaacaccatttttgacttattaaactattgcactgataattggatcggtttggtcgg

SEQ ID NO: 56533 - DNA, 1490 bp, Cannabis sativa
ttctcttcttaattctttcattttttattttttattcaatttgtaaatattaattaactaattcatttatattttattcaatttaaaaatattatttaactaatttacaaacaaaatcatatagattcacattttttatcactttaattaaaatatttaaaaaataatatacatcataaactctatatatcctaacctattttgattatttttcatatttcaatttactactttcactcaagtgcactttttatatttgtttcgtgttgctttcactcttaagatttgatggtttgcattaagggcgataatttgatgtattttaaattattttaatgtctctttaattctacaaaattatattatcttttaatatttttttttgctttctatatcactttttttttgtccatgtatgtattcttagataatatataaaatttaagaactaaactttatataaatataattagttttaggttttaggattttattttttcttgttagttttagttataaatttttttaaaaaaatatagcgggtacggattggacccgccccttttaggctaactcgtacccgcctgccaaataacgggttaaaacttaacccaacccaatttttgtagatttttaatgggcggattctaatgggttgggcaattcccacagtttaacggtttttatgtgccgatcttttaaaatatcatctatttttcacaattaaaggttaacttggattgcttatgagtatactcttgtacatgtgatacatttatattgataaacttaatattatcatttaaaaattataatatttttatatttttaataattttatttttatattataattttatctaattttaaaataaatttcaaaataattttttaataataatattaagtatactaatataaatgtgtcacgtatacaagagtatacataaacagtctatggtgacagctaatcaaatgacaccttaaattttctaacagtttaataatttgaaggattttaccgctaaaatttgaatttgaaaaattaagtgcaactcaaacgatagttaagagggcttaactgccaaaaactctattaatatttgtcttttgaatgatgatttttttttttttttttttgaaagcattgaatgatgattctttcatcatgaaaattcatcttgaaataaatttattatagtaaatgtaacagttagggcccgtttggttgatggaaataagccagaaaggaatagaatgaaatactaatgggcttgattcttttgtttggttgaaaataaaaattttggaaaagaattctatagtaatgattattcccccaaactaacggaattgcttttctatttttcatttggtggaattatatttccattccactactttggcagatcaacaaattttctctcgtctactctagccataggccaagcccaacaaaccctaaacctagcaaactgaagattaacctg

SEQ ID NO: 56534 - DNA, 2850 bp, Cannabis sativa
tgctgggttcagtatgtcgtacacccaagatggaactaaatacaatgtttgacacctatagtatccagatgatttaggtgaaggcgtggaggtgcagggagatggcacttacgtatgctaggggtacgccagagttttcatacatgaagctacctggatacttgtacatactggaatagaagaatctaggtaccattactgacttgtatttagaggatgagcagtttaagtactgttttatatcacttggtgcgtgtaaaaggggatttactttatgtcgtcctgttttgaatatcgatggccccttcttgaagacgaagtatggcggtataatgttctttgttgtggcatacgatgacaacaaccaattgtttttggttgcttatggtatcgttgacagtgagaataacgactcttggatgtttcttacagaagttgagggtagcaattggcgtggttgagaacttagtgtttgtgttagataggcatcaaagcattgatcatgctgttgaacttgttttccccgaagcagttcactgtgcatgctatcaccacattgttatgaacgtgaactccaagtcaaagactgatgcttttcacaaccaaatatataatgttgcttactcatggtcgaaaactaaatgtgatagagagtttaagaatgttagaaagatgaatcctgccattgctgcatatgtggagagtatagggtttgagaagtgggctcacccttattacttgggcgatcgatacaacatcatgacctgcaatgctaccgaaagcttcaacaacgtgatagaagagttcagaaaatatccaataactactatggttgaatttatctggttcacactgcaatcttagttcgttgatcgcctcaaaaatgcagacaaatgtacaacccctttgaccatgctctttgaaaaaaacttggcaaaaaatcatgaaaatggaaggttcaggcgcgtccaacgaaatggagccaatttgtataacgttggtaggggacctaacggtgaaagatgtggtgatgtgaacctagttgaaagggcatgtacttgcggcgtgtttacgttattagaatgcccttgcgttcatgcatgtgccacgacattgaaaacgaatacgagtgtgtacacgctttactcaccttattattcaaaagatacgtggaggaagacttacgatgataccatcaatctgttggtgacgaggatgattgggttctcccataacacatcaagaatatgaaagttggggtacctctggaaaagaaactaataggttgtccaaggaaaagcgaggctggaagaagatgggagaatcgtttcctgtttggtgataaaaaagtaaatgtacctcaaaactgaagcctttgtggcggttcagtccacaacagagcaacatgcaaagcccgtatttgagacgtactctacttatgagttgtaataacatgttctgtatttgttattcaaaactgctttaaaatcaggttggtactctacttatttgttgagaaagagaattttttctatttttttaaaagttatcgacaacatatcgatataccttcgacactattctcttcttttgaaaaaaaaaatatagccaattaattgagcagattatcgagaacatatcgacatcatgttgacaatgtcgacaaaaactattttttgttaaattagcgtatcatataatatgcatcatcgacaacacctccaaaaattgtcgacaaaatgtcgataaagcgttgacaacactctgttcatgtgtacaacattttatcaaacaaaaaacacaactaagttagttatgtcgataatatatcgataacatgtcaatgatatgtcgacaaggcactctacttgtgagataatatgatttgttaaaaaagtattgagtaattcatgttgataatatatcgacaacatttcaatgtaccatcgatataaaaaatataaagctatatttttaattatgtaaattagacgaaatgtacactgtatttttaattttacaaaatatataactgtatttttaatttggtaaattagacaaaatatataatgtatttctaattatacacagatattcaatcaagattctggtaatacaaatcaacgcatcaccgttcacgaaacatcttcatctgatcttgcgtgacatcagctactgaacgttacatcatcaaatgctccacatactcaatgccataaacgccacaatcaccactaaatgcaacataaaatataaatttagtacattgtaaagaatattttattactacaatacttttttatcgttatgtactttattttcgccttcggaactaagccgtgagaggctcaagacgaatgcatcctcagaagctccttgatctcattcgtagttaacgccatgatctggttattggttggaaaatcttcagttgcatagattaatgatggccacagttcttcccaagtcttcaggatgggtgtcatgctgttccaatgacaaatactgaaatcacagtcgtatacgttaattttccacagctctatgttaacttcaacagccacccattgcctctgtgtgtgaagatacaaaatgaagtaaatgaactcattaccccccatcccagatagatttggtcctgtaattatggagaaaagctaaattattaacaaaccataataaacttgtaatcatagttgaaactttaaaagcttactaaatcaatacttgataaccacctctgcagtactccatgatataatcctctcaaacaaagtttttttgggacccttgtgatttgtccatgcactgctgatgatagtggtcacatatgtggagagaatgataccc

SEQ ID NO: 56535 - DNA, 1157 bp, Cannabis sativa
  modified_base (1073)..(1078): a, c, t, g, unknown or other
acataaaagtttaagtattccaaaataattgttgaccaattatataagtcctacttttaagtctatacaactcaaagttgttggtatcaaagctcaattgggatcaagaaaagaaaaaatggtgataacaatctcatcaaattcagctgaatatgatagagcaagtgaagttaaagcttttgatgagactaaaaatggagtgaaagggcttgttgatgccaagattactcaaattcctcgcttttttcacaagtcaatatgcgatgatagtcctattttaagagaatcccaattcagtattccaattatagacctcaaaaatctcaatggaaattcatttgagagaagagtagaggttgttgataaggtgagaaaagcttgtgaaaatggagggttctttcaaattatcaaccatagcatttcggaaagtgttatgaaagaaatgaaagatggtgttagaagattttttgagcaagagagtgaggtgaagaaagctttttatacaagagattttagtaagccatttgtgtataattgcaataatagtttgtattcttctccatctgttgattggagggatacctttacttatagaatggctcctaataccccaaatccagaagatttgcctcttgtatgcaggtaaacatgtctaatataaattcttgtaaatatctgatcttaattttatgtatttgtaatgtgtaaataacatagtataatgttgtgaacataaggtaaaaataaaatttgtattttctttagaaaaaaaacttcaaatccataaaaatattgaagaattgtagattcttattttttaggggtttttagaaaaatattgaattttggacaaaaaattataattttattgtcgcacagaattttttacaaaatactatttttttataaaataactgtaaaataaaaaaaaaaataaacaactaaaacaacactggaacaattaaaaaataactatggaacaactatgaaaacttaacacagtacatattataaaatttgcacagtatttttgaaaaaaaattccgccccacagtaaaaaagtaaaaagattnnnnnntttagtatatggtgtaaaaactttttttttaatattttttgtttttattgggtatttatgaaaaaaaaaatcctatttt

SEQ ID NO: 56536 - DNA, 593 bp, Cannabis sativa
ctctttatgtctatcccaaaaatacttttagctttgccctgatctttcatttcaaacgcatcgctgactttgctattgagtttgacaatctctgatctttctttgctaaggatcaaaatgtcattaacatagagtagttataagtttgatgattgaaatacatatgaatcatacttgcttttaatgtattcactgcttaacacataggaatcaaaccttaaatttcattgtctaggtgcctgcttaaggccatataagaatttcttaagtaaacataactcatatggatccccatgtaagaaagcatttcttacatccatttggttaatttcaaatttcaaactagctatcttagccatcatagctctgattgatgcttgcttcaccactacagtagagaaaatctcattgtagtctataccctccttttgagtaagcacttaacaaccagtcttgccttgaatctagttggttcattttcttatatgccttatatttgaaaatccatttgcatttcgctttcttcactatcacctaggttttgttcctcttccaagattgcatttcttcttgaatagcctacaatcatgttg

SEQ ID NO: 56537 - DNA, 1242 bp, Cannabis sativa
cacatgttaagaatactgtaaattatgaatttagtcctaattaattcaagagaaatctaattatagaatcaaagataagcggaagcgtaccggagtctattgaatcgtttgtaaaaggtataatcttccaatttgcttcaaaaacatttgaagcccttattttcctgatgatgagtaaatggagaccattgcctgttatattaccaactgttaaaacagttagtaatatttattaactatttctaatttcccccctcatcaaattagaaattatctaattggtatccaaaatcatgacaattatgctcttaagtcataaattttattccaaaataaaccacataaatttgacttatttatttgatgacctaacaaacattttatatatatacaattgtgactccaataaatttctaataaacatatgcaagctataaagagtctaccaatgcaatagattaaaataaatttctcacaattgatatttcatcttgtcatcttttccttcagttttcaaaagaagtatgaattaattgtataccagatggtcagtgagagtaatgtatatgtttatatatataaacaatatgttacttgttgtaaatgatgataaaagttttatatataaagtgaaataattcatatcttaaattattgttttgaaataaaaaatataatgatatataattttaattaatttgagagtagccacaacatttctaattaattcaaattatgtattattcatctcatgttacttttatctttaagtgtgataaatttaactcaaatcagcatctgtaaaatgatctggaatgagaataatttaagaacatccctttccttgtatttttagaaacttatgtatgcctaagagtctgaataaaactttacattgcatttgtgttcaagatcgttaagtatatcagaataactgaagttaaaaccactttatttttcatacaaagtaatgaggtatcttttagatactaaatattatatccatgcatattttattgagatgaattgacattctagaaatatagttaaccccaattagattttaacgtaattcactagctataattgaattacgtaaaccgatatttgattacgttcttatgattgtcactaagttgtattgtggagaaccttaattgttatatctactatagaagttaaattcatttattgttttgaggatacatctcatatggtatattatagagtttcatagtaagc

SEQ ID NO: 56538 - DNA, 798 bp, Cannabis sativa
atataaaataagataatatatttataatttttgtatatattagaattatatttttaagtaactatatttattataatactaaaataattaaattagtcgcgcaaagagcgactttagtgtctaattaattaatatttataaacttattaaaaaattaaaaaaaaaaagtaaataaatgtattttaaataattttaaactattacatcccattcatctcttttatatagatataaagattgaacaagaggcaatgtactcagtataaaaggtgccaatacttcatcacatgcatggtctttcagtgtacatatcatcattgttaatgcctgccggccaatatagatatatcaactcttggattttgctattgtacacctttctggaaaaccaaatattcctctcacaaactattgtcgttttcaaagggggtcagaaggtaaagggaggcatgtgtgtcaataaatattcctttgtgatccccaaaaagaattttatgtatcttatgttacatgtgagtgagtttatatgaatgctgaacaaatcaaaaccctagatggaagtgtaagaccacactaagaggatcttcaatactcaatagtttaaagttgtttaaaatctttacattatttaaaaatataataaataaaaaaactaacttatatactattttttaacctttttttctttttaaatttatagtttaagttgctcggtagttgttatggtagtttctatatgaattgctatatggattttaattacaatttaagttattccattagttgttatatgagttg

SEQ ID NO: 56539 - DNA, 2183 bp, Cannabis sativa
  modified_base (1421)..(1429): a, c, t, g, unknown or other
aaaagttcggatcgtcaagtgaaaagcaatctaaaacttgtcaaagaaaattttgatgaggatgaagacgagcacaacaacagtggaggaggatgaagcttgtaagggttttggagcgaatgcgatatatgcgagaagtggtttcgaggaggatgacgacaataatattttttttggcaatccattatagcgacggttcaaaaccgtcgactataatataggcaacggtttaaaaccgtcagctatagtatagccgacgattttaaaccgtggcctatagtatcgactatagccgacggtttagaactgtcaggattcttttataacgatatttttccactgtcgcctattctacccagtattcacgacgctcatataggcgacaatttttatagactgtttttctttaccttacggtgtaaaaatgtcaggaattcttggttttttagttgtgacatctcttcatatgtagcgaggttggtgccttgctttatattactgatgtcacccttatgttcatgtcttcatatacgaaatggtttctcgccaatatgctaattaatagtttgtacatccgtgtctctctcaagactttacagttgagttatcctatttttatatcctctaatataattaatattatattcgttgattcgtattctcccaggttgacacatgtccttctctgaggtaccagccaaatttcgggtataacaattacctttttaaaaagttctttgtaataaaaagtgctttttaaatgttacacagggtattttttgtcataatacccctttttgaaaaaatgcatgtcctctgattttgatagttttgtagtttcgaggtacatcaacgtttaatgaccatcctttccacttctttttcaaattctacccgctggatcaattgtctccctgatctaacggagattaacccaagagtataaaatgaaaaaaggaaccacctttgcgttaccttttccattttagaaactctaagaatttttcaagtttttttgcagaaaaaaccattcccaaatttgcccaaaaccttgcatgccatcattgtctttaatatttttcctacgagtttctcgaatggatctttacgccgttcgttgtttcgcagattgcagagccgctcattgtcccacaaaccaactccaaatagtaagtgatttttctttttattttcttacatgcttttaatgttgtgttctctaggtttgcttactgattccttagttagcacctttgttacctcattcgattttagcaattttagggctgaattgtatctgggtaaatgttagggtttagatagaatgtaggttttcgagattttacaatttaccaaattctagtttgataaatttcttccatgaattgggattgctttctccttgcagcaatgtcccaatnnnnnnnnnaagtttatcgtccagaagatttagaaatagagtatcctatagaaccttccatcccatacaaacccgaaatttcaagagccaaatccaaattagagataagtgatgcaaaaattagggaacgcttagtgaaaacccatcaagaagatattgctagtcgccatagacacttcttgaaagaaattatagaaggtagacgccgtttctgggtagatgctgcttggcctgaacctctcagtttgtcttctattcctttggctaagcctttgtttttacccgaggtcacaattgcttttgaaccaggtgacttggactttgaaattatgtcttccaagccacgtaaatcaaagactccccaggaccctaacgtcaccttcgaggtcgagctaatagagtaaaaggtgcaagccatcagagattatgttggtaataccctaagggcttgtggggttgaatataggcgagtctgccgggttatataggtacgtgcttgcaagttcagttgctatccaccagtgcaacttacacgcaaaacctctgaagaggccagtggcgagagcagtacaagttgctcgactgggataggcgctttgagcctcgaacacatcaactgtggagcaataatccccctgcgacactatttcaaggacttcctaaataacctcgggcttgccccattccaactaaatcccatttcatatagaatccttgcaagtttgagggtttatacaaaatcttgaactgggagtgccccact

SEQ ID NO: 56540 - DNA, 1343 bp, Cannabis sativa
aaaaattggcttgcatacgtggcgttcagatattatttggccaagtgtctcgtaggacacaactaaaaagcaatgagtaattcattctccttgcgttaagaaatgagtataataacttctagttgcaaataaatacataagtttcatttttagcggtaataataccctaagttataattctggaacttctgtaggtacctagttattaagtcagtgtcaattaaattgccacatcgcaatccttaattggtccatgtcattaaatttttattttcttatttaaaattaatttatatatactaataaaacaatgacacgtgtatcatgactagatatttaacggctaggtacctacgaaagtttcagaattataatataggtattattgctgccaaaaattaaatttatgtatttatttacaaccaaaagttaaacttaagaatttacgccgtaaattactcttaagaaattgatagctctaggaggaaggtaccctcctagagggttgcatcaacctaaagaaatgtttggataaagcatgagaaagaagaaaaatctaggaggatcgatacctcccacgaatccccctatcgcgtttcgtcccaactcatgcaacatatatctaggaaaaacaatgtagcttgtcacctccatacaagtggcaaaacaagtttccaacaaaaacaaataaatttagggatttcccccactccttttctaacacgcataacagttcacaagttcagtggtctctttagtcacggacagaccatgtcctttctcaccaaacacctagcgagcctagacaacaagcccatgaaggcaaaagcaacctactacattaaggaaacaatccttaaccactagaacgtagagataaattaaagaggcctctattttactaaaaaaaacccactttccccctataatcagattactgtgatggtttaatatgatgatgaagattatctggttaacctaattagaagaaaaagataatatatcagtaatttaatactgactttacaattctaaaagcagagggttttttcagcgtcttcgtcgtttcggtcatctatcttcagactttgtctccgttcgaaggtgtgatgttcgccgtcgattagctgaagctgagggtggtgatggtgagccattttggcatccaattaataaatcagattattagcgttcatgactgagtcgaactggaaagttacgaacgattaaaataaaatggtatattgaatctgatctgacggtctcgattaccttggtctgccattggacttgctcgtcgaaaccctaatttacaatcggagaaaagcaaattctaaaccggt

SEQ ID NO: 56541 - DNA, 864 bp, Cannabis sativa
actaaaaaaattaatatgtgcataaataaataaaattagaatcaccatggccacataaaaaaaaaaaaaaaagtaagacttgaatgaaacatgtaaacaaaaaataaaatttgaaaaaacttactgtcgtatacatgtcatgcactttatatgttcaaatataaataatatatgggttttttaaatcaataaagtaaaattgctcattttaatacacatgcaataatataagatatactaagatatataagtaaaaactaaatttacataatcacttattaaatagtgaatctaaaattaagacatatgaaaaaaaaaaaaaaaaaatagcgaaatacatatctcattccaattaatctacagacttacaagatcagttattaaatagtgaatctaaaattaacacatttgaagaaaacaagaaatagcgaaatacatatctcattccaacttttttgcttcgatcgccttgtgcgcaatcatttccacccgattgcatcatcgtttgccgttgttgtttgacgccactgctgctgctacccaaatatatttataactctttgatgttaaagtaagatgaagaaaaaatcaaatctttataaaaatttggaacaggtaacaaaatgcgttgtacatttatcattaatgaatagaattcattataagagtaaattggagtaactatatgtcctaaccaataagagaatctctagtaaataagtggaaaaaaaattaaaatatagcttaattaacaaaaagtatactttactagtgtgccaaaaggtgatataaatttggcacaatgtaaatcttatactaaatttggtacatagtaaattttgtgctaaatttggcacaacattt

SEQ ID NO: 56542 - DNA, 866 bp, Cannabis sativa
gattgtttatgtactaaaccatatgcttcccagtgatatctaccaaatcatgccgcacaaacttttacatgtactaaatcatgttctcagaactttcatttatgttaaatttatgttctcagagtatttttaacgaccttaaaagtttaggaaacatgatttggtacatgtaaaaagtaaggataaaaattttaattaacctaaatacaatatttgtaattttgtatagtgtatatatattgtatttatttaatcaaacattactccttttattttatattgcaataaaaggtgtattatcttgatttttttttttttcagatataataaaatctctaacatacccctctaaacttcttagcttttcctccattgttattatttttttgcattatttaaatggtggtttggggtacgaaatgaaatggaatgaaaatagaacaatatttatttcattctaatagattagtttttttaactattttagtaaaataattattctattttaaattaaaaaaaaaaatgcactactcaaaacaatatgaaaataaaaaaattaataactttttaattcgctttaaatttaattttatttgattcatattttcattactattcttccttccaatcaaagccatctttatttatcctttgaggactttggctttttgtactaactttatttacattttttatttagacagtatcagtgcctaattttagacttttaaaaagtcaccaccaaaatattatctgatatgaatatttcatattacaaggtataaaggcgttttttatttctttttcatttttaacacatatcttaatttatacaagaataattatttattttcggtccttaatta

SEQ ID NO: 56543 - DNA, 1094 bp, Cannabis sativa
ctttcccgatctctcctctctttctcactatattttaaaggttttcaaatagttgtggggaaataagtttagggttttcaaatattaattttggggctgagattatatatatgcatgtttgtttatttgttagatttggatttgtttgaattggtttgagttttgttttgttgttttttttgtgatctggatttgaaaataggttgttgtggtggttttagaattggtgggtgtgtttgccgtgattgtagatggtggtggtggtaacagtatgactgaagaagaagatgaagaataattttttttgtatatatatgtgtttgttttttggatttagatttggtttgacttttgtttatgttttgttgtgttatttagatttgaaaatatattgtggtggtgattttaaaagtgatgggtggttgtttcggtggctatggatgtggtggtggtgaccatttgtgattggaacaagaaggaagaaggaatgaaaactaaaaaaatgtatgaaaaaatttaatatgttagggaaaaagttattttaattatttttttatgattttcttatttattttttttaaaaaaatatatacgtggactaataaaattgtgccatgtgtacattatgtccacatggacaatccaacatggtaacaaccaaattttggtagaaactgtaaattactaacgttatcgtggttttgggagttttactgctaaaaaataagttttggaggttaagtgcaagcaaaataaaagtattgagatttttgccgcaattaacctataaaaactaattaggagcttttatttttttagaataaaagtaaacttcaatcaacaaagaacattcatttaaaaaatcaacaaagaacatttataagcaaggatactatagacacaataagcataatagaggcttacgcaatagcatgaacaactttattcacatatcgtttaacaaaaactaatcgaaacattattgaactatgaaagtaaagcttggcagtctcttaaaataatatcatatggattaaattttcaacatctcgggccaaatgtaagcagtcagattccactcaatgaccaaccac

SEQ ID NO: 56544 - DNA, 1575 bp, Cannabis sativa
tattctctttctcttaatttctgtttctctttacacttttttgttattattctctttctcttaatttctgtttctctttacacttttttgttattattcactttcccaacattttcaagtttggtcttttgtatctctttcacattctatttacggtatgtgtaggttttttaataattgattgcttgtttattattttgagaatttggggtatgagatgttattgttttatgctatggtaaagggcttcagggatttatataatatagtttactcatcttatttttctaagaccagaaaacagagcacatagtccttgcataagttggaaagtcaatcaggaaatgaatattctaatggaatagaagggaaaaatctctaattcaatacatatgtgagttgaaatcattatactttctcacatccaaaacaaaatgtgtatagttttatatttgttgaatattttttatttatttagttttttttgttaatgaatctattcagcttcgaatcaaaaagagatagaggaagatgagatgcagtggtctcgggatcagtgttcaggacgcagaaaaatgagagggtttccttgagaatgcaggtaattttttatgttcttcattatttgccatatttatctatttttgcttagctcctttgtttaacggattacaatgtccttccagtgccttctttgcattgattttgaaatttggttaaccttgaatatctgcagtatgtcaacacattcattgagatgtttttgattggatatatctacactaacctggcttatcttttactgtattacttatgttctgcacaaagaacctgctttcttgcattaatttcgttgttatgtgactttgagtttctcgtgatagaatttggtccaagatgacttcatcagattctaagaagcttacctttgaggagtggcccagcataactataagaaagattgttggattataatttctggaaaggtcagatctcagtttgtttctttaatttcttatggtatatggatgtatatctctatgaatagcgggcttatgaattgatattatttctaggcacaattgatcgattgctttctgattgtctctattcattttcatatagaattcttttttaagtccttttgttggtaacatgtgctataactctttccttttatgtgtagtttttgttgccattgttaacgcttaaagttgaaatcttgtacacaaaaattaaaaaaaaaaaattgtgtacatgtatagtggatgtgatagagacttggattattagtaaaggtattgttattgagtgattctagcatgagaaaagatatcaaacctacagtgatttttatattttctgcatggctggtagtgtcaacagttattacagaagaaatgagttgtgatggctcttgtattggctgctctgtttgttgttctgtgtgagaaattatgatagcaatctttcttatcatttttctctgtattgaataattaatatttaaaaattacaataattccaataatatagataaaaagtgttgactaaattattttgtctacagtggta

SEQ ID NO: 56545 - DNA, 536 bp, Cannabis sativa
ctcaactttataggcaaagttgatgcacttgaaaaatttatgaaaaataccaaattaaatttttgatgaattgttgaagttgttaaagtttgaattttcgaagaagaataaaatttctgtaacacactataaggtgaagaagaaactaggaaagtcaagattagggtacgaaccaatccatgtgggtaaaaataattgttgcttattttacaatgagcatgcatcgaaagatttttgcccgatgtgcggggccagtagatggatgaatgcaaacacaagaaaaaaaaaagtagcgcataaggtgatgcgttatttttcattgactcctcgattgaaaagattatatagttcaaaatatacgaccaaagagatggtatgacatcatactaggtgtgtaaaagaaaatggtgttatgcgtcatcttgttaattctaccgagtggaaaaactttgatagctgacatcttttgtgacagtcagtagtcccgtgatccgtaaggggaaacactaggtaagctatgcaatcccacatcgcct

SEQ ID NO: 56546 - DNA, 1602 bp, Cannabis sativa
gatatttgttcaaatgttttctttgtagaattacaaatccgtcaattactcaagtaaatataaaatttgaaaatcactaatcaaaggaaaagaaaacaatagtttgatacaatcacaatcttaattagcataattcatcaaaggtcaagtttattccatatctttcgagtcccaatagctattgtttgcttagcaaaattcaatttcattgcctctttatggtttcggacaacatgcaacgaaagagcttccatcctcagctcattcatcttcaagtttacatcactcaatttggtctcaaagaaatttgtgaggtgagttcccatcgataagtacacctcatctgtcaacaccataggcaagtcgggacaacaaagagcgacttcaaggcgcaagacttctttgaggatcattcgaaggagctcgaattctatgccatcatcattctttgctgctcttttcacaatcaaactctgcttgttctttctcattgttttttctactaattgaattacacataagaaagtcttgatcacaatggaatcattactatttttctcaacgtttaagagttttagcatagccttgaaataatcaagattcttcattatgtttatcctatcacccaaaatcatcaccataaaaagaaaatcaatgataatccaagagatatttgtgccaagaccaatcaccactttcttcatttcctcaaaagtagtctttctttgagattgatcaagctgttgcatccactcaatcaaactcttttcgccttttcttcttccctttttggtttctttccgccaaattgtcatgaactcttctaaatctttcaagtaatccttgaaagaacgatgatcaagatatggaatgttgtacttgaagtgtttgtcctgaaactcatcgacgcgtctggtaagacacttggcttgattcgtcatgtctaggaatttgagtttgaattccagatgatcatcttcattattattccccaaaagggctaatgcagcagcaagcaaggacctatattcatttgctatttccaaaaagtactgagaatcttctgagttttccagttctatgaacttcttgggactcttttttatgacatatctcattgctaaatccattgcaagattattatctttcatttctgccatgcatgccactttcaacttcttcaatttcttttgtaattctttctagtgagagagggaaagagagagtcaaaaggcccttagagagagggtttaagggtaagttatttctgttttatatgattagtcacgtcatatgctgatgtgtatattgaatcatcatttactaaacgacatgtcgtttgtttttaacctttctttcttttacattaactgtagtgttatttttcgatttttacggtcaaatgccgtttatatatttaataatagagtaatttgcggcataacctcattaagtggcgatatttttgcaactaatctcgaattctaaaattttggtggtaaaacctcctaaacttaagttctgttagcacttagtcctcttcattcattttttggtgttaagtgccaggttggaatgtctacgtgtacacagtgtacacgt

SEQ ID NO: 56547 - DNA, 1616 bp, Cannabis sativa
tagatcctggtaaaatatatcctacacttgtacctctatcccctttgatgaaatcctcaaaccaacgttcgactgccctgcacccgtgcaatccctttcaccctccgtaattaccattttacccttcccctttactgccggcgaagctctcacgtcggagccaagactaggccccgccactttcattctcggaatcgttggatcaaaacaactcctaatcggtactccagctttcaaccaggctccatacaaagggactgccctcccaataggtggataagcgtattctaaggaccaatcacacttcccatacgaatgagccaggtgaccacaagtaaagcatatcgccggcagcttatggtacttaaattgaacccactcctttctatcacgtgaaatattcaagtagaatcccgcgatgagtttttgatcaagcaatatatccacttgaaacttcaagaaacccctccgagcgatgacgttccttggcgccctttcaaagtccacatattctcctactttccttgcaatgacgtctgtattctcccatgttaggtatggcgttggaagtccatgagcctccacccaatatcttgccatgttcatattcgtattctcccaagtgccatcttcaggccagtctctaatgttcaataatgtcccattaactaaccatggcctcttcttcaggatttccttcttatcagcttcattgtcaaagaagattccccacaaacccggcttcaaggtcttcattctccaatgtccttccaggttccatatttttgaaagtatctccttcactcttccccttgctacgcttcgtctgccaaagaccctcgccaggacccccttccctgctacctcagcactcagctccacgtctgcctcaagctccaacgtcatggagtcaagaaactgctgcctcatctcgtcaaccccctcaccttcaagaccctctatccccccttcaggagcttgtccatcttccataatatccctacttccgttttccttctccgtctctttaccagtatcccctctcatattcgaatccctaccttcttgtataggttccatagcaaaagaacccctcgtggaagaagaaaagaccaaaggtcacctcaatcagtaggaaacccccaacctaatcggagaacaccgatatcacaaactgtgtattacccatatgcatatatctgcttgattagtgttgtttgatcatattttttgtgagatttatgcgactctttgaagtctaccgcttgttttcttcttcttcttttctttttcttttttttttttttggacttatatcccttcaaccattgaatgaatgttttttctccttaaacaaaaatgcaaatatcattactaatactgaacagaattgcttagccccctttgaatggagaaaaaaactcctatttataggtaataggtagcggctaaaatattttggtcataataagaccgttataataattgacatattaagggtccgtttggcactgctgtgctctcagaaaaaatagttgtagttgtgctataagaaaaagaatttgtagcagaactgtggaaaaaagttcagctaagtgtttagtaaattataaatt

SEQ ID NO: 56548 - DNA, 638 bp, Cannabis sativa
attgtatattatgtgttgtaacatttctttaatctctttgttggtccttgtattatattacaatagagttgtaatatcttgattttcttccattgcaataatctctctaacattatatcatatgagtttgagtgttttttattttgtcatatgaaatgcaagattcttggagtggaggcaatttcaagtacaacactttcattctcgaaagaaatgaaagtttattggcaagactataaaagtttagaagtatactgttaagctataaaataatttttttaatatgcttcttattgatttcttagtctttttacttattttcataccactttgtattataattattagagtgattgtagacgttgatataattatatcataaaatcttaattgctataatcataaaatcttaattaagtgtgtatttcgtttttgtttttttttttggccaatttatttagtctctttttatttaatattgaaattaattattcaaacaatacttatattttttatttgaagcatgtttatatatatatttttttcaacggaatataaatctaaatattaaacttggtggctttagaatagcttataataattacatgcacatataaattttcacaatttactactaa

SEQ ID NO: 56549 - DNA, 1021 bp, Cannabis sativa
agagagagagaattatgtatgtgggaaaggtaattaacctaaaatcatggcggcggaggtccatccgccggatctggagcgctcggaggggtgacctcggcagtcccaagaatctgggagggttttcccctgagtttggggaagatggccgacatcactggtcatgatggtatgtatctagtctaactagtattttgtatttatatttaattaatagagtcgtagagataagagagaatatatatatatattatatatatatatgagattgagagagagagtatgtatgtttgtaatgagagactatggcataaagaagtgcagatgtggtggctttatatagtagagaggaacttggagggtcccactttctacatgaaatctatttatatgggcggtggcttattcataaaagacattttttttaccctaatgagactcttaattaattcattgtattaacctcgaacacatcacaaagttaatatcttgatgatcatatatatatacacttatttggttttacatatagtttatgtttgtatggtcttaaactttttacatacttgagttttagattctattattatctttaactcttctcaactaaaagccactaagtaaaattgttaaacgaaacagttgtttctctaatctctgttattataaacgtaaagtaatatatgtgtgtgtgcggaaagaagtttgaaatttttttcagatctctctctatcacacattaattattttgtgcctttatgatccatatatcaaacttttattaaccatatgccgtggttgttaattattagaaattattatataacgtgattatttttctttcttttttagtttgtttggttgttatattgactatctaataaactagtttatttgataggttgtgatttcgatgggcgaatctcctgtttttcctttttatgcagacgtggaaagtgataataattaactaataactgtttttaataatccataaattaataatgttacctcaaaatac

SEQ ID NO: 56550 - DNA, 2212 bp, Cannabis sativa
tgatccaactaagggcttccttaacacctattgcttcgacaacttcagtagcgaatgagcctctgttacatactacaataacatccaataagaggcctgaggagtctcgggcaacaatgccaaagtcgtaggagccttctccttcaaagagagcggcatcaacattaatcttgaatgtattagatccgggtttagtccattgctcaaccttagagccattggttccaagagccaataacaataagttttatttatcttgagctttgcgcaattgatcaagagtaactaatgctaatgaataaacttgttgaggagaagctcttttttttattccaaaccaaattggtgcatgctttccatattgcccaacatagcataatgattcgacactttctttccatatccgaagcttggaacacattggatagccacattcctactgtggtattagcagcagtatttaccgtggggtgcccatgattccagcaagattgagcgaaggagcagctgatgatggcatgagaaatcgattctggttggcttttacatatggggcagttcggagagatatttacatgcttggtaacaagctgtaaacaagtaggaagggccttcgaaactaccctccacctgaagttcttgacttttggagggatttttagcttccaaagtgtgcgctagaacccagaattatcagcaccatcttgctggtttgttgatttctgtagcaaataataagcacttttcaccgagaaagtgccattgctttctcctatccatgaccagcaatcatcaccagcagtgacatataaaggcaacccaaaaatcaaagatgcatctcgcatattaaatatatatcagaaacaatctcacggtcccatgaaaagctatcaatttcgaagagggaatttaccatcttattatgcagactcgagtgagttgttgtgacaaacggattggagttgtcaggtaaccaaggatgagagagaatgcttgtggtagtccctgatcctataatacgtctggcatcaagcttaacaatgtattttgcttgccatatactcctccagacaaagcttgggttgttaccaagtttagcagcaagaaaatcaaatcgaaaaaagtactttgttttgtaaacatggctaacaagagagtttggtgagacaagtagtcgccatccttgcttagcaagcattgcaagattaaaatcatgtacacgacgaaaaccaaggcctctaagatctttgtgaaccgccatcctgtcccaggacatccaaattatcccgttacctttactggatgttatcttccaccaaaagttagccattaatttttcaatctcagtacaaatcttaataggaatgagaaaaacactcatagcataagtggggagggattgaatgaccatcttgagaagtatctctttaccagcacgggacagaaaatgaccattccaattgttgattcggttcaccaccttaggttttaggaagccaagaatttttgtctttttcctacccatggtattaggaaggccaaggtacatgctgtattcatcagcttcagtcatctctagcgttgaacatatttgattctttagcatttgatcagcgttagggctaaaggaaatggttgacttagtaacattcaccttttggccagacgccatctcgaaagaataaagcaaagcgcaaacattcaaagccgcagcagtagaagcttgacaaaataagtagttatcatcaacaaacagcatttgtgatattgtaggagccccattagcaactcgacagccttgaagaagttgattagcttcagtttttttgatgattgaagaaaacccttcagcgcagataatgaagagatatgttgaaagatgatcaccttgacggatacctcgagttggagtgataggtcccataacatgattgttgtgaacaatagtatatctgaccgaagtaacacattccataacaagtttaacccatttctcatcaaatctcatagggagcatgacagcacgcaaataatcccattcaacacgatcgtaagctttgctcatgtcaagctttaaagccatgaatcctttttttttctcttcgtttctatttcaagtagtgcattaattttaaagccaccataatattgcctgaaatgagtcgaccaggtatgaaggcactctgtgtttctgaaataacagcatcaatca

SEQ ID NO: 56551 - DNA, 681 bp, Cannabis sativa
acttgaactatcgataacatgtcgagaatttctcgataatcagtagataatttatcaataatcaagcgagaataaccaacataatgacaacaaaaagaattctcacatatcgataatctatcgaaaacctgttgataatcaattgataataaataaattccaagcatttttttacaaaatttgaactatcgataacctatcgagaacctatcaaaaaactgtcgataaatgtcttccctaaccttgggacattttcatcgagaacccatcgaggatgtatcgataaagcgtcgagaaaattgcgaactcacagaatactcaagaaaactagatctcatgattttagcgaagaatacatcaaaactaaacaaatacaaacaacaaccacatgaatctactgaaaatagagtatacttttataattattcaaaaaagtattttaaaaaatacttatccattaagccacgagctccgatctccaaactttgtggtgggacgttttgggtctttgacaggcatccacagaggattggaggacactttcatggcagacatttgggcttccatggaggaccaggcgggttgagggtggcgggatctttgggcggatgagagggatctcgaggaagaaataaaggaatgtggtggctccttttcgatgggatgatgagagagatgtag

SEQ ID NO: 56552 - DNA, 1261 bp, Cannabis sativa
attattatttagcgcataaaacccaacaactgcatcgcctcctgctgcatcaggtaagggtgtagctgcatccactctaacaggcccatcctctcgcactcgtgcccagcaagcttcactcgagattgaacttcgcaccaaaaggagccatgacagattagttcctgctgtaaagaaactaaagatgaatcgcccttcagcttcctcgagttctaatgaaagagaagaaccaatggaagtgtcatctgatgattccgagaccaaatctgagtcctttcattcttaaaaagatcctccaaaagatctaggaatgtcctctgatagtgaggaaactgacccggggcctgaagctctatttcccaaatcgacagcagccactcctcgttttgcttttgtaaccaaagcctctaatgctgacaagggaaaatagcccatgaagagctccagtcctggtaatatttctccatctcaagctgtaaattccagattttattatcatgataatcacgtgattggaatctttatgctacccgaaagtttgaaagtgagaggagttatgatttgcatgctcatcgtgtctatgatattgtcaagtttgtgcaatatcatcattgggaaaatactcttactggttttaaaggatatattgatggaattgtctaagaattttatgctaacttgtttgatgattttcttgatgagaattttgattctttcgtaaagtgtatgttcgaggacattggttttccttttctgaaaaagatatttctaaggcttttcaactgccagaagatgtgacaaatgctataatgtctatggattgccatctgatgctcactgaactcactggtgcacgagttgaatggaaatctgtgcagagtctttgcattattcatctcacatatgcccatgcatcactcatgcagtttgctcttagcaattgacttcccgattccaaaaaaattgtggtgtctcaagatgtggcctcttttctctttcgtatcacctcgggggcatccatcaatctggcttcttatatcttggaccagattgttttattttggagaggtaaaaagcgtactcataagcttgtttttcctaatttaatctataagattctttcctctcagaaggatgtggcctattcttatgagacacttgagtctcccctcaatggcaccatatttcaaccctcgaagtactttgagggagcttttcccaagcgtcctaaggctgctgtgttgggttttgtgtcctaaat

SEQ ID NO: 56553 - DNA, 838 bp, Cannabis sativa
tcttgcacttcctctgttgttgtactgagaagtacctcctctgtgtgagttgcagtttcctcgaccacgagttgagctgggattgtgactggtttttgttcccatgttagcagtggccatgttggatgtaggattcaaactagatccagttgaggggtttccaaacttgttattgttcatcccttgtagtcgttcaagtttgttgtcaaaacttaacaacatatcttgaagttcctgccaagagatgttaggttttgcctcaacttgcacaacaatagatagatattcgataccaaggccaaatgttacattggataccaaatgagcttctgggtatggatctcctgcaagagctagcatatcggaccacattttcttttgtctcaaataatcggtcataggaatcatacctttgcgagtggtctgaataagtgttcgatactcattcatttttgccctggaatgttctctaaaaaggttctccaatgcgcgccaaagtgcagcagaggtagcacaacccatgacctatgttgcgattgtctctgtcatggagctatagatccaacccataagcagctggtcactaacaatccagtgttcatactctggattgagagtaacttccgtcccttggtctccttcaactgcgtttgacgtttgtatgaactcagggagacacggtctagtaccattcacgaatccgtcgagtctgtggccacgtattatggttgataccattgttttccataatgtgaaattgtttctgtcaagtttaagggaaaaaggttggtttaaggtgttgaaaggctgagtataattgttggtcaggttttgagag

SEQ ID NO: 56554 - DNA, 1650 bp, Cannabis sativa
aaaaaaaaaaaaaaaagctttagatgtgatttttttcgagcatatgacgtcggtggcaaaatttgtagcctaagattatctccaatgaatgatgtatattttgagtaaaattcagcctaaaatatattacaaaactatacttaatctatttttcatatttatgctccaatacacaaagtgtaaattagctataaaagtcaataatacccttaatatttaaaaatatacaaacaattaactttatttatattatttgaataacttctatatataaaaatatttttcaattaatgattggcaagtaggtaattaaaaaaggtaacatttatttaggctaaaatttagcacatgctatcttttgtgccaaatttgacacaatttttactttaggccaaatttagaacacaatttttactttgggccaaatttagaacacattttacatcatcattggagttaacttttagtaaaatattctaaaaaatgacaatacaccatatttatagctctctattgaagatcaactaaggtctatatagcgtcaattatatcaaataactgacattatagggaccctatgacaacaataattacatattaacagttggtctcctatggcttaattcagcttcgccattttataatatgattaataattttatttgttaaaagataaaactccataaaaagaaaataaaaataagtttattcacaattttattaattattatagtttggagttgcttattaagaagtataatatttattgtttataatattttaatttgatttgttaaggaaaaattgtagttataaaaaagtaaatagggtaatgtaaaaaaatatatattatgacatgtttatttaaagggaatgagaattaatggtataatattgattcctatcaaattgtttacaaaattttagaaagagagaaaatagtggggcccacacaagttagggagaaaataaagagaaaggttctcctcccatttttatagagaatacattttcctttcctataacttagtttattttaattttaattttgttcattaaaaataaaaaagacaaatatgccttttaaaaatctacaaatagaatataattacatgttctaataatggtaattttattaaattaaagcattctcattacctttcctagttatgtaaataaaataatatgattctgatttttttttcgcgcagtttagtaaataacataataaaatattgtttctgattattttatattttaaaccaatccatttctctcattgattattctgattccagatacagtctagtaaacgtgccattaatataccgcatttaacatgttgtcatcaccatatcttatctattgtttcattatatctcatttttttatcatcactgtatcttacccaaattttaaagtttgataaaacatatgtgtattataatatcaactttcaaattttgatattttcttatataattttttttaatgatattatgagtaattattttaataaactttcatatttttgtactaaaaaaaaaaataatatatattgtaaaattttaattttataagaatttcctaattatttttagtttcaaaatatatatcatcaaatatattaatgtaaattttataagtggt

SEQ ID NO: 56555 - DNA, 1370 bp, Cannabis sativa
aaaaaaaggctgctgcttacagtcgtctgattaacaagtccaggatgtaaagagaaataacatagccattcgtgttgtgtagaagccaagggtcacgtaaaattgaagtatgttcacccgtgcctatcgtacgtattaccccagcctgtatcagtcattttgcttcaaaaatactcctccatacgaagctcggatggtcccccaattcagttgaaagaagaattctgttggcatagtatttagctttcaaaactttactcaccaaggatgtatcattaaccaacaacctccagcattgtttccccaacagggccatattaaagtcccccagactttaaaaattcaaacctccaatatgtttgtgacgactcaatcgatcccaactcatccaactaacacccattctacgaacagagtccgtttaccaccagaacttagccatgagacactccaactccttgcaagtatccaaaagtaacagaaaaatactcattgcatagctagaaattgattgcgcaacagattttagcaacatgtccttccccacacgagacaatatccttcctttccatccttgaattttcttttttattttgtctttaagaaagccaaggatagcatttttattctgtcccaccgaatatgaaagtcccaaatacgacctattctcatcagcctcataaatatctaacagctcacaaacgttatccctttgagagatactatagtattgtaactatagaacactgatgactttgaaaaatttgtcttttgacctgaagcaatctcatacagtagtcatctatagtttagtgttattaaacttatagtttgtaattatttccaaggtgcatgcgctttgacttttgactatttgtgatgaaatatattccaaaagggaacaattttgagtcaatacttgtcttgagtttgactcagtacacgtttttagaattttcattgttttcccacaaatattgaatataaagtagaatttttatttaacaataacctattagaataatttttaatttattataaaaaaaaataattcccaatttaaactaattatataaataaaaataatctttaaaatataattagttatatgtattttttttagaggaaattacattgtatacccactttattttacttgttttaatttttacctctagttttatatatttttaagtatacccactttttatggatgatatccccattagaccccttaggttatgtaaattatatatgctaaactcaagtagagagtgaaggtataagggtatttttttattaattaatagatataaaaaaagaggtatttttcaacttatccctattttttaagtctcctattaaaaaag

SEQ ID NO: 56556 - DNA, 747 bp, Cannabis sativa
atatatatatatatttgtaaacatagtttttatttttcattttgcagcaatatgtaacacagttaataaatagaaacaataaaccacatttgtgttcatgtacctcatcattatttacatctacttagtttttatccacatttaaactgtcatcattcatgcatatataatttatttatttttttttttaaaaaaaggtaatttgctatatcaagatgagctaattgatcttggtcatgctatatttatcatacacaagtaaccaggtaagagcaacgtgcaagtttggttttgtttgaaattttttagtttattattttattttttaattttcatatataaaattaattaaataaaataaaaaacaaaagatgttaaaatttatttaaaaataaaataattgaccatccaaattctttatcaaatctataatattctttatttaaatattgggtaactattttatgggtaaatttttattgtaattatattttttttacttataataggttaccaataggtggtcaattaatttcttttggaattaaattagttataattctctcaaaaaaataattataattaattataaaataaataaaaattaatttttcatttaaatttttaatgagactctttttaataattaatatttataaatgatttctacttttatatttattaaatctctattacaaatttttaacagttaaccatttagttataatatttgcaaaaaaaaaaaaa

SEQ ID NO: 56557 - DNA, 1302 bp, Cannabis sativa
ttttccatcttgtcttccctaatatcatattggtaaacatgaatattgtcaaaaagaatgaacaaaacatcaccattggtgggatggaaagccatcacaaccacatacttagagttaaaaccaattccgctcttctcaaagtcatgcaccaaacaccatgagctggtcttcccatcatcaccattgttattatcataattcaattcccatactttgacagaatagaccctcctctttttagtgatgaaggtagtaagtgaaatccttagccgaccctgaaccagtccaagacgaatgttaatacaatacttgcgcctctcatcttggggaaaacctaagggaaattgaataaaattgtaataatttggatcctcatgaaagggatcgcaggcaataatgccatctgcagttaaggtatcatgaatcaaagatagccagtgtatcattccattgcaaataataggaggttgatcccacaacaattgatagggaaaagctatgatattactccattctcccgtttcagaagaaaagattatgcgagcaaaatcagcattcctcctccatactaacatgattctgtacctgaataattcatcattcttgtttttgcaaatcaacccaccgtgtccgctataatcgaatactccagttaagtcgataggagtcttgggaatcacaatccattgtttggtaaagggattgcagatcatgaaatcctttcccctttcacgtgaaagcagaagcaagtcgtcggtaaccgaaagcaaacgaacctccggccaaggcaagaaattgaggtaataatcatcttgagaatgtatgatgttggtgttgtctgtgttcttctgatgtagagtagtctgtgattcttctgagaaatattggtagggaaggggtttcattagtttgtgagtgtgaccatgtctaaataaaagggtacatggttttgattgtttctgcttttcgtggcgaaagtagtcggaattgatgatagagaaccaggacttgcaaacggaagtagatcggattacagatcggtcatcatcgattcggatgaatatttgacagagtatatcatctgaaataagcatcatcaccgccatagcctcctccttctccttctgctctgctcttctcttctttatacccatatttttgaatacttctcttattgttcaacaaaactcagtatttcccttatttcacttttatatatatatataggccaattatgtaatccctcactaactttttgaaggattacacccctcaaataagacaaaataactataggttgat

SEQ ID NO: 56558 - DNA, 1805 bp, Cannabis sativa
atttatgcaatattttcgatttttctttttttttttttttattttgaaatcttctcttattttaatctactttcatacgaacgaatcaatgtctttacccgttatatttacttaaccagaactaaaagtttgtcatcacattttatgccgtgttttgttcaaagctagaattcttgaagcgaaacatttacatcgtaaaaaattaacaataaaaaaataccatatttgattgaaagtgtcacaattttttttaagctacagtagtgggtgaagaagtcttaaagttaagtagtgattaaataactaaaatgaccagttcaatgttaagattgtttctggatgaaaaacatttttttcctctaaggtttctggatgaaaacccttatttaacttaaataattaacgtgtatatacaattaagcaattcatcgtcatgttcatagtcactaactaatttataccaagtcttctataagagggaaaaaaaattcttagtctctcatctgctccctgaagtaattaagactagttcaagaacttccatctataaataggattgttaatctagttcatatattatcaaacctctcactcaagcaaaaaaaagaggacagtttttgataagagatttatatatagcatatatatactagtgaattgatcgattactcaaccatgaaaggtgctcattttcttctttcacttgttgtgttggctttggcatcctccatagcctctgcctctgacccaagccctctccaagacttctgtgtggctgtagatgacccccacaaagcttgtaagtaatacacttttacttactatagcacttttctatatgcatttacttaaaattctttaatgttaattttttttggtcaagcagtatttgtgaatgggaaattctgtaaggatcctaagcttgctaatgctgatgatttcttctttactgggctcaacattccaagagacacacacaatccagttggatctaatgtgacacaagtaaatgtagacttgattaaaggacttaacactcttggaataacattggctcgtattgactatgcaccatttggtcaaaacccacctcacactcatcctcgtggctctgaaatcctagttgttgttgagggaactctctacgttggctttgtgtcatcgaaccaagatggaaaccgactgtttactaaggttttgaaagagggagatgtatttgtgtttccaataggcatgattcactttcagtttaatccggcacacgctccagctgttgcgtttgctggtcttagtagccaaaacgcaggaaccatcaccattgcaaacacggtatttggatcagatcctgctattaaccctgatgtgcttgccaaggctttccaagttgacaagtatgtgattgaaaaacttcagaagcaattctggtatgataacgacaactaaacatgctttggagaagggaagctctgaacttaataatattttctatactatgttttatgttgtataataaaatagtttggtcatgagtgcatctcagtgatcttactaaacatccatatgtactctttcatttttgatgattataatcaaatatatagttgtgctcctttaataaacttataaaatttgccgacatagtatttgttgatgctgaaaattagtttaccaacaaatttggattatgactttgaattttttagacaatgattgatcttaggtggcgtttggtaacacttttttaataagttttctgtttttaaagtgaaaaagtgaaaatatttttaaaaaacatgttctataaa

SEQ ID NO: 56559 - DNA, 832 bp, Cannabis sativa
tattaagagataagaggaagagacgagaaagaaatatgagaacggtatcatatactgtattaatagaaaacaataatttttttatgggaattgtataaaccaaccttacttctactatgcacgatgagggatccttcgagaaaaatcgaacaacacctctgcattgaaagaaatctcagtttatcaagattttaagcatatataattatagacagtaaaatgaacaatcaattaggaatctactacatttgatggcagctcaatttatttgaaatataactttagattaaagcaaaatggtttccattataataactgagataagaaaataaagcaataaaaaaaatctcccacacaaatacaaatgcaggaaagatatggttactgataattcgtacaaacaaacatttattgaatacaaatcatattccaaatcttaatataacctagtttacaaaccatattttcggattaaagggagattgagagagagagagagattagttgagagaaagcaagagagaaagagagggaaagagagagacctaaggaggtgggagaggagacctatgccgatgaacgaaatcgcgagcccttcaaagctgaggacgcgcgagcccttcagagcaaaattgcatccactactgtgagctgaggacacctctgttcgaaaatgaagtcggattgggggtaagtgaataatcggagaatttgcgtcgttttcccacacttgcaatctttttaccgtcggtttaaaaacgccacacaaagcatccgtgaggccttaaaaacgtcgcgaaatattcgcattttttttttaattttttggctt

SEQ ID NO: 56560 - DNA, 1162 bp, Cannabis sativa
gcagcaaattagagcgattatatagccatatttcatgcatcaaactcctcacttttcttatttctacacacaacacaacactcaatctctctctactatttcattaactcaatcaatcatacaaaatttactcctcaccatttccaattttccccacaaatttctttgatcatttcccaaaaactggaaaacaccaaacaattaataatgaattcagagcttattcaccgtagcaataacaacaactctaataatgctcaacaacaacaacaaaaccaagatcaacatgactcatcaagatcaacggctacgatcactcgcttctcatttcgagatcaacgactcatcttcctcctcattggcgtcgccatcgccactttattcttcaacactttccctctctcacaacaacaacgctggcccgacccgatcatcgattccgggtcggttaacgcggacatcccgacccgacgggttctctaccagacgagtacaaaaggagatgggtttgaaacggcaatgaaattaggcgggaaagttcctttggggttgaaagcgaagaggttgagaatcgtggttacgggtggggccgggttcgttgggagccacctcgtggaccgtctgatcgctagaggtgatagcgtaatcgtggttgataatttcttcacgggtcgtaaagagaatttggttcaccaatttggtaacccgagatttgagctgattcgacacgacgtggttgagccaatattgctggaagtggatcagatctaccacttggcttgtcctgcttcgcctgttcattacaagttcaatccagtcaaaaccatcatatcctttttcatgattattattaatttagaaaagggactcatttttctttctttataatatattattaatttttgtttgggaccttaactactgtggggttcacaagacgaatgtggtggggacacttaacatgcttggactggctaagagggttggggctcggttcttgttaaccagcaccagtgaggtgtatggtgaccctttgcagcatcctcaggtcgaaacctattggggcaatgttaaccccattggtcagtatatatatactcactctttttctccttattataacttaattaaaacccttgcatgaaaactgtttttatttata

SEQ ID NO: 56561 - DNA, 1586 bp, Cannabis sativa
atttaattaaacaattagtttagaaaaataaaggtttattatctatcttaattaaatttgtgataacactattaaattaaatcctcataattccataatggggtgaattaagagaatttaatttaacatattatcctaattaattatataaatataataaaatctctgtggggtaaagttattacacctatataattaattacaaattatgtccattaggtgagttttaattaatatataattttatacaaataaggatgttgtctactccctaattatataaaattatattttcactttgacattaagtatttagctttacctaaaagtaatctcattattaacatattagacaatcactgagattagtgctcctagtgtggtcgtccaaagattattgaaaaccgttctagatatgagcatttgtcccaagtttatattttcttatgtcaaaccacaaaattacttacgttttagttatattatgagcgttttatgaatattttatgaaatttttatgaaacttaatgtgctaaataatatattcaacctatcttattgtttgaatatatatttttaattatatctagcactatatatggaatgtagtataacatttaaatcatacaaatctaaattaattgtattcataataaatttgcaaaataaatacaaattaatacaattattgtatgataattaattaaatgctcaatccataatgtgtaattaattatacatttataactatataatatcttaaatatttgtactaataataaatttgtataaataaggtaaacataaaaattagtacaatttcataatataaaatgaattaaatgtaaaatccaagaatatatacttaacgacagattatcaattaatttaatcaataaattacttaattggtaaataaatataataatagcatacttaattgtagaatattcaaataatcacatacttaaaatatcacaattattataattacatgtaaaaataaagcatgtaattaatttaccaaattaaaaattttccataattatttcttactaaataacatatatgaaaatatgtgttaaataaaaatagaaagtttaaacaaatgtaatttaattgactaaattagcaaaaataagaaaatacaataaaattccaaaataaatcaaaataataaatttttggaattttcttaaatttttcttaatttttcttttttttttttttggaaaaaaccactgccataaacgacatgtcgtttttgcaaaaggaaaaacgacatgtttttcaacaatgaaggctgtccataacgacgaaaaatggcacgtcattttcaataaatgatggctgccttaaaatgtaaaaacgacacgtcctttggagcttcttcaatggctgccaaaaacgaaaaatgacacgtcgttcgaggtcgtcttcttcagcaaactgggtcgatttgacctgtttttctgaatgcgtgtccgttctgttgggttttatgccctaaatataactccatttcaatgtaatctttatgtaaagcctgcttagttaatttggaaattagcagttgtttatgatta

SEQ ID NO: 56562 - DNA, 1170 bp, Cannabis sativa
aaaagaattcagtaagttttatcattttaatgaagtacttgttcaatgtattaatagctagttttttactttactggtttgtgatttgctagtttttggcttttgcaggacgttaatccattagattttacccaagaaatcaataatgaatgtctttgtgcattttctaattattagattactttggtatgttaatcatatagttggttttttatctaaattttctatttcactacctggttctttataggttgcaccaagatataaacataaaactggaaagaaaaaaattgtggcatcacaacttgggcagctaggtcaagaagtcaacatgcaaagctcatcaatttctcagcatcaccaatgagaaggattgcagcaagatctcttgccaaattgacaaagaaataggattgaatgatgattctcattttgaagccattttaaaactttgtttgtaatacaaagtttgctggtttatggtaaacttatatgaccatatgaacttactttatggtagacatttatctagtacatgatttggtattttgtaggcttctgatttttattagaatggttttatggaacttggttgttgttaagttagcttgctactatgtaacgacacacaaacacaaagatccagcttcggttcattctcttttttctcaaagagaaatgagaattgagattaggccaccatgtccaccttaagctggcttagttccacatggactgtgaatgaattttgacaattactaaatgagatataaagatcttattatcttttttttttaaaggtacatcaaacaaaaaaaactcaaaaaagatagaataatcaaatttgtttagtcttttttaattaatctagtaagtttttaattatttttgaagttattagctttattttattgtaattttataatttttatgtgtttttatatatattttttaataatatgttatgtgttatatatttgtaatattattttaattatttaataaattttacctatttttaggtgtttgtatactgctttttatattgtaaattattttgaatttcttaaaatttccgtgttaaataagggtaaataccattatggaccatctgttttattaaatgacagaatgaaacttgtattttccaaaatagtaaaagtaggaccg

SEQ ID NO: 56563 - DNA, 649 bp, Cannabis sativa
acaattaaattttatttgcaatgacatttaaaaatgaaacattgttaatgtacatcaacttgggtataatgatatctctaataaagaagaaaaaaaaattaatgctctctaggggcttaactctgtgaagttaatagagaattggctatcaattgctctttcacttgagtgaacagtaattccaatattgaacttgatggatccctcggggctcaacgacttatttgaagacttggtacaaatcacacagagtgatattactttcaatctcaacccttgcgaggttgatgaaccacaagaatcaaacagggtgttacttggtaagattattatacacagactcgagaatgttgctatacaaggatccctcaagctttcatggaatgctattaagggctagaaatcgaaggagatagaggacggggctcattcagttcaactttgccaacagggatgatgccatgaatgtcatggctagaagaccttggttcgcgcgtgtgtggagctcttattgtcatcatgttgtggccagcatggctaactcccgctgaggtccggtttgacaaaaatgcccatctgtgtgaatgtagagatcatcccaccattttatcggaatctttccaaccttaaggaactcgcctctaaggcc

SEQ ID NO: 56564 - DNA, 749 bp, Cannabis sativa
gatcaccaataacacaccatggaaaagaatactctaatgagagtgttcgtaacagattccaagttttgtaccgaaacgactgattgggttcaccgtatacacctgtaatacgtcatacaccaacaccatccaacccgatttttatatcaatatgacacacagaataacccaaaacaaaaacatcttctttatgcctccaaagcatagcaacacccccactatgtccccttgcatccacggaaaaagcaccatcaaaacttatagcaacacgcaacctctccactacatccttacgagcaaaagtttcacagagaaatacataatggggcttcttttcgaccacagggtctgttaggaattgaagagtctttgggttcccaagcccacggcaattctaactcaaaatactcataatgagcggtgggcctaggaaccagaacacaccaatgatccattttttgagcccgtatttgttttattattttcactagaaacatcctcagaataatcacatcatatcctcatcaatattagtagactcgggccaacttgtagagactattctacgtttactatccaaaatggcaattccttcctcatttagatcatagtcttcctgaccattcaaatccaccacattacttcccaaaataccagctggctcctcagtgatcttcataaattccatattaggaaggtcaactcttccaattattgctacctctcgttgattagtgggattagcagca

SEQ ID NO: 56565 - DNA, 1322 bp, Cannabis sativa
aagatacttaaatattgaataatttttatgacacttaattaaatgagaaattatatcatgataaaaattaacttcttaattaattctagattaacataaataattttcaaaattttattttaactaagaaattttgaaatattatataaatatatatatttttttaaaatatattgaatttttccaaattgattaatatattttataaaaaattaaatttaagttaaaaattaattttagaccaacatgaattaagaaagtttaataatatttattaaaaattaatactaagaatgaaaaataaatttgatttactttcagatctatcgaagttgtaattttataaatatcaaattaaaatttatattagatttatctaaattagtaattttaattaaataaatatactaatatattaaaataaatagatagaaaaataatacaagttgtaaattaatttttaattaattttagaagtacataagttagtaatttttgatacattgattttgatacaaattagtacttaagtattgaaagttaattttgataattaaatttcaagatactaaagtgttaattttattgaatattctattatttgggtagaaaattaatttattaattttggacctacctaaattaaataattttcatagaaatttattttgaaaatttatactgaaggttggaggatatactatttattttcagaactacctaagttaataattttcattaatataaattaaaatttatactttggatgtaaaattaattttgtaattattttattcctaagttagtaattttaataattatattaaaataaatatttgaataaaatactactttgttcaaataatgagctttaatttatataagatatctgatctccattgttggttctagatgattattgttttaatatgatttatccccaatagatgtcactattaaataatttaatatcgtaggatctcaaaaggtaaatatttttgtaaattttatattcttagtaacgttcacccaaatagtgactacttagaatatggtttataaatatttaaataatggtggtagctcataaaataagaataatcttgcatccagttcaatactgaacaacattaaattcttattttgatcgaataaaaagttgctaaaatagtgtctattttagaagagctcactactctgtttaactgttgatatctttgcatcctgaccaatacgtgaaactgtatatcatttgtttaaaaaccttgaaaaattccaaatatgcttgtttttagtattttttccatatcttccatatttga

SEQ ID NO: 56566 - DNA, 2483 bp, Cannabis sativa
aatacctcgacaaagatatgcaaactcccttcaccacctcaccctccacacctgagacaaaatagaactattaagtacacgaaaatggaaaaacaccacatttccttcaaaaatatatttctttttctgtcaataagaaaatgtatgtaaagtagaacggagtaatgtacaacccaccgtcgacacccccctgtaacaactccaacaatggaactccgagtaatgtacaccacagtgaacaaaatttacaatatgggttctacaacctcaaacgaaaatagaaaatggaaaaacaaaatggaaaatgaaaaagaaaatggaaaaggaagaactttgccctagcagagacgaaaatggaaaaacgaatgacaaaatgaaaaataaaagaaaatgaaagtgaagaagtggaggagtggaggagtacgacggttgattagacttgattgatggatgtcacttttcacttttccatttttaataaatttaaatttcaaaaaagtaaccggtacccatttttttaaccctacatacccctacataaacccctacatgaaccccagcctttggatcaaagtaactgcccatccgacggttacagtacatcacggattgcaatccgtgtccgtacagtaacgggacaaaatccggtcccaacataaattatagatcaattcacatacctttcatgctcctctctttttattcttgctattgaataatcatttaccaaactaaacaatggaggaatgatgttatcaagacaactgagagtgatgatgcaaggtttttacaaaattgattgtgcccatttgattcagattcgtaggaagtagtaattttaaaatttttgaaaagtaaaaggaaaaaattaaaaaaaaaatgagcatatataaaacaataaatttattaaagttaacaacaatatatacaacaaatcttagagaagtaaaaggaaaaaattttaaatagattatcaaagctataaatttaactaatctttttcatcaagtcagtgaattatagtttaaatacaatcaaatcataaaaaaatacaaaaaaaaattatataaaaaaaaaaagaaaatgtataaatttgattaatttttttttattaaatcaaggattgtctcttctaatacctgttgttgcttggtgttgtttattttttcagctatcaacagaggaagggtgtttaaatgagttgtgggtgctgtttgaggatgttatagctttattgtctaaatttccggggacagttttgtcccatgtggcttgcgataagaaattctgcagctcatagtttggcaaagcatgcccttcggttagacgatgagctggttcgaggaggtgccgccgcctattatggatagccgcgttgttaatcatgtgtgattttgatcaccgcgtcaaaaaaatgaagtgagaagtccttatttcgggaatagaataggaacccctcttattttgtcacatatagatagaagaagatgatgaaaagaaacattcttaccatttcaaagcttgtcattgtgacgagttcctgaatctattatctttttccttgaaattagaataaaaaaaaaataaagaagttgacgaagatatgagtttttgtcatacatagaaagagaagaagatgaagatggactcccctactatttcgaagtccttcactacactacgcctcaactctattatcttcttccttgaaatttgttttacaaaacacccacttcaaaatatattttaccaaaaactcacttcaaactatatttcacttgaagcccacttcttattggagacacatggagagtgggggaagaaggaaaggagtagaaagaagttgaaaaaataaatagtaataattgtaccaaaaagaaaagtaaatacaaaaaatacggttatgggctgttacattttttttaagtataattaaatgtgaaaaaaaaaagttaaataatatttcaaaaattagaaaaaaaaaataagaaaataaagaggtgtgaggagagttcatatatgtcgccacattatttctccaaacagcaacattatttaaatatatatagatagatagattgtaaaagtgaatcacttctagaattgttaatcattggagtatttatttttaagaaaaagtaataaataatgagagagaaaagaaaaaataatattttaagatgaaactattgcatgtgctacatatttttgaattatttacaactaaactccttaaactttaccttttataacaactaaccatctaaactattttttttttttgtggttaagcctctcaaactacattttcctttgcaaatttggtttcccatccaattatcttcattatgagccaaattggactatacatgtgtacacttatataattaaacaaaattaattaaaacctcataaaacaaaatactaaccctaacttttttttttttttacagcctcctctttctttttgttcttcttctcct

SEQ ID NO: 56567 - DNA, 833 bp, Cannabis sativa
actaagctaaccttagtggcttaacattagtggctttgaataaattttgttggtaagtgcatatataatatattacatttttatgtggacaaagccatgtgatagatgccctacattggtatgtactatcttacacatttagatttttccaagaatatggtacgtactagaaataatgttaaaaataacagaaatgctaaagaatattagtttaatatttttataaggtataatattgttattggtgtaataatatatcgaatcttatttattttactttaataaatattataaaaaattgctaactaattataaggtaacactttagcattgtttttcaattattcacatacgttacatatatccaattctcttgatgattaggtttttcaatctatataaatatatttatatatatattctacaccaacatatatatatcacattgaagtagtttccacatctttagcattgttttgttttcttctactcattctcttgatgattaggtttcgtaaccatttaaacagctttacaacaatatgaatcgcttgaagtagcatagtcacatgcatgactataatccaacctattaataaaaatgtgataacgtgacatggagtactgtgaaaatcatgtcttggagcggcaacaacaatagcaataaggtatgttatggtcattgctgttacagtcacccacaaaattattgttaagatccacattaagaatttgcgacaaaagggcaagcctgtgacgagaagtaagattatactcaatgatccagcaaaaccaatcgtgttggtaatcaagtaagcatgataaggatatat

SEQ ID NO: 56568 - DNA, 1130 bp, Cannabis sativa
ttttacccctaatcttgaaaaatacctaagttataacctaaagggtattttagtcttttgccaaggtaagtgatttggtggctgcctagaaacttgacaccttgcagctagattaatgtagtaaatcctctttttcatttagagaaattaaaagaaaatcaagaaaggccaaaaaatcaagaaccctctctacccttccctctctcttcaaactagcctagaacaaaggggggattgttgcttatttctggtgttttcagtaaagaattcaaggaaaatcaagccaagctaagcccttgtatctctacctcttagttcttgaagtgtttacttggtttgaatatatgattttgagagttaattgttgttagggttaggttgagttgtagttcaaattttagggttcatttgagttggtttcagcttctagcagctggttttggtgtatggatttagttttgctcaaatttgagctttgaactcaaagctttgatctctaatggcatgttttggttcagtgattatttctagaatttattgtctggaatatgttgtaaatgcattgtataggtgatctggaaagtatgggtgcacttggatgagttttgagcaagttggggcttattttgggaaacctggtgcaaaccggctagtcggtttgccaggcttgtataacaggctagccggtttttgcaggattcccgacaagccattttctcaactctcgtccattccagtatcgtagttgggtgtttccctgtctcctgagctggtgtgatctttagagagtgtagcagaaccttgagtggcgggttcgggtttcccggattagggtttcgatcttgtgatttacccggtttcattatgtgatcagggcatccatttcggacaagactttccgttcaggtcggccagcacacttgaatatggaaagaaggtaagaactgtatatataatgtgtgataatatctgaatgtatgtatatgtttagtgtatatgcatgcttatatgttgtgattcatacactatcaatacttctacgattgcggtacagagtgcattggtaaagtgtatgatgtctgaaagtacattgtggtgttaccagcacttgtacgggaaggtacaaggtg

SEQ ID NO: 56569 - DNA, 1152 bp, Cannabis sativa
gaaatgcagaataatacagaaaattgaacatatacgtgtatacagaagtagatcgaaatacctccaactattattcctttgagcttcaatcccacacaagctttggatctaaaaaaaacttagttaattaatgtgagtattcagacttctaagctctctcttactctcttatatagattttactgtttttcagagaattagtagtgaacttagaaagcggtaccttatatttataggttatatacttcatcaatatctgtgtcacactaattatcagaatattttaacaatatttagaatatacttacatacttatattttaacaatatttataggttatatatttcagaatatttattattatcaaatatttaatttgtaaatcaaataaaatattaactaattcttatacatgtataaaatcaatcagatttattttatccatatataaaatattctattagagaggactactatgtgtgattcctctctttagatgtaacaatgagtactctaactttgcccacgaatttttctcaaaactttctgaggtggttaggttaggctgagagatattatctttatatttaagacttcctaaaaaattttaaaaaatgactttaggataaacattttgagcattgctattaactatcagtcttgcaattagttaataatattccgtaaaagttattatatttagttatatgggatccgatacttaattataaaaatagcaaatataatactttgaaagatactagacactactggtaccttttaacatttaccactagaacacttactcagtgttcatcataatcatcttataatatgaagaaactagggatgtatataagtttttgtaaactgtccaaaccaaataactcgcccaaaccaaaccgacataacccgacgaataatgcaaaccgaataactcgacgaaaatgtaacccgtccaatctttatattgggcgggttgaaaataataccaacccgtccaatcaacccgaactaacccgatcaacccgattaaaagggttttatatatatatataaatgtatatatgttttattatatatatttacattatcatataatttacatacatatttaaaaaaaaaatatataaagttcaaactactatgttt

SEQ ID NO: 56570 - DNA, 887 bp, Cannabis sativa
actcacatgataatgatacatcatctattaaagagttgcataagtatatctctaatggcgatgcatcaaataggttatgcgtatagcttatcttacaaaaaatttgctccacagtattttaaaagttgtgccaaaattgatacatttaaaaaattatattaaatttaatacataatataggataatttaaaatttatatcactataattatactatttgttatttatttttatgttttttaatattttattaatatatatagctatagaccataatgttatattataaactatttacattcttctttattgttttaggtaataaattaataataaaattagtataaatattttttttgtattttaatagaagtattaattgatcataaatttgtatgaattaaattttataattatgcattagagtaaaatactcagggtcggccctaggcataagttttattaataccgtttgtctttatagtaagggcccaaatttttttttgcctatgacctatttcaactcagggtcggccctgacaatactaaaaattaatgcaaatatatcacaaaatcaatgtttgtatacaatatagcataatttttttatttttcattgaagatgatctgagcattttattaaccatatgagataaaacctaaaataatttatttatatttaacaataggaatagttcaacgagaatccttaaaagaaaaaaaaaagtaaaagacacaatttaatagtgactgtcttcagcacaacgagcatagaaactcgtaggttgttttgcattttatgttgggaaatatggggtacaaagtatggaagaacaaagcttctaatgcctcctttatttttgtattttccacttgttatcttgatca

SEQ ID NO: 56571 - DNA, 2269 bp, Cannabis sativa
ttacttttgttaccattcatgcccaaagaaatccttagcaaagcttttcaacctccttagtggtactatgaggaaaaacaaagatgctcatccaataatttcgaaatccaagtaaaatagaggggattaattgaaccttattaacaaaggagagatgtctgctcgaccaagtgtgtaatctctgcttaatcttttttacaatgatcccacggtcctcaactttccactttgtcgaccttagagggactcccaaatatttaagaggaaaaataccctctactagttaaaaccgtaaataatagcttgtttttccttagttcttaggcctccaaagtaaatttgggatttgctagagttactatgtaagcctgagatagagctaaaatcatcaagcacatgtttgagagccataactgagagcttggaacccttactgaacatgatcaaatcatctacaaaacatacatttattatcttgaagcccttgcacatcaggtgatacctatagttagaatgagtagttgttgtatggaggcttctagtgagatactccatgataagaacaaagaggagaggggagatcggatctccttgtcttaaagatacgatttttgatctccttagaatttctagaaacggcaaatcgttttcgtgaaaatggctgaccgttttatagcacgaaaatcccaaattttgtactttccgaaacactaccaaacctatccaaattatttcaaacttcacaggatacatacataccatatatacaacaatccttacgtaacaaaaattaaaatcgagcccttaaatggaaaatgtcattaaagctcggacttaaactttaaaaagttccaaactcaatttttaactcaatttcaataagtaaacaacgaaactagtcccatagttacccaagaacaattccatgatgaagtcagaatatccataactactctaaatcagaaagtcactatataaaaccaatcagttccttatgctcttcctctttaatgatttactatcctgctactaccggagcttaaattactaagtttcgagttagaaattgaagaaaataaattaaggaggaggagagtttcattcgttcttctatttttattttaaaacataatatatataaacttaactaataagacttatcattatatttatatataataataatagataataataataataatatacattaataataatattaatattataaataaaaactttattaataataattattttaccatttcttaaccactaaaaaaattttaattttaagttatttggtcaacttcgagtaccccaaaatactccagtaattttaaaattaacttatctcaataatcccatcaatattactaactaaaatcattgtggtatttttggcctccaatcgcgtctccagggtcgccgaacttgaaaatatttttatttcacaaataacttacactacgtccacatattctaaataaatctttgtaattaataaattacgcttatttatctacttatagcaaaatttataatttatgctaaattaggttagcaggatcataatcctactcattactacctaattaatacataatatataataaatcctaattattcataattacatttttgagatattacactataggcgataatttttaaccgtcgacaattctgctttaaaaaaatacaatttttaaggcacgcttaaaaactgttgggaatacatcacgagtgtttaaaaaccgtcaggagtacccaatttttcctgacagttttaaacactcacttaattttttagcgacaatctcccaaataatacgtttttaggaccatcgaaaataatagtttttgtagtagtgccagtagcagccacatcctgatcaacagtgcccaggtacgttctcgcatctctttctctttttcaatctcaaatgcttaatctatctcatcttcggtggttttcggcttcggtggtgtagatcttgcatgctctctctctctcgcactttctttttctcttcagtcgtctcaactctacatagttttagatctaattttattttcttgttgactaaggaaacatgcgcagtgactatggtggtggttcaggaaacaactttggtgtttttttttttttttattttgtgatttatgatgttgtattggcggaggaatccaagtatggtataaatatggtggtgatagtggtggtggtgtggtggttcagtttttttatatatattttttttta

SEQ ID NO: 56572 - DNA, 1055 bp, Cannabis sativa
atgattttaaaggattcatccagatcctctatgtgccctccagtcttcctatgtttgaggaatatgtcatccacatatacttccatgttttgtttgatctggtctttaaacatcttattgactaacctctagtaggtagctccaatattcttgagaccaaatggcatgactttatagaagtatagactgatgtttgtctggaagcttgtgtgctcttcgtaaggcagatgcattcgtatttgactatatcccgaataggagtccataaatcttaggatttcatgctagactgttgcatgcacaagctgatcaattctcaaagtgtaaaatagtcttttggacgctccttattgaggtcggcgaagtcagtacgtactcgctatttttttggcttgggtactagtacggggttcgctacccaggctaggtagaaagcttccataataaacttatttatgcagagcctttctacatcttcttttagtgcttgtgcacatactttgtctaacaatctccctttttgctagaccacacgaaagtttggatcaatattgagggcatgagacatgacagtgggatcaatcccgaacatgtcctcatattaccaggcaaaaatgtccaggtttgctcttagaaattttattaaagctaattttatttcaagcagcaaacctttaccaattttgagttttttgctcggaatggttagatcaatctccacttcctctagttcttctacaagcccaacatttgtgtttatttccccaagttggggatccatatctttgtctccaccttagacgaattcctattgggcgatgtttttccccttccctaaactctggccgaaagtatcttctttcttggccatagatatagcaaggttgtagcattcctgtgcagttctttaatttcattttagacatcctactccactctttattcgaaacttaatgtacaagtgaaagactgacgttatagcttttaaatcaataaggctcgccggcctaacatgacatttaaggtgtcatctattttttacaattaattaccaa

SEQ ID NO: 56573 - DNA, 1783 bp, Cannabis sativa
  modified_base (27)..(29): a, c, t, g, unknown or other
actaatcagattgtaaagagttttatnnngggcataaaacccaacaaatatgtatttgaacttgggacatatttctttccagtgtaagtgtagtatcactaacctatgtctataactactattaaatgataatttagaccctatattttacaacataaaatataataatatcataagctcaatattaatgaaaataattacaattaagatagattagaaattgggtaacaattgtttttttttttttatcaatcaatcatgtacttcattactccaaaaacacatttacatcctattggcatcttcaaaagaagaccccgtttttatctatacattacaatgtaattacaacttccttgtgtgttatattttacagctgtaactataaaaaaacaccagtcggcctcagctgcgatagagcaacactcggcatcagctgcatctaaaccagttggcatcagctgaaaaaaaaaaaaaaaaatcagttgctatagaagagcaaaccagtcggcatcagctggtgtgcttctttggccaattacacaacactctattctttacatcttcctttatagcacggacaacaacatcttatgctattctccttgaattccatagcaaatcattacgatttttccaaatatggtacaccagagcagccactgcagcagtgattactgccttccgaaagttgctcattttcgctctttccagccacctgcacaatctgctcaagtctattgtttcaactctccatcctagccaagctttaacttgagagagacaaatagtagagaaaggacaagaaaagaaaaggtgctctgtagtctttggatgatccatacagaacaagcaatagtcttctccaatgatgttgtgtttgtacaacctttctctagttttaattctatcttggattgtaatccacaagcaaaagttatgcctagggatgttgaatctattccatacctcatgactccaattcactttgctttgtgaggggcaaagagatttgtagccatttgatatactgtatttggcgcttacgaattgctgaatgtccataacacctttgatttgtgcttttaactgaattcaatttcttccaatattagctagcctgaggtggagcttgataagtccaccaatcctctcctttaatgtatacacagtgtatccatttaatccacaggttatcttctttgttcgcaattgcccacacatattttgtcattgcagcaatattccattctgctattcttttcaaacagatccccccagctgcttttggttggcacacatgatcccaagcaattggacctggcccttgagaaacctgatttcctttccataaatatgctcgacagatggcttcaatatcccttatagttcgctttggaagcactataacttggctccaatatgaatgaattgacatgagaactgagttaaccagaactactctccctgccaaagacaagtttctagtactccatattttaattctggttgtcatcttatctactagaaccttacattcctttcctgaaattcgtttcgcacaaataggatacctaagtatttgaaaggtacctcttttttggtgaaacccgagcaatcaagaatgtgttgcatttcagagtcctccatgccacagcagtatattgcagatttattaggattcgaatgcagcccagatgaacatgaaaacaatttaagcccctgtaacatatagtaaatactcttataatcgccaagacaaaatagtataacatcatctgca

SEQ ID NO: 56574 - DNA, 1651 bp, Cannabis sativa
  modified_base (773)..(773): a, c, t, g, unknown or other
atttttgaagagtgctataccattagagtgtttttaaaagtaagagtgtcaaaattgatgtggaagagagataaaataaaatattatatttttagatggtgtagagatttttagcattggagatgctctaatggcttagaataacgctttctctccttactgattcagaatttggagtttccttcaacgctttctctgcttccccttccattcaacacttatcctgtacaaatgtgaaataaaagaacaaaaaagaaatactatattatatttatttttaattgtacgatgaattgcgtatatgtatttttttaaataaaaattaaacactattctcaaaattaaaaagttaaccattcaaaaaataaattaagtttatataattataaatataataattaagactctgtttaagtgtgtgttggaaattgggaatggaatttaagtagagagggtcatcatcagatgaagttgtgtcattgagtttgccccttttgaggggtgatgataaagaagatcagaagcagaagaaggtgaaggaatatgggttataaggacgagtccaaacaattatgtttatgtgtacgtgtgtgtggcacgtaggtattttgattcatgtaagattcaaacacatattgtggtggtgtgttggttttaaatctggtgcggtgatggtggttgacggaggctatggtgatgtggtggttgcgtttatcgtcgggtaacattgatctctgtagttattttatttttaattatttatttatttattnattattattattatttaaatttcataattttgttgcatatttttagcagttatttttaaccatcctctatagtttttcaaggaagttataaatatcaattattgatcttctttatggtttttatttagtgttttatggtaattaattggcatgtatttcattgcatatttatttgtatatgtctttatttagtgtagtacttttcatcataaactctcgttatttttcttataaattggtatggtttcacttttataaattagtctatactatatgtatatatatcattgtattctttctatatgactttttattattttattgattgagatgtatatagtcctttagtctgtatgacattattcagttatcaatgattttggtcatttttttttctaaaaaaaaatagaaattgtcatttatacgattgagattggaagcttaaaatcccaaaaatacgattgactcttctccctctttcacaatcagacgacatcaaatctgtaaaatgctcctttgatctctgccacttctccctcttctcctttgacatcaatctgaggtaaaataatattttttattttggccgagcgattgggtttattgtgatttcaagcttccgattccgatctgtgaaatgctcctttgatctctgccacttcgtcgctccactcttattggccaataatggtgatctacggcgcagtaactcctttgatttcaggtaatatgtctttcttattttttgttgataaaaatccctgtttatctccaaatattgcgattggagatgaatcctcctctgagaaaagccttccttccatctctatgaaatattcttcatcttcgctttgtgatacacataataataatctcac

SEQ ID NO: 56575 - DNA, 692 bp, Cannabis sativa
tacaaaatcacgtaaaatatcttgcgtttattattattaaattctgtagtaaatttattacgtaaaaagtttatatatttagttaacaaaaatctgcattaacattaaggattacaattgtttgttgaatacatacatatattgtggatcactctttgatttgtgtgtccacactagttgatgtgagccaaaggcttagtctccgtgatatgttatgagtggatccagattagtagttatcttcatgctcatgttgaatctccaatgtctcgttatgtattatatttgtatcctatcgatacaatataatgcatacttagttttttttagacatttatgtttcttgagatttttgagtggagacactattgtttagtgaatactagtgttagtataattatgtagtttaagcaggagaatgttagaatatttatatgggccggcaaaattaaacaccattcacatagtgtcattattggtatataaggataactatatatttatgtaatttagaccataataggatgatcggttatattaatgatatttgaggtgcatggtaacgtcttaataattataaattggcccattaaatcatagtctaccactgctagtgttatgagcccaaatattaccatttaactcttagtgtatttaaacatataataagagtttgggatatgttgaaagat

SEQ ID NO: 56576 - DNA, 1102 bp, Cannabis sativa
ggcttgtaaagtagtgtcgaatggtaggggccaccagtatttggagggatctctggattcctcattacaaaggttttatcccaaaaccaaaagacggtgttttacccaatgtaaactatgtggctgaactcctccttgataatggagactggaacatcctaaagctcaaaggcatctttgacagggaaacggtgtctgcaattgttaagagtggcaaaccctctggtcaaggagaagataaatgggtgtggactttagagaaaaatgggcaattcacgagcaaatcggcttacttaactcaagcgttggaaagagctcctcattgtgaagttgcttcggcgctctggaacaagttatggaatagcaaaattttagagaggcataagatcctttggtggtgcatcctttctaacgcgctccttgttagatctgtgattggaagaagattccacattgaggacacttgttgtcctttatgtggattaggggaggaatccatggaacatcttttcttgtcctgtgatgtggtgtagcatttatggcgatcttcaccatgggacatctatcctatatgtaattctgggattcgagtttgggactggatcaaatttatatggaatctcaataatagggggatcagagtagaagaagtcttcatgtatgcttcgattgttgttgaaactatctggaggatgcgaaacgagtttattcataataacaattatccagatgttttgaaaggtattgaccaggtttgtacttcttatgcagggcttcatgatgttttcttgccttgcccgacaccatcttcgagggggacttggaggcctcctcctcatgattggattaaattgaattgtgatgtcagggtgggattagaaaccatgtgcattgcagtggtagcaaggaaccatctgagtagggtgaatcggattcatacggctcggttgaacttctcggatgtcttatgtggagaagcagcggcctgttgtttagctatctcgtttaggttataagtatgttttggtggagagtgactcgagagtggttatcaatgctcttaatgggacggagtctcattgggcgcttgagaactatatct

SEQ ID NO: 56577 - DNA, 3584 bp, Cannabis sativa
tttttgggatggaaacaacatctggaaagatataaaataacctaaagatcagcaaaataccctaacagtctaacaaattcagaaatcgaactagccattttagcacaacaaagaggtcactcataataatcatagttacataaaaacaaaagcacaaaataacaagtaaaaaatattttaaatttcgtattagtacatacccatgaaaccagatgggtaggtcttatcagtcctgaccttgccatcaaccatgacatgtcgctgcatcagaatagattgaacttcacggtatgtgagggcatacttcaatctgttcctcagaatgaggatcaagggcaagcactccctcgatttgtgtggtccagatgatggtttgggagcctaaccaaaaacaaagatgaaaacttcatctcatagattcaaagcaataaagaagaaaatacaaaaaagagaatttctaagaaaaataatgacttacgaaagcaccaccaagcttgtcgagcatccaatgcttgggggcattgagcctcttcaaatgtttcttcaatcctctagcctgtaaaatacatcagaaaccatacacagttacacaaacaaggatcttgagttggataagtaaaacaaaaagagacatggagaatgaagaaaagtaccattttgggagaacggaggcagatgtagaaaccctagcgcagaggaaagtgtggtagcttaaaaggagaagagtgagcggcggtgacgacttgatttatactatgagaagggttttagggttaaagagaaaagaaaagaaaatagacttacctgactgggctcatggattgggtatcaactttatggactttcaaaccggcctggcccggcccgatacataatattaatggtttttttcaaaaatatacgtcaaacataaaataattacaaaaataacttaataaatcttaattacaataatatcttgtcacgtcattaaaaaataccttaatttcaaaataatatacctgattcctgcgtttcaaaagtaacattttggttttttatgatgttgataataaaccaataagtaacttttttaaaaagtatatcacttctatattatataatttgagatatattttagttacctctacaacttatatgggggtatgcattgtaataattaattatttatttaggttatattaatgcatttgagtaattttcaagttttttttaaaaaaataatgaattgtcatccagtaagttacgattttagtaaattgtattttaaaaatatatatcataaatgtttaagtcaccgatattttttaaatgtaaattaatatatgtattttgattagtttaatcaaagaatgaagttacaaataacttttaaatcattacaaatacaatattttttgaaccaattaattatgatttctataagataccaattggttacttttgataaaattatcaattttaaataaaaagatgatgaccagaccagaaatcttataatcagaaacgtctatatactcatgtatgtcaaataaaattattagtttattttggcatattaaaacaaatttttagtctttgtttacatttttcatataacctactatcatttaaactattcaaaaaaaatttaaaatttacaaggataatgttgtaagcatactgccataaaaaaattgaaaaaatatttcaatatgtgtttttaagcacaaaggttaactaagaggttgtaatagaaagttgacgataacactcctcattctcttttataagaacttacgttaagagttgtacatgtttgagtcgccattatatacaacattattttgttattataattttttttaattatcaaaatattatttatagagtgaaggcatatatgggagtagaattttaattgtatattatgaatgtttcgattctcctcttagtgtctttattttttgatcatgaagttttgtctataattgtttagtcaatgagtatattctttattatgttctataatttcttttttcacatattgacattattttgtatacaagtcatgtgacattatgaagaaaatggagtctatacaatcaagagtggatattccctaccagtgacttatatccctggtccaaattctttttcgtcaattcctttagcaaagtggtggcgtgctttgtggtctttggaaattctcaaaaaacttaaggtcttcacttggcgtgtgtgtcatgatattctttctactggctatgcgctcttagctcatcatgttccaattctggaagctgcttttattgtacttgacaatttgatgatgtcctacatgctattttcctttgccttctctcaattcaagtttagaagctttcatatttttggaagtttgttaagcctagtctctcttggaatatcatcgacattcaccatcatctcttgtcagtgttatcgccacatcagctatgtgttttcattgtccttgattggtgcatttggactgaacgtaataaaaaaaaatatggcaccccacataggaatgcttctgcagttttaagttgagcaattcaatattattgtagttggcgcaaaattcacaaaagcaagttgctaagatttctcttccctcacgagttactcattcgtcagcacttaacaccttctgttggattgttaaaattatatgtggatgctgctatttgttgtgaaaacaatactattggtttagtgctttggttcgtgattctgatggctttccgctggagtgtttcgctaaatccttggctagttttttctcccctaaagaagatgaagcgttagcaatctcgtataatttaaaatggtgtttgcaattaggctttttcgttttctttgtggagagtgatgtcgaaatcgtggtcagttcagtcaattcttttctgagggtgtctcccaatagagttgtatcattagatttattaggtccttgttatatgtctttccgggtgtatgtcttcaacatgtgatgtgaaatggttatactgcaacacatgggttagcaagatatgcactataaatggaaaacaagatttcttggttggaagaaattcctccttgtatattgaccaatgtattgtttctctcaacaatagaattggttattatattaaaagaaaaaaagacaataatgtaaaatatgcatatagtttaatttcctcaaatttaaaggctaattaggatttttgtcatttgaattttgacatatactaaattgtactaactttttcagactgttaaaaattcatcccgaactattgacattattgaattaatgatttatgtccaatttcattcaattttattaatatgacaattgtctatataccaaatggtgaccattaaactttcattcatgtcaaacaattatttaaattggatggaaattttttaatttaagaaagaaattttaccaacttaaaatgttcaagatagtacacatcaaagttttagtgaaaaaaaatataattagccaatgtaatgagggagtcacttgagccaaattatccttcaaaatattctacttaaggaaagggaaaagtttttttttttttttt

SEQ ID NO: 56578 - DNA, 1397 bp, Cannabis sativa
aatatctttagtatccatgtgtttttgttggacacaaatagatgatgtgctattgataatatcccaggaggatataataaaatcttaaacaactctggttgtgtcattatcaatggagtcttgtacttcataggcagtactataaccaaaagcatcattagtagtagcagttgtaagattttattattcaatctcgggtgcgaaaaattcgataatgagattataaatttgccaattaatgatgaggaagaagaggtagaggaagaggagtattcttcaatccatctttataaatggaaagaatcatcacttgggttagtacattatgacctgaatggtaacactgttgatttgtgctttaatttttgggtgatgaagaatggtggtgattggagtaagattttgaaacaaaaactcttagttccttctgttatgttcagtttcattatcttcagttcgttggagttttgaataataataataataatgaaaatgaaaatgaaaatggatttattttttcaagagatgtaatgaatgagtatgatcttgataaggggctgatattaattgaccagtacaatcatgatcttgatgatgatcatgatcgtacattactactaaaggagagtggtaatcatgttcattacattcaagcttttgattatgtggagagtttggtttcagtgtatcccattaatccctattaggggccctttttcttttctcattttttaattaacttaatttacaattttattatatggttaatgtcttctttatttatttgtttaactatttattattgttttctttttgaatttgtactcttgtatttgaataatactccaaatttactatttttctttgcacatacatctttgtggttataaggagagaaattcttcaaaatcttaagattgtaaaggtccaacattttaataaattatctcccaaattatctgtcatttgtttaattttcaagtgttggacttttctcacaataacatcaagctttggaagtgtaccatcctatatttgtaatttttcatcaataaaaaagaatgatgatgagaacaactttggtatttttttaacattaaaacttagttctcctatgctgaacgaatttctattatttggaatgtaactttatccatttatctagcaataatctaatatataggagatatttcaagaaaaattactgaacttaatagtgtttggtttctttgaatttatcaagaaacaatttcaacaaacaaattcctacagagtttagccagttggtatctctagatgctcttattttttcaaaaaaccacttttttaaaaaaattctttcaactttttcgaaagtggaacatcttaacatgttagacttatcatggaataacttg

SEQ ID NO: 56579 - DNA, 3812 bp, Cannabis sativa
aaaatacaaataacaatgaaaaaagaaaacaaacaaaaactgaaagtgaacaggaagggtcaacttatttgatttgtgtctttattttgtcaaattttgcaaatctagaatttatacatgttctttatataaaaatatattatgtattatactataatactatgcattatgtattataatacattcattatattaataatagaaattgcgggattgtgaccccttgtcccaaccattgtagcacgtgtgtcacccagggcataagggacgtgatgacttaacgtcatcctcaccttcctacagcttatcattggcagtgtgctcggggtttcaaactcatccgaaatttagcaattcgtctattcaatcccttagggccgagataactcaattttctctgatgaactatttgtgttaatagattagttcgatccaaaagtctcactatgtagatcaagtacatatgctgatttacaaagataccttccttggaccttagcaaattccattctgagaaaatattttaatgcacccaagtctttttcagcttatcaagctcacattgatcactcccattcaacataatatcatccactgacacaattaagatgggcactttccttcaaatatttatagaacattgtatgatctgcctgactttgtgtgtgtccattgtgttttatcactttaataaagcccttaaaccaagctttagcttgtgcccatataaggacttcttcagtctgcacactttcccagctccatttttttttttttttcatggacactcttttggctctccatgaaggaagggcagatagaatttactacgagagttagcaatgtttaggatgaaatttatctttgctacaggtgcaaactttagttggtagtgtttttttctttggaaactaggatccatgcctaaccctacagtcttcttacactatggcaaatctacaatctcccaagtgccattcttcaaggcattcatttcttcaaacactgccaatttccaactaggctcatccaatgcttcttgtatcttcgtaggtacaactatgtcaaatagtaaatcctctatgggtttttgacatatggttgtaagaaacttatttggtaatgggatattgagttctggtatagattccttttcttgatccagtgttattataaggattggttgggagacttggttcattaatatttggagtagttgtagtgaaattattaaatattttgaagaccattgctcaaggcttttgtttgaccatgtgctgggatgattaactagtctctgtttcttccagtgacatttttcgtagcatacgccacaggctcaatgttttcttcaatcaatcatagcatttctttttctaacagaccaattttagattcacattcattagtagaatcgagtctttataagaggaactttagtattatattaggtaaaggagcaacaatttcccaaaattttggttccgctaaactctccccttgaattaaaattttggtaaaaaatgagttttttctagaatatagacatccatagttgcacgaaaatgttttgttataggattaaaacacttcataacttttttgagtaggggaataaactagaaaacatacttttcaattcttggttctaattttgcgtatatctttttggaatgtgaacattggcagtgcaaccaaatattttcaaaggttaattagaactaattctagatcttggaaatacctttttcaagatgatatgaacctacaccacttgatacagccaaaccagatcaaaagaaccagagcaataaaacagtgcaccgaaactcaatttcacacagtcaattagcatactcaagccataatatgcatgaccatttgattgtatctcttgaaaggaaagtaatactgaaagtagtcctagtcctactggattaagatgtcgagggggacaccccgatacatgcataccactaacactaacagccataataaaccttttccacacaattacacaaaagcccttcccacaatacatgtcacagcccagcccctatgcctccttggccttggccctcctagagtaagtaaagtgtatatggggcctaacacaagcattctaacagagtattgtattgtaaaacacgtgtgggcaacttgttaataagataagaggcagtaaggacatcatctccctataaattcatgtaaacatatagttctagccacttctaataagtattttttcgtttagctaagtcatttgttcaggagtatcaagacgattgatttaaaatgcctttttgggttaaaaaattgcctaaggttagataaaaattactccattccattatcagaccaccttttatttgttaaaagaccttttatatctctacttactttcatgaccacatcccttatctggcttacttctcatgttccttttctagactttttttcactatcaaaatataaaaaggggtttcatctgtacttcccaatttttctttacatcctttacgccttattctaaggtattatttattctctccctctctctctctctctctccctctccttatatcccctccctgtctccctcttcctctcaatttagagctgcatattttcagcaacttaatactttgttattcttgcctaaaaaaaaaccgttaacacaacttcaaataaagttataaactatatagtgttctcaatcaacaataaaatttccaatgattctgaaacactgtgtgtgactacgttccatttgggttccataaattaataatttattgctagtttttattacaggattgtagtatatcaacagttcacactcttgtatcttctcttcctccagttgtcagaagtgaaatggcggtgaatttaggaggaaagaaacattttagtgaatctggtgtgttctccatctcatatgcaatgaataatcataacaaattagtctggaagtactagttgatttgagattctaattgctatagtcaaatgtaatatctgaaagtatgaatttgaaactgctccaacaagtcttatgtagaataaatggggcctttatcttcattatgcatgtgtatgtggaaaatgtttgattgtcaaattcatacaagcattgtattggagtctccttccaatttgttgatacctgtccttgatggagtaataaatgtaacaattgacatttacacgagagttttcatgttttattgcaggtcaagctctatgtgaactcatgattagcacaagagaagaggctgcaaaatgcatgcagaagattctaaagcgaaaagttatggtttcaagtgcaagacaggccatctctggcctcttggctgtcggaggtgttaatggaatgagatatcttggtagtaaaatgaaaaaggcttggaaatcctggatgtgacattcagaatttctttctggtttcctgtctgaatgcggtaacaatgagtttggtcatgagatattggcctttttggagcagcatccttgccaatgaattttgtttttccctttaactgcaaggtgtccttaccatccttctattgagcttccaagagtaataccactgattcaagaaaaaaaggggtattaccactgattttgttcattaacatcatcatttgcagtgaaaaaagcttatatcttactaatataacaagcctcatctttttcagctgcagagattgtggttctggaaggtttgtacttggtaggactatgtttgttttggtaggactatgttaatctcaagtaagcgtaaagttttacagcattatccatttaaa

SEQ ID NO: 56580 - DNA, 773 bp, Cannabis sativa
atatgaaatctctcatgagtcttatatttataagtctcgattaaaatttcacttagaaatcatttgttgtatattaatctacacactcttaagaacaaaactctactgtgtcgaatctaatcaataaaaataaaagtagacttaaccccattttcatcacaacatgggggtgaactaatataaatccttagtgtcaatttaatttattgtgattttattagtcaaattaattcaccgtggtcctctttatttttacgatcttagatcagttgacgaaaaactgcatcacaccatcttcatcaaatttgtaaatattaagtctcccatggacttgtgttcatatatctcaataaaaatttcacctagaaatctattttcgtattattatccacactcttgagaatataactctgatgtgtcgaatctgattaataaaacaacagtagacgtagcccgattaccatcgcaacatgagagtgaactactataaatctctggtgtctatattatttataacgattttatttagtcaaataaattcatcgcaatcctcttattttgtacgatcttcttaaatcaattacaaaaaatagcatcaacacctaagttttccttttccctccttcctcatttccttccctctcaccaaacacaatgctaatctaatatgtataagtcctccaaatagtctcctaccactaaaataaaacccattctatttctcaaagcaggatcataaagcaagcccaaaaaaaaaacagcaaagttaatga

SEQ ID NO: 56581 - DNA, 790 bp, Cannabis sativa
tgcataaaagataatgtttaaaatattatgtatggtattgcgccctaatatacaaataagaaaaagataaatactttaatgtcaaacaccataaaaggtgtgcattacaatattagatcccgcataatttaatttaattaaataatatgagagatcactaaccaattataagacactacatcggtataatgttatccaccttaagataccaaataacaatactctttttactgtaattaatgtaaatagataaacaattttaagttggaacaccctttaatttctgtaatttttttattgatgccaaaactgtacaagtaattagggtaaacccccccagaacaactaattgcaaaacaaaagggaaatccaaaaaggctcacaataaaagagcactccaaacacgtaaactatactcaataaccaaaatcaatcaatatctacagttttagttttagaaggaatgaattagccaatccttttatgtactataccctttacattcttaaacatgatttctcttctaattagaattaacatatctacctcttcaataaggtatactttcttgaacttggacagcttgcttttagtcacccatctcataagttgaagcaaattatcagctctagaattccaacccaaccaaactttgatgtgagtaagacaataggcactaaaatcacctaaaccataactactcaagaatttcatcataggaatcacacaaaatacagttactatttgaaatgatgcccaaatgtttcaagctattccacacaatttcgtc

SEQ ID NO: 56582 - DNA, 719 bp, Cannabis sativa
tcatcttgtccccggtgtaatcgagaagcagaatcaattgcccattgcattgtaggttgcaattttgtctctgcctgctggcggttttctggtctgtcacatgacagcattggcaactcatcttttggtgattggtttcagcaacagttccaacgatggaacaatggagataggcaaatgggtgccatgctttgttgggctatttggcaagacagaaataataaagtttggaatgataagtctgggtcggtcaaaaatgttgtggctttagcaagaactaatcttgaacagtggctatttgctcaagagaaaaacttttcgcccttgtctttctcggttgggaatgatgaaggggatgagcaatggtgtgcccctcatgttgattattataagattaatgttgatgctgcaacctttagtgacaaacacagattcggctttggttgggttcttcgtgatgctaaaggctatgtcattcaagctagatcgggttcaaggcatggggatgtggagccgggtttcgccgaggctcttggattgaaggaggttcttagttggataaagacctcaaaaacttctctctaatgttacggtgggagacggacacagccttgtcacggtccaagctcttcggagttcagtgattatggcctctccgtttggtaattgcattgaggagtgcaaaggtcttctttctagtttgaacaatgttaattttc

SEQ ID NO: 56583 - DNA, 2161 bp, Cannabis sativa
gtactcaacctccaactttttgccatcgctaaacatttttgttatagtgttttgtttgcttctcctatgagtatttttctatgttggttattcaggatcacctgtaatgaccgcttagatttattttagaaattaacagataattaggatttaattatgaaattagattattaattatgatttttcattttatggagatttatttgaattcagggtgtattgtttatcctatatatggaattttattttttgcatggtttgtgcccggcaacatcaaaacgcggggtttggccattagaatcacattttagtatttagtagtagtggggtaagttagttagacattaggaatgttgggaattattcgatgcagtagaatgactaaaatacccctaagtgagttagaagttttttttttttggttatgtgagggtgaggggtaggggtaagggtaaaagtaaaatagtctttttggccatttaatcccttgtcttttagtgaactttatttaagtgttataatctgaagatattctttaatttatttagatatacattaggtttaccttttagcctaaaattagaaaattaaaaagaaaatagccttctctctcttcactccctctatctctctcgaattccttggagaaccagcagcaattggtgtttctttagcttgtttctagggattttagttggttcatggtgaatccattgaaggtaaccactctagcaccttttcccttggttttcttaagttttaagttcaggtttttgcttgattttgtgagttagggttctgcagctcttagggttgtttgaatttgcattttgaggttaaattaaggttatttatgttggattgagctggttttacatttgtttgtgctggttgagcaaggtttgagtttatgaactcaagctttgctctgtaatggtaatttatgattttggatatgtggaggtgttttattgctatgtttatattctttaaggtgtaaatagcaggtctggaagtttgtatgaagtttggggttgaattgaatggtttgggaagtttttggtgtgtactgcattgaaccggtcggctggtttagggggacctgtagacactagtcaaccggttggtccctaggaaaccccacagatgtagaattctagttggggaaccagtataccggttggcgtattttagggaaccctagtttttctcattttgacgatatttagagtattgccatgttatccatcgataaggaaacttttagtttcaagtttaagtccctgaaaagtgatttagcgtgtcactcatcagttttacgaataatttgaatgaattaggggcttgtaaatcgttgagtagttgttccactcaggttggccggcacacctaaacccggaaacgaggtaagattagtataatgatatccatatgtgtttacatgtttagtgtacatatttattaagcctattagattacaccgatagcggtatcagtatacgtagagttatattggatactgataaatgtatgtttggctcaaatactaatcggcgttatcacattagtacagctagagtatgactagcctaccgagtataggctgatattatggtcgatagtattgtcatacaaatgttttagactcaatatcgtgttggacacagcaatagggttatggtttggtgtatgggcgccgactataatacgggttattgctatgttattgattatgcttttcttacagagtttatcgactcagagatattgtttgcatgtgtaggtaagggcaaggctaaggttgagcaaccgtgagagcgagcagatgaagattgtacatgccaaggaggttaggcctgaagcgtacagtcttccggacagttgggtgtattttgaatagtcgctagacggcaacttttgtactatgcattatgaaacttttgtcaatattttgtaaaacgggatcccaatttaatgtaagtatgttattttgatagttaaaaaaaatttcttaaatattcatgatctttaataaactcgttgattaccaatgagctgaacaattaagttaaaaatcacattaacacgcctaagctagtaaggtgttataatttggtatcagagccgccaggttgtctttcgaagattgtcacgacatgta

SEQ ID NO: 56584 - DNA, 556 bp, Cannabis sativa
gtttgaccaaaaaagtgcggattaaatcggatgaacacccctattaataataacataatataaattaatagattattgatatattggaaatgttttttacttattattttttatttaatttttattaatattgtgagtaaaaaatttaaataaccgcttgcgaagcgcggtttgtttcctagttctttattaaaactcttgattaaaaaaataatgataaataaaaaaactagcttctccctgtttcttatataaaatataattttttttttttttaagcaatcgtaactataattttgttattgaaaagcataaaaaagttgagagctaagaacgggtgattctgtgggtcccacctatagcaatagaagctgttgtaagaagggtaatcactaaactccttcaccattcatcaacgctcctattttactttccttctaatcatacacatggcatactattagtagctccttgacagacaaaacctatacatgttggtaactttatcatatttacagtcgttgcgagtcttaccctctccttgctcccctactca

SEQ ID NO: 56585 - DNA, 721 bp, Cannabis sativa
accctttattgtctatgaaaaaacttaccttatcaataggaggcagagcattacttcttaagcatggaaattttatacctggaatccaaggatcctgaagagttctgatagagcagccattgccaaccttccacagcaaacccctaataagaaggtctcttccccaaaggagactagaccaagtatatgagggagagtgacctaacttagcctcaagaaaaccatttagtctaaaatattttgcttttaaaatgttggccaggagggaatttggatttgagaaaacacgccaagtttgtttagcaggcatggcctgattatgggaaataagggatctgaaacctagaccaccaaagaatttagaagagcaaagagttcgccaatttttcatattttatatcctttccccattgatccccaccaaaattgagccattaatctttcgattttgtgacagattgaggtcgggagtttgaaacaagacattgtataagagggaatggcctgtatgacagcttttaagagcacttccttaacagctttggaaaacaacttgccattccagatagagagttgggagctgactttctgaagaaggaaatcgaaattacatttctttgaacgcccaaaacattgaggaactccaaggtacttactgatgaaaggccgcgattcaagccctaaggaatcaaaaaagtaagtagaaatattcgtaggagta

SEQ ID NO: 56586 - DNA, 907 bp, Cannabis sativa
gcaaggatttttgtcttgtcccatttcacggtggatcactactttatatacaaagcaagtgtccgttcgtttacacagaaattgaattccttatcaatctgtttatgcattgaattacaataattaaactaaaaaaacgtaaacataataaatgaagaacagtttcagcttaattcactaaatatatacctgtaagatatataaaaaaaattaggaattaggtaaaatttgtgttgtaattgtaggagcatttttaatttttttggcacctaaaaagattataattaaaaatataaggctttatattataattataacagagatcttaattatcttgttaaaaaattaaaataatttatagtgttaaaactaaaaatttaattaaataagtaattatatatagataaatctttcttaatgcagttggtactgaaaaaaaggggtggcaatggaagaagaattcaagagaatggtttgtgagtttcaattttttactacaaagtattcaatttatcatggttataaactcattcaacctgaggatccaaacttcattggaccaaggaggtttgaggtaggttaaatgtccctaaacattgttttatcctttagttagttgtccaaaatcacttaaagactagagagaagagaggttgcatcggcttaagtcggtgtaagattactcttgtcttctctatggtacaagggtgcggaatcggttaatcacctcttttatgattgtaagaagatcttaatagacattaaaaatgacttaattggagggtttcagctatttcgcttcaccagtttgtgaagtggattgaaagggcaaaagaaaaagtaagtttaaaagggtttttttcagcatgtttaggtgcattgcatttactatatttggcaagccaga

SEQ ID NO: 56587 - DNA, 1503 bp, Cannabis sativa
  modified_base (888)..(892): a, c, t, g, unknown or other
ataatatatatatattaattgtatttttgttggtttgtttgtaacacttgattgtttgtgtatttattttcatgatgttttattctgtttttattacttggcaatgctattattttaattatttcaaacttttagttgtattacacttgtgatgattgcatgtttatgaagtatttaacttaaataaattgtgatatttaatttaaacatatttttctttatatttttgagttaatattaaaatttaggtgcgtaatttgatatttaagtaaaaaatcgatccaatccacttagtaattaaattagattgaattttgaagtctaattaaattgaatcagatgatgattttttaaacctaattactaattagagtagatcgtatgatgagaaaaaaattaggttagatcgaatgccactcataattatttcccactctacttattttcccatttgaacggttgaatataataaacttattacacatatctactatagtgtcactagtgagataataaaaccaaaaacaaagttggtagaaaccaaaataaatgaatatactgatatttaatatatttgttgactaatcaagtctccttaataaaaagaagaagagaaaccaagatagacaacaataatgtcaataattgagagagtctgtcctacttgcatgttttattatttagtccttatcttgattgatgattctttttttcttcttccatgattatggtccttacaatctaatttattatctgtttatgtcttctaaagttcgaaaatattatgacttctaacattttccacaaacattatctttttcgtgtatgttatattggtagagaaaaaaaaataaaaatataataaaattactttatatattatttttnnnnnttttttaaaaaaatttatggtttgagttgcttcggttgtttatctagtaatttacaatttaagttgttctgttagttgctatagatagttctgtataaaattatgtaaaaatatatatatataaaaaaaatagtgtaaaaataaaaaataaaaaaaaaatcttaaaaatatataagatgagagtggcaaactcaaggctggcgtgagattaagcggactttaggaaaataaaaattattggatcatctagttaaaatatatgtgatatttttaagaactactaaaaatatatatttttttaaaaaaaaaaaaaaattgttggagcccttgaactgggtgggtcttaggcgcggacttagttcgccttacctcaagcccgacttggtaaactttaagccttatttttcttttttttttttttaaatatcaaaatataatatttatttttttatttattttcagaaagtagtctcagggggataagttgaaaaatacatcttttttgtatccattaatcaaaaatacctagggatgtaaacgaggcagggcgggtgcggggattgctcccccacccccatacccgcttcttaaattcaccccatacccgcccc

SEQ ID NO: 56588 - DNA, 1630 bp, Cannabis sativa
  modified_base (159)..(160): a, c, t, g, unknown or other
ccgaagcattaaaagttaagaatcctatatgctatagtgactcgcaactaattgtgaatcaagttctaggcgagtaccaggagaaaggattaaagatggaaaaatatttagagaagcttcagaagaacttggagaagtttaattattttaagattgaannaattccaagagaacataactcaaacgctgatgcactggcaaagctggcctcgcaaaatgaacttgataagttaaatctagtatcggtcaaagttttgaacgaccttaatatatgtgaaaacgaagaggttgatattatagatgccttgccgacgtggatgacacctatactcaaatatctaatcggcagagaacttcaaacagacaaaacgagacacgcaaactcttgtattcagtacctcgctatacaatagtctagggaaaatggtataggaggggttattcaatgcctctcttacggtgtgtactgctaacagaagcaaacaaaataatcaaagaaatttacaaaggcttttgtggagatcacgcaggttggcaaagcttatcaaagaaaattatctgtcaaggatactattggccaacaatcaacaaagacacatgaatttgtcaagaggtgcgacaaatgtcaaaggttttcacatatacctcgtgtaccaccaggaaaactaaggatgatgacctcgtcctacccatttgcaatatgaggcatagatcttattggggggcattacccacagggcgaggaggcgcaaagtatgcattagtggcagtcgacttcttcacaaaatggacagtggctgaacctctagtttccataacttgtaaaaaggttcttgattttgttgtcaagaaaatactttgaagatttgcaatacccattaaaatagtatctggcaatggaactaagtttgacaacgagctgtttattgagttctgtgaaaggaataaaattatcaagagcttctcgtcggtttcaagaccccaagcaaatggacaagttgaagctgttaataaaacattaaaagatactattaaaaagaagttggacgctgctaaaggaagatgggtagattaatttccacaagtactttggcctcacagaacaacagagaaaacagctacatggcacactcaattctcgttagcatttggctcggaggcaatgctacccgtagaggttaatattgcaacccataggcgtgaattttataatcaagtagaaaaccaagagtttacaaacttgtccttggacttacttgaagaaagacgtaatgagtcacgaataactaacgcagcctatcaacatcgaatcacaagatacttcaataaaagagttaagaaaagactctttaatattggagatttggtgttaagatgagtatttgcaaatacacgagatccatttgctggagtgtttaacccaaactgggaagttccctatgttattgaagcagtagtgggaaccggggtttataaattggctcgacttaatggctcgctgataaaaaactactggaaaaatgaacatttacgatcttattactagtaaagttaaaatgtaaatgctgtatttatctctgtaatatgtaaattcttattattaataaagttaaagtttgttcaagtaatt

SEQ ID NO: 56589 - DNA, 1976 bp, Cannabis sativa
tttggtgatgaaaactctagctttttccatgctagtgttaagaaaaggaaagagcaaaatcgaattaccacctatgtctctaatggtaagatctatgatgattatgatagtgttatttctcattatctctctcattttagaactttcatgggggctggtagttctgcaactatgaagctgaatccagagagattatcttatgggaagaagcttgatatgcaacaacaaattcagcttgtgaaaccgtttacaaagaaggatgtcaaagaagcaatgttcagtataaacaagatcaaaagtccaggtccggatggttatggagcaggttttttcaaggatctctggaatgagattggggaagaaatttcagtggctatcctttctttttttgacaaaggtatcattcctgctgatttaaataaaactaccatatctttggtccctaaagtagattcttcggcctctgctatagactatagaccaattgcttgctgcaacactttatacaagtgtatttctaaaatgatttgctctagattaagtgaggtgttaccagatctaattcatagcaaccaaggtgccttcgtgaggaaaaggagtcttgcccacaatgttttaatatttcaagacttacttaaaggctatacaaggaaacacatctcggctaggtgtctaatgaaggtggatctaagcaaagcctatgataccgttgattgggagttcattatggatctacttaaaggcctttgcttccctacaaaattcattaagtggattatggtttgtctatgtggcacctcttacactttaatgctgaatgggagacttcatgggactttccaaggaaaaaaagggcttagacaaggggatcccatctcccctctgctctttgttcttgtgatggagtacctcactcgtttgcttatccatgcctcaaactccaaggggtttggataccacccaatgtgcaaatctttgaaactgacgaacttgtgttttgcagatgacctggtaattttttgcaagggtaatgcctcttccttgaacatcactcaacatgcttttactgagttttgtaatgccactggcttaacagccaatgctactaaatcctccatttattttggaggtgtttctgatgatacaaaaaagctcttgaaaggaatagcaaagatggaagagggctcttttcccttgaaatatttaggggtcaatcttcgaccaactaaatggaaagcgtcggactgtgggggaatcatagacaagattcaaaagaatcttcactgttggagcagtcgacatctttcctttgcaggtaaagctcaactcattaactctgtcttactggggattcgaagctattggatgagcatttttattctgcctcaaaaagttacgaaggagattgacaaactgtgtaggaacttcttatggggtagctctttgaatcagagaaagcttcatttctcttcttgggagaaaatttgcttacctaaaaaccatgggggtattggtgtcagagagagtcagaagtggaatgtagcaatgatggctagatacatatgggcgttgtcctcaagcaagatagtctttggattcgttgggtggatgctgtctatatgaaaggagaagacttttggtcatttaccccttgtcaagatatgagttggtacttcagaaaacttgttaatcttagagataagattgataaacaggctgtttatgatgctggtatctctgggaaattcagaattggtaaattctacaactccttaatctcggctcctcaagtcctctaccacaaggatgtttggcacaagcttaaaatgccaaaacgccgatttattttatggcaagctatcaatgggaacctccagacacgtgacaggctagcaaaggtaattcctctcaactccacaagctgcccggtgtgtgatttgatgcaagagtctcattctcatttgttttttgattgc

SEQ ID NO: 56590 - DNA, 1331 bp, Cannabis sativa
  modified_base (663)..(676): a, c, t, g, unknown or other
tcctggtaaaataattctaacaccattgacataggaagtatttatttacatttcttattttcttttttacttcgcactataagtttacttacttgaccgttagagtgccttcagttggcaccaccccggtatcccaaggtttcacaattattctttatctttgtttcgcaggttgttggtgcccacaaatgttcattctgatcattgtagattttagcatctaaaatttggcacccaccgtggggccctgacaaactgactgtgagcaaggcgatctatcatttacgacactttagatggcagaagaaggagagtttgtcgcccaggatcaacccaatgtcaatgaacaacttgccacaataatggcccagatgtacgagatggctgagtgaactagagttctggagcgagaaaatggaaggaaacttttttaaggaggagaaagaacgcagcatttaggagtgaaaatgccgcaataaaatcacaaatggagtcactaaaggctaccatgacgactcctggtgttactcaaagtcggttctgagttccaagtacacaaatggcaccgctagacttaactccaataagaacagagacccaagtctttgatcaacaaatactcggagggacatcgactccaacgttaggaagtcattctgtcgnnnnnnnnnnnnnncctcaacaatttgaacatactgatgtgcaaacagataggaaaaactatggaggtctaacgaccagccatgtggcctccgatctgcctacggtcagtctccatacaactggcatgcctacggtcagccttcctacaactggcctgcctacagttaacctcccagcgactagcaactttgaggttggaactacaaggtctcctcttgaaggactcccaccatcacaggtaactaccagaaaagttatgctaaactccaatttgattccatcttctattgatgcaggtcataccaccattcatactctaactcaagaggatttgatcaaacgagtgatcgctcaaaggttcgaggggatggaagcaatgatccaacatatcccaggggttttaacaccaataaagaaaagtctgcctagcagtttttccgagtcatcttttgttgatgccattgcactggtcgagatgccaaagaagtttgtgttcccattaatgaggatgtacgacgaaacaaccgatccaaatgatcaaatagctagttataaataaaggatgttcactgctaccatccctcacgagttgcacgagacatgcatgtgtaagggatttgggtcgagcttggctagcccagccttccaatggtatacgaatttaccca

SEQ ID NO: 56591 - DNA, 1256 bp, Cannabis sativa
atttgcaagcttagaatatttgaggaaaaagtaaaaattctacacaattcagggaagaaaaagtgaagttgtaacgtttatattattcttggagattttacttttggtctccaaggaaaaaatgtgtacatggtattggcatttatgccttaaaaaaattgtagtaatcattggtattgttagagctgtaattctactatttctatccacactcattgtgttaaacgcttaagcgagaaacaagtttgatgaaggaaacttcattgcagggaatcgtaagagctcccattggatgatcaaatccaaactcttcttcagcttgacttagcaagttttggaatgatggttggttcaagaatgatatagggactacaaatctcttcattctcttctccccaacatacaccgctaaatacccttttggaacatcttttgtacttgaaaaaggcttgaataagttgcttggcatgaactaagctagcaaagcgaaaacccattgttgtaaaattcttcaaagaaagaaaaagatcagagaatagtttaggatgtgagggcttgtggtgctaaggaacctgttttgatgagtatatataaccaataatgttggtaggacatatgagactcaagagtgaaaaggcaatggggtctggtgaggaggcattagccattgggcaatcacatggtactgtcttcttactcatcacaattttatatattcttgaatatttctttctcttcaattcccaaccccaccacaccaacacagaacacgaaatttgtataaagatgtctaaggcatgccccaatttgaagggtcacacatataattataattgaaatgaaagcagcttttgtttaaaatctttatctgctcatccaagtatcatatcagtaccagctgtacaacttgtactgccattgtctatcttaatagtggcacagaacattatagcttattccttttattaatgggaaaatacacagaaaataatatttatctgaaaagttcttttaatcctgaaaactagaagattcaaatcagtaatctacttttgattgttcatttgaatgattaaatcaacctaattttgtttcttagtttaggagatccattattttgtcatattagaaaaagaaaactaataataatagtaaaaacttacaagagaatggaaggcttgttctgctcttgaatctaatcctcatggtaaataatatgtcaaaaagaatatttcatgtggtatagttcttccaaa

SEQ ID NO: 56592 - DNA, 678 bp, Cannabis sativa
  modified_base (441)..(446): a, c, t, g, unknown or other
ttggatatccaactttttgtaattgaattggattggatcggttcggttcaattggattggattggatgatgcccacccctaatcataaatttatatcattttgagtatctttggcacttagtagaaacgtaaaataaataatgactcaagttataaggcgtgacttgttagtagttttaggtatctttaaattaagaattgggtttaaaataaaacataaaagtcgtaaatctttttcttagctttttaaaatattctaaatcttctcaatcttttcctgtcccttctctcctcacaacaaagagctattagctttttaatagagatcaaatggttgattctcatttattttaattcaaattttgggtggtgaatccttataaggtgttctaccaatctctcaattcctatttggcaattgttctctctaaggtgctcttnnnnnntcccacttggtgagacccaaattttttctttgtgtatccatcttttgagataatgatgatgatgattttattggtgatccaagattgtttaatcttgatgttgttgtgagcctctagttttactaaagaactttgtaatcccatccagtgacggactcaggatttttactttgtgggggcttatttatcataaaaaaatatttataactacattataatcacttttattaaa

SEQ ID NO: 56593 - DNA, 1522 bp, Cannabis sativa
cagaaccttaagacttgcaaggattttgtaggaaataggaactaactggaagggagcaattccgagatggttgaggaagtccttaaagtagtctcgcagagggacaattgctccagcactgatgtgtttgaggctgcaagtgcctatccctatcgagccactcgtactggccttgccactagtcccctcaaatgcttcgcgagtaagtcgtttaggcaggtaacaactaaactcaccagcagctactgatctaacccgacaatttctcttgaattcgatgccagaagtccttaaaaaagctcctacgtagtctccgatggcttgcaccttcgactctattagttcagcctcaaagttgacgttagggtctcggggagtctttgattttcgaggcttggaagtcataattttaaagtccaggtcacctgattcaaaagaaattgtgactctgggtaaaaataaaggcttagccagaggaattgatgataaattgaggggttcaggccaacaagcaaccatctcgtcgtaagaaacgatgtttgccttctgtaatttcttgcaagaagcgtctgtggtgactagaaatgtcatcttgatgggttttcaccaagtgttccctaatttttgcatcatttatctctaatttggatttgggttctgaaattttggatttatggcaagttcactggggcaatttgtttctaaatattctagacgataaacttctaaactagattgggacattgttgcaaaaagaaagcaatcccaattcctggataaaatttatcaaactagaagctagtaaatttgagaaacccaaaagtctacggtctgtctaaaccttaaaatttatccagaaacaactcaaccctaaatcgctaaaaccagataaggagataaaggtgcaaactaagaaagcagtgatcaaacccagaaataagaaataaacaacatgtaagaaaaagaaagaaagaggaatcacttactgtttgaagtcagtttctggtgcggtgaatgaaatcgacagtacgacgaatggtgtggtgatctctctgaatgcttgaggtcaaaaatcaaatcggatgaaactcgcaagaagtatgtcaaagacagagatggcatgcaaagtttcaaaaatatatgggtatgtttttttttgcagaaaagctcaaaaaatttcaagaatttttgaaatggcaaagacattgaaaggtggttccttttttcattttatacaattaggtttatctccgtcagattaaggagacaattgatccaacgggtaaaatttaaaaggaagtgaaagagatggttattaaatgttgatctgcctcgaagctacaaaaatgccaaaatcagaggacatgcgttttttcaaaatggatcatgacaaaaataccctctgtaatcatttaaaaagcactttctctgaaaatgactttttaatggcaaattgttatacccgaaattcagttggcacttcagaggatgatatgtgtcaaccttggagaatacgaatcaa

SEQ ID NO: 56594 - DNA, 835 bp, Cannabis sativa
taataaatgatatgagaaccgctaactaattataaaacgagtgagatttagcattttaagtaaagttattaagttgaagtttgtttgtgtatttagactgaaaagtggaaaccatttgattgaaattggcagctagattatgcagcaagggataaggatgcaattcgtgtgttgaagtgctatgataacattgtggtggctgtcaatgacatcttatccacaatttcatccatttagttattaccatattcatcatcaattggtaggaattttgggtttaattgaaacaattatacaaacaatatggtaacatttgatatagaaatatatttttttggcttatgtggttgccttgcctatgagtatgagactatgaccctttaatttgccaacttttctaagggtgatactataagctttattatttttttctcttttttaagtactaagtactatgtctatatgtttcaaaaaaaaaaagtactatgtctatatacatcgaaatattacacccggaatatttggttaagacgagagccacaactttataaaaatactatcatattttttcgagggcatttataataatttaggatgcatttagtaattttatttaattaaaaacataaaaatatttttcaaaaacatattttataaaatttttacttttcaatttttaattaaaaatcaaaattattaatattttgaacccgaacctgaatctcaatatagactccgaccccaatcccttacctcaatccaaaccccaaatccaacctcagacttagaccctaactctacttaaattaaatcaataaataaaaataaaaataaa

SEQ ID NO: 56595 - DNA, 1065 bp, Cannabis sativa
  modified_base (930)..(937): a, c, t, g, unknown or other
ttttttttaattagatagaaatttaaaaaaaattttctaattttacccatacatgggtaatacccattaagagtgcacccatatatataaacatgttaatttatatagggagatgattttgtcccgttaatacatttaacagtatatattctgttgatgtaccctgagtgttagatggattaattatttaatttctgagggctggggttaatatagggtatttagaatgaaatatattggtaactggttcattttttgtaataaaaaattaataaattttaaaaagtaaaaattgacatgaccaccatcagtcttttttgattgaggcaataccacgtgtcatcctttgattagctgaaaaatgagagctaagtggaatttttgggttgaagacgaagcttagttgcgcctcaggcgcgtgcgtgacatgcccagaccacacggcgttgtgcgctgcacatgcgcgtgggccgggcttgggggaaaaggagtagttgctcctggtgtcttctgccgcacgaacctggaggtgccacatggaacctatgtcggctgggagaggatttagggcacatttgggcttttgtcttttgtgatgttattggatctcaaaaatactaatttttatagtttttgggccacattttttagaaccttttattctttttcttttacaaatgctattcttctcaataaaacacaaatataattaatttcaaacaaaatttttccaacataatatatatcacattaattttaatgaaaatatttatttaaaatctaattaatttgtaattctttgaataaaaacaagagaaacttacaaaaatactagaattttggttaacttttacaaaaatactgtagcatggaattttttaaaaaaaatattgtgtttttataaaataacagtagaacacaaaacagaannnnnnnnaacaacagtggaacaacaaaaaataaccgtaaaacaacagtgaaaatttaatgcaatactaaattatttaaggtaaaaaaaaaaaaaaaccaatcttataaggtgaaaataaaatatttctatgataa

SEQ ID NO: 56596 - DNA, 1051 bp, Cannabis sativa
  modified_base (28)..(28): a, c, t, g, unknown or other
aggtgtgttctgacaggttggcgcggtntagtcacaaccgggtatttcgggccgagccggttttgggcccgaaatgcaattgggattgagttattggcattttaattatgtatgagaaatctgaaatttaattggagttatttatgtgtgaattgtcataaatgcccttgtatgtatgaatatgtgagaaatggccctatgggcaatttggtcttttgacccttaatttacaaataataaaagagctgaattttaagtaaatgaaaaggaaatttttggtttattcctcctcttattcgaaccctctccctctcaaaccttctttgatttttccaaattattttggtagaaattgcttgaaacttgggtattgattgaagcttgttgtggggggatctttgagcttgcttttggtgtatttgaggtagttttacaacttttatttttaagttttgttgctgaattttattgattaaaagcatgaattaattgaagtgctcttgaagttgcatgtttatggttttggtattaaattctggtaaattgattgtgaatagcatgatttagttgtgatttatgttgttgagcatgaaatgtgattttagggtattttctaggtttgaactcatgttatttttggtattttggtgctgaaaattgattgagttgtttgggtttgaagctctagttcaagagcttgaattttgttaagtttggagcttaattttatgcttttgggtaatctaattttaggggtttaatgttagcttttgatgcatgaaatatgttattttgaccctctaatatttgataccaacttaactttgtaatttgaaggtttggttgtgatttgagatgaaatagttttgttttggttgctgaaattagaggtgttcttggctgatttctggtttggaacctaggtgccgcggcatggtctgggcatgtcgcatcacggcccacttgttggaacctgggagttagtcccaggtgccgcggcatggcttttgtatgccgcggcccgcctttgaatttttgggcagttttgagt

SEQ ID NO: 56597 - DNA, 2328 bp, Cannabis sativa
  modified_base (791)..(799): a, c, t, g, unknown or other
  modified_base (943)..(955): a, c, t, g, unknown or other
gagtgctttatgaagtactgagatcatatgtatggtaatgcgactaagattatgtgtttatgatgatgtatgattgaaagtgctttatgaagcactaagattgtgtgactatgtattgagtaaatatttgcttattgtaataatgaaatggttgcctatgatattcttataatgcatatgatatatgtttgtatagatgtaaaattatatatgcatgtcgaatcatgagtatatttattttaatgcattgtggtaatttgtattttacattgcttccggttttgtagcttttcttgctgagtctttgtgactcacaggtgcttcgtggtgcaggtaaggagaataagctctgtgttcggccatgaatctgaaattttccagcaatgtacatatcattcgtggtgtcttggcttccaggaaacaggaacaacctttatctatgtttgaaaatgtaacttttcttttgtaatagcagttttgtaacttagtgtaaaatgttataaacaggggattctcgtattatggtggtattttgaataatagttgtattccagtttaattaaaagtctttaatcaaaccaaacttttccaaactaatagattagtctaagtaagtttgtaaaagcacacatgtggcgtccccgtgtgttggggctttacaccatcaatagaagattagaagtgatttgaagtctacatattattttcatgattaagctttaatatacaatttctgataaatcttgaacatatagttattcacaattatagtgatgtcatcacagtgaaannnnnnnnngattatatgcttcaaagtttagtctcatgatttatcggtgcactggatttatactggcgtgatgatcaactataaagtttacttacacttggataagtggtatgtcctttccagggcattggtaaagtatgctagtatcagatnnnnnnnnnnnnnattagactggaccgatattgaacttggataagataagtcaatatcacaaagggtgcatttgtttattttaagattcagatgtctgaatctgaatgcacatataaaaaataagatattttatctgaatctgaatattaaaatatttagactgtttgttttttcctcatttaaatgtatttttcaaagtttaattatacaaataaattgattatattaaattgtatttgaaaaaaaaattatacaactattcaaatacccaaaaataaaaagaaatcaaatagttaaatattatatatctttatgaaaccacataaaaactgaataagattggaatgaaaaattagaaagaaaaaaaatcaaaagtctataatacacctctaaagggatttttttggtagaatagtatttgagaaagttttttagtagactccctatctgttttggcattcaagaaatttttttagtcatttttcctttcatgatcacgtacgttgcaactatataagatcacttgtaagttttcagaaaattttaaatagtttaccatgctaaaaatgagattcaaatattttattgcacgtatgactgttttctttaacgcgtaaaaaataactgttcaaaatttatgtttgtcactataaactattaagatttttttgagaaattaccagttattcttaataactataagggacgcgattgtaaaaaaaaattacaaaagctctcttgaataccataaaaagaggtacactaccaaactaattttttaaaagagatgtaatgtatatgttttcttataaatagctataatatatatatatatatattatactttttgatggaatataatatacagtatatatataactttcaattttttaaaaatgatgacataaaagaaaagagataataataataatcataatgaaaggctgactttgattgttgattgatgtttttgtggcatagaggtagatggaaaggaaaatactaaagtaaaaaaaaataggagagatgtttatctctgaaaaaatttatgtgatgtatacaaaaatctgattcggtaagagatgataagtggtaaaagtgattgaaaaaaaaaacaaatgcccttaataatttaagatctatacctctattaagtccaaacaaatggacccttagttgatcttagatctatagatcttaatcctgagatggttaggttcgagcttaactatattatttgtgttctttaacttgttcgttaaatttgaccaaatggatccgtccaatacttacatcttgggaacatgataaaagcgctaatcatagatacataatctatagcttctataatgacatagaagtgaaatgataattttctttgagct

SEQ ID NO: 56598 - DNA, 1550 bp, Cannabis sativa
ttatggttaagaactataagagtactggtcgaaactagcatatcgacattaagtatttagccataaagaggcatgataagtggtcattcatcatgcaatattaaattgagtgatcgcacatccttgactaagggtatgtcgcaatataaagatcgtaaaataaatatgagattcagttacccatctgtagatttcataaattattattttgcccttaagaatttatttttcacagaaattaattctcacttaaatttactcatcaaataaaatattcccctatacagtgttatatagaagtgactcggggaccatgaatctatatttcaaagctccaataaacacttgattattatcgatctcatcattagaataatctaatttatttactctattattactcccctataaatataaaattgtactcttgtacaatataaaattatatttacagaattcttataatttgtagtccattgaaataatcaatataagtagtttgccctccaataatcaatataagtagttcataattcgagttggtcaaaattactattttacccttctaattatctcttgactccttatgtaccattaattcaatgtaaatagttaatttatgttatagatttggattggatccaactgttagcatttccaaatttataaaaaatatttgatctgttaggaaagtttacatttcacttttgtataacatgttctcaaccactcatgttattgagctcctaaaatataaattgtaagaatcaccttatctgagaaactttaacatgtgaatgaaagaactcaatgaacacaaacaggagttcatgtatactcataattaaggctgatcttctaatgatcatcattgtaatatgaataactctttcatggtaaacgatatgttaatgaaagatgtaattacatatcggtccagttgtgtataatctaattatacatagcacatttactacatatctatcctcatatgtgattcgaattaaaatcatacactagaagtatagtgtatagtaaatcatacttactagttccatgttaaagattttcattgctttaatacactaccgacttattttattcatatcgttaattatcttgtatgtccttataagattataccctctccatatgaataaggaattatcatatgtttaatagttacactatgtttattaaagtatcatttatcttataattatattttatatgtcctttaatttattatccattaaatacttacttttaggagataaattctaacagaattacatctttcgtgcacagttttcctagtttggacctagatgtgtttatcttcgagattgactactccttcgtctatcactaacattctccgaaatcaacctgtgagaatgagtttcttgccttggcactcttcgagaaaatatgtatggcatgcaacttttggtcaatctatgggcatctctgagaggtggatgtctgattagagatgtaaggtagaaaattcgcgatggaggttgtaacgtccccgcttcaagcctcca

SEQ ID NO: 56599 - DNA, 1576 bp, Cannabis sativa
aaagaaagacagagaattatatatgattggttagtcggagctcgttctgcatagtccacttttgaaaaagatttgtgattagttttattcgggttggatcactcatttatatagaaagcaagtgatccctcaaattacatagccaatcagacatgaccgttacatcattaattacattcaatgaagataaaaccattcatattcttaatcacatgaactcgcgggctccccgatgttactcgcatatgaggtctttagactattcagatgcgtataaaacctcttggggttcttacaaagtagaacacctgcgactatactggttgagtattggacattcatgtactgacaacatagaacttgcgagttctaaacgagttgtcgtgcagattaatcgttcacatcatatgctcgtaaagatgcaatctctacatagggcacagaggagaaacatttggtcatcacacataattgatacatgcgcgactatgctaacttctctccatcatgctttctttactatgatatgtatagtgcatgactagatcttatctcggttgcatattcttacaagtttcgatcatgctagatagccttattgggactgctagtgacacgtcatcctcttccaactgaaaattagatctacgtatcaatcatatacgagattgtgctcgtatttttaaataaaaaattcatcatataacagtatatactaacaaatgaataattccttcaatcagattcaaaatccaacacatagttatatatgtatatatgtatatgtgtatgtatatgtatatgtatgaggtggtggttgtggtgtttaatttcatcctattaattgtcacggttcattttccaaatgtatatctatgactgtatgcatgtatgccctatatcaattattgtgtaaggattgtataccattaattaaacaaaattaaggattgtcatgagctacacgattacaatatagacatataactatttcttttcattttttttttaaaaaaagaaaggtaattaattaatgagtaacacaaaactgtaaagaatacaaaaaacacaaactattaaatcgatggatatgtagatctgaactttcccacaaccaaagaaattaagtcaaaaccggacaaagacaaaaagccaaagaaccatattgagaaagtcaagtactcatggggtgataataaacactattatatatttatatatatacaataatatttaggatggtttgtgagaaaaatcttataattgatgagtttttggtcacgggtaagaggaggtacccacccacccaccaccaagtatatgatcaatgcttgtgaatataaatatgagtatatatgaccacaaagagaaggagtgtttgttcagagacagctataagtaatgtcactataatatattcaatgatatatatatgttactttttgatgactcactctccggccctcacataaatgtatacatttaattataaggtttgaaaaaaattcttatcctcatatataatgtatattgatttacatataataccattattattaagacgtttgatccttaa

SEQ ID NO: 56600 - DNA, 1807 bp, Cannabis sativa
ttagtatccctaactcgaaattgctaggttcggatggctatggctatggctctggttttttcaaggcagtttggactaatataggtgctaaaatatgtggagcaattaatgagttttttacttcaggtaatatccccttggaattgcatagcacaatgatatctctcattcctaaagtttataatccttctaaggcagttgactataggctaattgcttgttgcacaactctatacaaatgcatctctaagctcatgtgtaacagattggctatggttctgcctagtattatcaaccaaaaccaaggtgcatttgttcaagagaggtccattgctcataatgtgatgattcttcaagatgtgttgaagaattatagaaggaagaatacctcacctagatgtgctatgaaaatagacattagcaaggcttatgacacggttgactgggactttcttgaggattttcttaatgccttcaatttgccaaggacttttgtcaatagagtcatgatttgtgttaggaatacttcctactctttacttatgaatggccgtgtgcagggtagcttcaaaggggccaaaggtcttcgacaaggagaccccatttctcctctgttgtttgttctaatcattgagtaccttactcggcttttacaactaggtgctcatgactttaactataggtatcatctcttatgtaaaagtttaaagcttattaacttgtattttgcggatgatttgataatattgagcaagggaatgagacaatctttacgtattatcaaagtagttttggatgatttcagtacaactacatggttgttcattaatactcaaaaatctcatatctactttggtggggtagatagtagagaaaaaattgatattttagcggatatgtctctcattgagagggattttcctctaaagtatcttggggtgcccttgagacctacaaaatgaaagatagaagattgtgggattatcattaccaaaatcaaacaacggctccataattgggcaacaagacacctgtcttttgccggtagagctcaattgattcacacagtcttgcttggcctcatgagtttggatgagcatctttattctccctcaaagtgttactaaggaagtggaaaattatgtaggggtttctttggggaagtaaaggtgatatgagcacatgacctcttgggagaaggtttgtcttcctaagtcttatggtggcattgatttcaaagaaggatctaagtggaatcatgcaatgatttcaaagtatgtttgggaaatcatggagaaaaaagatcttctttgggttaaatgggtgaacctaatttacctcaaagatgaatctttctggtcctacaaccaaaaacctgacactagctggtactggaaaaagttatgcaggctgagattaaaactttcgagggatgcgattatgagggccggtaagaatggtaagtttaaagctgccactctttataatagtcttcttattcagcacagggacccttatagtaaagccatatggagctttttgagtttgctaaagcatcggtttattctttggcaaattgtcagttctcaccttctcactcgtgacaatttgagcaagtttcatatccctcttgagtcacggaattgtcctgtttgtgaagatcagttggaatcacatgaccacctctttttcaggtgtgccttctctcgaaccagtagggttcctgctataagctaagcatcatcaagatcaaagacaacttgagcaatgttctcacaagaatcagcacgacttacgactctgcagc

SEQ ID NO: 56601 - DNA, 615 bp, Cannabis sativa
atgattgttaagaactaatgtaattcctttcctaccataaacctaaaattcaatcaacttatatagttgacaaggagtcacgagaggaaaataaaatgaagaaatcttcatggatatttaagggtcgcattcattgatgaaatagtgagtctttacctcaaagagacattgaccaaatgactataaaagatagtaaaattagctaaataatttattgagcgaccattgtaaaagatagtggcttcttggtctcatcaatcactggaaatatggtcacttgaatcgaccttaaaatggaagatcagtttggaaacaatagtgtatatatattattatattatacttttgtgtgattttaatcttttggcagaaagaaattaacctcaaaaaagtgagcaatggatctccaagattatggtgcttctttagtagaactgcattttggctgtcattccctgctaacctatctcacatggatgtaatatgctgttatttgttatggataattaaactattttagcagtctgaatgatgtacagtaagttgtttttgttcctatgagcacacaagtgaaaggttctcgtcatatacctctatcaatattctagttgtagt

SEQ ID NO: 56602 - DNA, 978 bp, Cannabis sativa
taatatgatcaagattattgtactaaatgcaatattgaagagtgatgagtttttgatttaatgtaacaatattatagtggtctgctcaccagcaaacatgcttaaacaatgtttctgagacacttcaaaatcagcttatatgacagattgtgtttgtgaagaagtaatttctacaaacctttctattcaaaagtggaccatgtacttatacttgtataactatgataaccacctataatggacatttcataattgaaagttttagttggtaggccaaccataacacaacacataccacttattacataatgctattatagtaaactcaatttttcttctattcaatctcttatctttacacttttatttttacctttttctattcaaggaaaaaatgattagtgctcaaaaagtagcacctaatcattgatcaactcttattataggcttagtatatatcgaatactcgttcacatgctgctatactatttattctgaatccctattatctctttttactggcatttcttcctaatcacggatgcaaatttctttcctacccttttactagctcaaacaattccgagtccacttatcaattataggcttcttatatctcctccaaattgaaaaggtgatgcaccagttcaacccgtataagataatgggctgacccaattataaataacgggtcggcccgagtaaagcatgccacgagtccaagcacagcacaaaatatgaactacgagccatgtcaaatttactttttaaaatattggcacaaaacggtacaacccatattattacgagctttttaaagtatgagttacggtataatccctaccactacaccacaagtttgcttcttcaatataattctttttccattataaaacagaatattaatcataatatctttctacagtcttgacctattaaataatatacaaagtgggttacaataaataatctaatcac

SEQ ID NO: 56603 - DNA, 937 bp, Cannabis sativa
gttgaaccttgcttttatttggaataagttaatattccaaacattccgccattctttggttaacttgtttggacagattgaagactagaggaggcatgcataactttggtatgactatgaacccccattgtagtgtttcccatttgttctttaattgtattttgagtgtcttgcacaaataaaaacttagaattgggttggaggacccgagaaactaatatgcatagattgttgagatgctttaggcgatggagatcatggtttatccaaattttccaggaacttttttgtggctgctctagcagctttgatattatcagatttggtgggctcggaatgggccgggctttttgggatttaggagttcatagagttgattatataatgaaccaagttaaaagagatgttttagctcaaattgattaatcttttttgaatgaaaaaacttgtatagataatagaaattggatccatactttacatgtataggtgacttgctgccatatgtatttgtttgtgcagtttcctctatgctaggatctgatattggtgttgtatttggttggtagcaataaaatttctcacttaattacttgccgaaaaataagagagaaaaaaaaatcgattagttttgtacttgtctgtcattgtcttgtacaatgtttagtttctgattcattgagtgttgacttagagaactgaaagactacttttattcatccgtgagtgtaattaaggccacctactcattttaattctatgcgtgacttagttcttgataccataaaattaagataaaattgataaaaatcatacattataatttcttacatacatacacatatatttatgtatgagaacatatataggtatatatttatatataatataatatgaacaatatttgaaaatattgtttagaggccaggcaggtaca

SEQ ID NO: 56604 - DNA, 1242 bp, Cannabis sativa
tttaaaattaaaaaataaaatgattatagaacacatttttgtttctcaaaaattttactttcatttttgtgattaaaaaatttaaaaacaaaagtactatgtcacctataatttccacttcaaaacttttgtttactttaataaactatttttaaaaaagaaaaaggggtacaaaaaaaacttatgctcgctaattgcttctgcatttcatataagttgtattaccaaaaaggttcttcagcttgatcaaaaaaaaaaaaaaaaaaaggttcttcagctatatattcttctttcatgcatacgctcaaagttaataagtttgtttctaagtacaaccttcatatttaaatgtgtattcataatctcacattacttttttcatgaatcaatggttatcatactctcaacatgcaaattcaatgaacaaatttctggtatttatgcaaattcattcaaaacgacactacaggcaattaccaaaacctaaacaaaagaatgagactaaaaactgattctaaacataacttaactatcactgtttttatttttttttaaaagcaaaaaaggttttgaaagttgaggagaggcgttttctcttggaaccgcaaggaataagccttgagaccttaacaataataataataaaaattcataacaaacaagacagaattccatatcaaagtaaaagaaaataaaactagttataagtctataaaacataaaccaatttattaaatctccaataagtcatcattgtgttcacttctacgcatcctaacttaaattaagtaactaaaaacataccaacaaaaaagaataaaaaaaaaaatcagccacttagaaacagaaaatgaaaggaaaattttaaaaataaaataaaatattaatcaagaaatgaaatgatttacccctctaaaacaaacatcacgagcctaggagttgacttgaaattgagaaataacgttttttaggttttcatttatcttgcctattttatttattagaaatttgctaaaaatagttcaaactaaaggccacatttaagtcattcacaagcctaaaaataaccctgaaaaatagctcataaaaccccaagtgaaaccacaataaaacaatcctaacacacaattaagctgaggtgtgtatctcatgtgcctctcacctcatgcacctcagtacgcctcacctgaggtgtgtgctttgtcaatgtgaggtgtatgcctcaatggcaacagcagaggc

SEQ ID NO: 56605 - DNA, 721 bp, Cannabis sativa
aattatggtaaaagaaaaagtaaaatagtggagtagaagaagcactgtagaaccaaacaaacaaatacgtggtaggcgtcacaaacccaggaatccaatcccacccaattttgacagtttcactcataataataaacagtcgaagttgaaaccttgagcttcgcgccagaaagtgtctatctctcttttctttctttcttttcagctttgcgacgtgtcgtttaggcactccttctccgccgcatcaaatcccgtgcttatcttataaaaaaaaacctcttcttttctccacgtgtcgtctcagggacacacgtgttaacttttttatgagtttttttaattagttggcaacacaacttatcacatacgttacactatatactacactggcagagcagagataaataaggcattgctattgtgactatatgagactgttttctgctccaaaacggcatcgttccgaaacccatttctaacgtcttattcattgcctttcgtctttcgcattcttatcaattggggccagtcgactcagatatatattacaccattattataactattattagtagtagttggtaccccacaaccacacaaagatagattacaattacattacaccaattaattttaatttggtgaccgcagatacaaattgtatgattgtaataattctattatttaaaaaaaaaagggttaattcttaatgtatatatta

SEQ ID NO: 56606 - DNA, 723 bp, Cannabis sativa
ttttttttttttgttggggggggggggtatttttgtggtgaaagtagcttgtttttcattgcaatgtaactaataaattgctgtacttgctattatctgcgctttgattttaattctatttgtgtgcattaccttgaatcttattttgaccctaatctgtgaattactgcagcaattgagggagaaaagacgtgaaaaacgtgcgtctgagttggtacaacaggatgatgaggcaattgtaaaacttgaaaatgcagccattgaacgatcgaagtctgtggacactgcagttcttgggaaatacagcatttggaggagagagaatgagaacgagaatcctgattctacggtgcgcttgatgcgggaccaaattataatggcaagggtttatttaagcattgcacagatgaaggggaagctcgatttatatcaagaactacagactcggctcaaagagagccagcgtgccttaggagaagctagctctgattctgatttacatcaaaggtagctgtcgatcgtatactgttattttatgtctaagcttcctttatttttgtatcaaccttacgtttgctggacttgaccttatctgttgtctccatgtgctttcagtgtacccatgaaactaagggcgatgggtcaagttctatcgaaagcaagagagcaactgtatgattgcaaattggtaacagggaagttgagagcaatgcttcaaactgc

SEQ ID NO: 56607 - DNA, 1027 bp, Cannabis sativa
ttctgcgctgttttaattagtaataccgagtaggggattaggattccataagcattttgggtagcgtgcctaattatttagggcgttacaattggggtctatgtttaatgcatggaaaattgacctttggactgatagcaatcatatcaacatgactccaagccaacacatcattatttgctttgatcgcggggacaatctgttctttcactgttggaggcaagttcttccccactcgaatgactttagtgggatcttgatcatcaatacagacttcctctacttctttcatgggttctacgacacattccacaccgatttgtgggtcaagctcatcttctgggactacccccagtgtggtctgggaagatgttctggcatcagagttatttctttctcggaacatgaggcatgttctagttgagacgttgtagtagctctgcgcactccgttggtctcctctgctggttcctatgcttctggagtcgctgaggaactttaaacatagatgttggattgatgtcactgctccaaaatccattaaaaatggcctccccaggatggcgttataaatagttgggcagtcgatgatcacgaatgtgctgtatttgaaggatgttattgtgttcctgccaggaactactccatttatggtcatcgagagttgtattttgcccatagaaatcagcgtatctccattgaagccttgtaattgtattggacagggtaatcctatagcatgaaaggctcctttgaagataatgttcacagaacttccattgtccaccagaattctggaaactctcttgttggctatttgagcttcaatcactagccgatcattatgtgagaaatacacatgtcgtgcatcatcttcagtgaaggtcatgggcaagttcatcattctttaccattgagtaggtgactttactaaatgacaagttttgccctgatttaattcattcagataccgcttctgtacattttgggtgcttccggcgatgtgttgtccacctgaaatagttgc

SEQ ID NO: 56608 - DNA, 1396 bp, Cannabis sativa
gaagaatagttagtaaataggaattagtatgctaaataaatactagcgcccacattcatgtacatgcgagaccaaaggttgtaacatgtgttactagtgacagaaggaccatctggcctaggtttcctctctatttcatcaggaaggttgcaatcattttttatggatacaagttgtgttttactaagtgtgctcttgactggaggctcaagctcataatctttgtcagcaacattctcactctcaatggctaaagtcaataactctaaggccactttatctccacctcttgcagtttttaaggaaaaattaggtattgtatgctttgctctaatctactgggcatatgagggttaataagagctggtaatcatcgagttcatttttgacaacacatttctcaccataagatgattcgtctaagctaatttaggttaacccaagctcggtttagctcaagtaaagatgtttcaaaagcttgaaatggaagtgaagcttgaaaagtcaagacaaaatttcttaaattttgaatttggagggctaattcttgtaacaatggaatttcgtcatgctgttgaaatcgccgagttgcattcttcgagattaaaaaaatcaaaattgcctatggaaatgggaatcttaaaggtcatagagaatctttgtaggaggccaaaaatgaaggtcacgtgccaaaaagtgatgccaaactggtggttttgaataaaacagacatacaccatgttgaaaagttagcatgacacctatgtcatactgacttataggtaaatattacccaaaaaatttacccgatgacatggaaaaaacttttgacacgtggtaagaaggaaacaaccctggggcccaaccactaaaactaaaagtggtcaacctgggcattaaagttgtgtcgatgccctggttaacagtagtgggggcccaggtaggcgctgatatccagagaagacatttctagttgccatcctttgacaaagttcaagtgaacatgacttagtgaccgtaaaacgatgaatcataaagttaaggatgtcacatgggcatcccagggctcaacctggatccaacatcagtgctgggcgtccaggttgacatcctatgtgccgtctcgcatcagttttggtttctatctaatttttatgagcaatatggttagccattatcctaagatacatgagaaacatgccccagccaagtttcaaactttagagatgagtaacatgaaatggaaaccgggcacgaagaagccctaacggacgcccaggttgacatatagtcaatgtgggagcattgttgctagctttaggtttcatgggacatacttgggccccagttcctcaaatccatcaagggaaaatgtaaggacatgatatttcatcga

SEQ ID NO: 56609 - DNA, 2047 bp, Cannabis sativa
tttttgttttttgttttttgttttgatcagattactgaaaattgtggggtgttttttttttttttttgtttggaaaagaagaaaatgaataggaaaagaaaaatggcaagttagtttaaagtgagaaagagaaagggttttgatgagtttatgttgttatgtgtggttttgaacgtggcagattcgcgttttataataaaggcatagtgaaagatggcttacacctatgtgttttttgtcttctaatatttaaataaatatacatttttgaaatcaataagacggacccagaatttttattttgtggggcttatttatcattaaaaaatatttatacatatattataatcactcttactagatttgtttaattttatgggagcttttctattattttggtctaaaattatcaaattaaaaaaaattacatttaattttttaaaatgcaatatttttattagtggagctatagccccatattgttacttgtgggtctgtcaaccaaaagtatatttaggaattttgtactctgtattattgtgccaattgaactattcaacttgttaaaaatggttttttaattattcagagtattgtaaattagtcattttatcaaattttatcacacgtatcaaataaaatgatggcatgactacttaattagttgttatgtatcagtgacatatcaacgccaagtgtgtaattaatttgatttttttaaatgcatataatttttatttctattaatgttaaattatacacgtgatactgatgtgacaattgactaagtagtcatgtcattattttgtttgtcacatgtgacaaaacttgatagaatgactaattaacaatactgtgaatagttcaggaaccatttgtaatggcttaagaagttcatgaggcataataatgcatatgttataatttagggtaaaaatcataaatagcctaactaaaatcatttataactaaataatatcatacatgctaaaagactatacattttaaagaataaaataatagatagtcatctagccaaatgagttgtttatccatttgaagagcatgtacatttaatctatgtgtagccacattggccgactgatgtacatggattagagtgactcttgaaaatttgaataacatacttattacatcatctaacaacgattctagatcactgaaaaataatatctcctagcaatagcatacacaattgttaaaaggttagaattaactatgatatacaacaaattttgaagaaaaaatctatccaacatcacttatattgctagacaaatgcttgaaatacttaaaatctccatcttctactcttaagttagcaattaataaaaatcactaaaaattatttttaatgagactgaaaataccataaaaaaaaatcttatttgtaaaaaatattattctccagctaagtatatcatttaaagtcgccaaaataatttccattccaatatacattaatcttgaggttttaatgatttttttacatgagatttttgctttaaggaaaaatatacatatttttcttttgaaatggaggaaaaatatacttaaaggctagtaattgtattggcaagtttataaccttaagcaataatcactttagatgatttaaaagttaaatatctcatcccttacaaaaataataataaatagtaattaatataggatgattttgaaaataagctaattcagggtgcatttgtaagtagttttctaaggactaaacatcaaatatctccaaccaagatgtataaatgacactaaattagtaatttattacagtgctactgcatatacgtttttgcactgtaacttttgattttaatattaatatgtatatagtatttgtattataatataatataatataaagagtattttattttattaaaaaataatataataataaaacgtataatattttgtgtaatttttaatattttagttggaatgaaaaataaaaatataacacttgttgaccgagattttcgcaactaaatgaataatgtaataatgagag

SEQ ID NO: 56610 - DNA, 1224 bp, Cannabis sativa
ttttttttaaaaaaaacaaaggtttatatttgaccctagagtgaaggtaaaatatagtcatctacgtaatattattaaatatatcaattgtaaatgtttattatatctcttgctttgattattattactttttttttaatgcacaattttatgaattaaagttaaaacaaaaaattaaatatttcatgaaaagaaaaaaaataattaaatatttcataaaatgaaaaggatatatatgatacaatttaatttaattgtatcaatttaccatttctatgtttaatgatcttgtattataaaacaataataatatataataaaattaaaatattaataataatataaaaatctattattattattatatattaattaaatgggataatttacttttattgttaattaagaacttttataacaactttctattatgtagacctttcatatttcctctcttaataacattaattaaaaaaaaaaaagaatgaataaagtaatatgtatataaagagacactcctccatagtaaaatatatcctttgtaataatttctaaaatttcataacatatctaaataaatttaaatacttaatccataatatttgaatatatcaaaaaacaaaattgtattgtacacaataaacaacaatatgtcttttgacttttctatgagaactaaaaatattggtgtaattaatagtgatgataaaagtaataaaatattatataaataagagaatagaaaaaaaaataataactcatagtcttattattaaaggaaaataaaaattactattaatattaacaaaaaaaaaaaaacgtatgcataaatgaggaaagaattaaaaaacaagtatccacaaataataatagaataagttaaaaaaaaaaaccatgtaatgaataaataaaatagaaaaaatattaattttatgatggattattattagatgataaaaaaactaaaagaataataaaataaattattatatttcttatttagctcacccatttttaagtaaataattattaatgctgatcattaattattaaataaattataatttaataattaataacaatcctaaaacaatcttaaaaaatcacaaaaatagaaaaataataatcctaaaaagataaaatatcttcttacctcttaattgtatctataaatataattatatcacatattaaaataaatgagccaacctaattagttaatat

SEQ ID NO: 56611 - DNA, 1356 bp, Cannabis sativa
tatttttaccattttagaaaatagagggtctattttgtcattcaacaaaacagataatttaattgataatttttacaaaacacaaggtctaaaatagtatttaccttatattgttgccaaggaaagaaggagcaacaatccaccataacacatcaatggggctagcaaatggaagccatcacttctaatagctcagggactaccttcatacagtaaagaacaaatgaaggttggaatctttattataaagaacaaatgaaagtaggaactgttaaagaatataattatgtatttttatctttagaactaataatttaatcaatcatttctagactaagacgaactaaaagaatcttacattttttaattattactattataactaataaaatggaaaaattgatcaaaatattcctttgatatataaatatatatttacttttgaaacaacctccaatcttgtatcaagaagttttgataagatgtggagtgtgcttgcaatattattttataaaaaaagtattaatatactaaaaaatgtacaaatataaattgtaaaggtaaattttatttgcatcctataaaataataagtatatcttattattaaaaaagaataaacttaaataattttaagaaattattcttaatattttttttaaaaaaaatttctcacactattttattttttaattttaatgcttattttgattttattttcatatttttttttaatttatgtatatatatatatttttaaaaaattcatataattttttagtttaatttttttgtcataatatttaaaatataatatattttttaataataagaattagaagaaaaaagttaaaacaacttaatacaattaaaaatataaattttatataaaataaaaattattaaactaaagtgtatttaaaagtttttggagtgtaaataaagttttctattataaaatattaataaaaagatatagaatattaaatgggttattgtcaggtggagagtgtcatccatgttcctgtctcgtttaacattgaaaacaaaaaaatgatcttcgtccttgccatgttccccatttagacgggtaatccctgcctcactagggttggggccttgcaaggccatcccaatgagaaaaatgtacacccctatttaattaaacttattaaaattataaccctccaaatttagtttttctagggttcttaattatcatcttcgcgaattgtataaaacttatgaatcataatatggacttgtgaaaccacatttatttagagaaacataaacattgctaccaaatgtagttgatatagttggcatatatattaagaaaaatctatatatatat

SEQ ID NO: 56612 - DNA, 821 bp, Cannabis sativa
gtacttgccgttgatctttgttttgccgtaggctttgacttctttgtctccagccttgcaagtcacctcaacgacagctcctattacacattaagataatattttgttaattatgcaataatgctacatcacgaccacaaacattagaaccactacaatatatttttacaaaaatcattgtttggttattgaaagtgatagctttttctttcctaaattattctcgtgtcacgtatggaaacatgcaattcaatatagtaaggttgaagttatgattttactattgtaaaaaatgtttgtatttaatgtatataatttgctttgacatgtacttttattgaaatcatcaattttctcaaaacgtgtctttgattcgatttctattaatttaaaactatcattaaaattgttatacatttggtcacttttagtttgtataaacaactctaaatataaataaataattatattacaactatttaaaatatacttatcctttactatacatttaacatgattttaaataataacctaaaaatattctatcaccaataatattatcttaacaatataaatataaatcataaatatttaagattaaaaaataaaaactatgtattttatagttaattcgatcatattttcataaaaacataaagaaaaaaaagtaaacagtgaataaataaataaaatttttagacgtaagaaaatagagtatacctttaaggtgcttcttgttgtgagacttctcagggtatgtccagtcatagcatctgtagcagtacactttaccgaccaccttgaacaccaaagggtgtggg

SEQ ID NO: 56613 - DNA, 677 bp, Cannabis sativa
ggaacaaggcggtgaatgacgaagtcacaaaaatgctagaaaacgataccattgaggaggtacagtatcctacttggctcgccaacctcgtggtagtcccaaaaaagaatgggaagtggagggtatgtataaatttcaccgacttaaacaaagcttgcccaaaggacagcttttcgttgccacacattaacatgataatcggcgctaccgcaggacacgagttaatgagcttcatggacgctttctcaggctacaaccaaatcctgatgcaccctcctgaccaagacaaaacgtcattcatcactgagaggggaacgtactgttacaaagtgatgtctttcgggctcaaaaacgtcgaggcaacgtaccaacgaatggtgaacaaaatgttcccaaaacagctcggactgattatggaagcctacatcgacgacatgttggtaaaatccaaagatggcaccgaccatgtttaccacttatgagaatgttttcaaatcctccttgcccactcgatgaaactcaacccagccaagtgtgcctttgctgttggatctggaaagttcctaggccacctattgacgcgacgaggggtagaggtgaatcgagatcaaatagaagcttttcaggcgacaggccaaccccgaaccgtaagggacatacaaaaattaactgggaag

SEQ ID NO: 56614 - DNA, 3153 bp, Cannabis sativa
  modified_base (2099)..(2099): a, c, t, g, unknown or other
gaggggtagtttaggaaaattaggtaagtcgtcatatattaccaattttaataactatgcatttaggggaaaaattaaatggtattttaagcatagaatttcaaattttccttttatattaacagattttttatttttttatatttttacgattttccataaaaataatacgaattcaacataaaagtagcaaaaaaataacatctaaataaaatcaaaacaacaacaaaaaataacatacatataacaaaaaatcaacaacaaattaacaagagtaaaatataaaaagaccgtattttctataaataaaatcaaacaaatcgtaaaaaagtttaaaattccgtaaagtcgtatatttgtaattttttttgttgtttttgtgtatttgtgaaataatccgataattaaacttacaagaaagcataataccccaaaatcataactagtgtaaatcgtttagcaacaaaaccagataggttttgacattcaatgtcataagaaaagtgtaaggtatcaatcactagatataagagtacctaaactaaaaaaaaaaaggacagaaactataaaaacttaaagatcaacttacactgtgagagcaaccacacctgaattatttgtctttaaaattgtctaacataaataataattactaccttcaaaagatgaggacagcaacaactcctcaaaatagtaaaaatatacaccataatcaaaagacattcatacctcatcaccatcataaattaagttgccaaaaaattgatccaaggcatacataaggactacacatgagaaagaaacattaatgttataaaaaccataccaagtaagtatttgttgttttgcataaacatgacccaagcatatttttagtagcatcaacattatgacatttattttataagctccttaatgcggaataatctatcatttcgaagacacattatgtttccttaggtctcgaacattgactatattcattaaataacttataaataaatttgtatgaactatttgattcatcatctctccccaaatatatcaatccacaacaaagaaaaattcatcatcaaattgagatatatagtacttagaagccttaacaatgtcttgttttatttccattttacctccaacaaatatttctacctccttaataaaagtttctcaattaatgggtaaatatataagagtcaagattccatcttttttatataatatatataaaaaaaaaacatggaaataaacatacatatttatatacaaatattctacacgctttgttaatttagcaggtgggtgaatcaatattcttaaatatagagcctttcaaatactaattatgagtgagttgagtcaaggttgactgctcaacgaattcaagaactttaattgaataatcatcattatatgtgtatatatatatactgaaaaagaatacatagattgaatataagtagtaaaggttggtagtggaaaacaagaaattaaatatattttaattttctattttcaggtgggtgagaagtttcttaccaagtttcttttcatagtcacacgtacaagaaagaattttgaggatgttcttgtcaacatgagttgccttattagtatctcatcaactaattctatataaagttaataaaatgacccaaatctaattccacgcgtgacatgaaatcatttcttttctacgtgtttcaaatgatatcgatatagatatcaaaattataaatagattagcatttaaactatctaatttagctctagatatatatacatatgtgcgtcatgtaagaatgtgcataaatcgatctaatctaatgataattaactcaactaattattataatcaattgccaaacattaaatatctaattgtgattggattaaaatattatttttgaatatctaattagatcggatcagattgaatgttatttttgaatatacaactggatcagataggatattgaatggggtgttcaaaaattcaatacattcaacatctaatcaaataaattagtattttcatttaatttggatgagtaattagattttatattattacatataaaatatatatgtatatatanaaattaacattaaaattttacttattttttcttgaattgaatggatccaatccaatccaatatatacggatgtatctgatccgatccaaaaaatattagtcctaaaatattggataatctcaaattaaaccaataaatatatataaaatacatctaacggataaggaccgatccaatccagcatctaatggatgttggatcgattggatgactaaaattaattagatcggattgaatagtaaaatttaacatctaatatataattgacttagatctggatagacctaaaaatattagatgtggtccaataaacactcctacttacatgttagattgatatttgttgttggtaggggtgttcattggattttacattcaatggatttagactcaaccgatccaatctaattatttattggatactggattttgtcatccaattcaatctaatcgaattgagtcatccaatccaatgaatgtattggattaaatcgattctaactattagatgcattaactggttttctattagattggattggatccatccaatctatttagctaccacttaagttaatttcacttaaaagaaaaatatatataaaaaacataattcaaaacctaataatccaacatacataataaacattagtttagtccaacctaattcttatgatctcataatatcgtcaaaaaataaaacttattcaatacccattgataattttattaacgttgaggaagatgagaattaatatcttagatctaagaatttttttctttaatcttatgtgatcaatatatattaaatcaattaatgtattttttaaataaaatatattaaatatataaattataaatgtattttaaaaatatataaatataattggatgatcattggatgctaattagatcggtttggttcggttaactattggattggttgtcccatccaataaccaatccgattagatttttaaaagggaaatttatatgctatactaacttttgccatttttttacaaaaatactgccaggcggtattttttacttt

SEQ ID NO: 56615 - DNA, 772 bp, Cannabis sativa
ataagtcatataaaagttgaattgcaacatcattaataaaatattgaattgtattaattattacgacttaaattttaatataatgtgaatcgtattatttaatacataataaatacccttgacacaacccccagccctggcttcaaaccccgaacccgagcccgagaccctagacccgaccctagactccgatctcagccctaaacccgaactcgaaccttggccttgccttggtcttagactcaccctagacccgaatcccaaccctggatccaattttggacccgaacccaaacctgaatcccgtccttggagacctgaaccctgaccttagatcccatccttggacccgaaccctagcctcgaatcccgtcaccaaacgcaaactccagcctcggcccccgaaccctaaaccttggaccttggactcggacctcggcctcaaatcaagaccctgaccctagacccacctcaaactcgaacacgacttaaataaaattaaaaaaaaaaacaaaattcacataacacactattttttatttttaaaattgaaaatagaagtaattatagaacacatttttttttcaaaaataaacttttttttttttttgagaaaatcatagttatattctaactaattaatctgaacatttacaatccatccgcatcatataaactcaaggtcaatcaagaactatacatataaagtcgactaatgtataatctaaaacttctcaaaccactctctatcttgcttgcaatgttctttggc

SEQ ID NO: 56616 - DNA, 1292 bp, Cannabis sativa
tatatatatggagctaaaagggtcaatttgtgtcttgaacttggatctaaattcaatcaaaacaatgagaaatgttgagcaattatgtgttatcttgtgatatcaggttatgggagaatccaagagaaaggaggagtatttttgcttccctgaacacttttgtgcctgttattcgttcttctttgacattgtgaacagaggagaacaactttgtgtgagtgaaagttttatttggtttattgattattcaaatgggaaaataatatccttctctgatttatcttttttttgcttgtttctctattctttgtgtccagtgtaaacatcaattagcttcaagactagctgcttcactaggaatttgcattgaagttaaggtctctgatgatgagctagctttgttactttccaaactttgaaatgattttggtggcattatcaagttagaacatgcgtagaattcatttcagatgttaatatagtgtagattttcgagagagatatgtaataaaatagatatgatgtgtgaatgaagtgcattcaaacaaacagtatatttcgaaaacacaaaaggactaaactcttgcattgtattaatattttagggaaacccaaaaatataagatgtgttatttttttaactatttttttaaaaaaattaaaaaaagtaatttttttttttttaaaaaatcatgttttataaaattatttttactttttaattgagaatcaaaatttttaataaaaaaaaattactttttaaatttttttaaataattttttttcttaatcaatattttggactttgattccaacctaaatcttagaatttggcagaccttggcccccaccctgaacctagactcgggcttcggacctgaactcaacttaaataaaatcaataaatgaaaataaaaagaaaatttacagaacataatctaaatttttctccttatccgatccaatctaattagtaattggatttggaaaatcatcatctgatccaatctaattagacctcaaaatttaatctaatccaattaataatttaattattaattggattggatcggttttttaattggatatctaattacacacctaattttcaatattaacttaaaaatatgaagaaaaatacgtaaaaattaagtatcacattttatttaaatttaatacattataaacatactatttttaccagtgtaatgtagccaaaagttttaaataattaaaacaagaacattctaagtaacaaaatagaacaaaacattatgaaaataaatacacaa

SEQ ID NO: 56617 - DNA, 1493 bp, Cannabis sativa
ccaaccttcacaaatggtaacttcctccatttaccgtccaccaactacagttactactcccacagtgtatggaccaagtacttctatacagccagctgaagttaccatttgtgaaggttggccatttactgcttcggtcgaaggtgcatgaagtactccatactcttgggcataagcatcctctaggtttatgaatccttgagctcgcaccaaaaattcacttaaagcatctacccttttacgctaaagatctccccacactagggatccaattacaagtcccaatgttagagccaccatttttcgtatcatcagtgacttttattttggcatgcacatccatcatacgctggatgtatttcttcaagctctctcctttttgttgcttgacgcttgtaaaggagctagcttttagatcataagccttggctgctataaacagttttcggacatcacctgtagatctttccaattgtggattgatcacgaagacaacctcttccactagtcctccgcagacttgctcaatgttaatgaaacacacaaatagttaacatcatcactttccttggcgacttgcatgaagtgattgtatttggagagatggtccttggggtccgtccgtcccttatacagttcaatctgggacatcctaaaatgctccggcaatggtgcattaataatctttttcacacaaggctctatgtcctcttcctcagagtcagacgcgacaccacttcacttcctaaagaccttttcagtgatcttcatcaactcctcaactttgcattcaaggcgttgagttttatcactacaagattctcttccgcgaacacaagccggatacagtgccactcccgaacaaacaaaaccagaaagcaaaagcttcttaatctaatgtgacctacccaagaagtaagaggagttcaaaggggccgaatcagagagtctgtgtagaaaggtataactcaaaaatcaagatacatggaatacacaagtctcattgatactcgagagaatgtgtacaaggcaacctgtaacacggtgcattacaagatgcctccaccaatgttcaaaggcagattacataggcgacacccaaacaaaaggtgcgaataccatggtgatattggtcacactaccaataagtgcgactacttaaaagatcaaatagaaggttggtacagaatggacatttgaccaattgggtaagaatccatgtcatttatctgggacaagcagtcgcacatggactgatgcgtgtcgtaagccacaacaaatttactattttatttaatttcaatacttctaattattttagtataatcgtaagtaagggtcgatcccacgaggactatgtttatttaattattttagtataatcgtaagtaagggtcgattccacaaggactatgtgatatgctttttagcggttcctactaagcctttttccagcataattagataattatgttgggaaaaccgtgatttac

SEQ ID NO: 56618 - DNA, 1647 bp, Cannabis sativa
  modified_base (573)..(587): a, c, t, g, unknown or other
  modified_base (647)..(647): a, c, t, g, unknown or other
  modified_base (1416)..(1417): a, c, t, g, unknown or other
  modified_base (1575)..(1575): a, c, t, g, unknown or other
taaatttgtaataattcttttattaaaattcttattaaatttaaatatattaacaaaattaaaattaaaaaaaatggtaaaaaaaaaaaactctcgcttgtattaagtaatgctagataaatagaattagttggattagttatcccaacatatttaaatatcggacgataaattaagatgtctaatctaatcttatataacggaggtatatataaggctataggggtcatgcccccctctattttcaaaacttcattatacatagcaaatttactttcatgaaattaaagcgaaggtatatataaggctaaaggggctattaaaaaaatgttatatatatgtctaggtgtaaaattataatattttttaaaatgaaaattcaatattgtataattgtgtcttttttattctttttatttaaattaataaacataaaataaaaagtggtgcttttataatacattctaaaaggagtgcattaatgtatcacttatctattttggtattcaaaagaatattttaatttaattattttttggagaattaccttatatataatttttttaatttttnnnnnnnnnnnnnnntttgagtttctaaagtgattgcagtgctagttgcagtaagggtttctatacgattttttnttgtaatttaggttgcagcgctagttgcaataagggtttctatgtcgaattccgtaaatatacaaaaaaaaaaaaaactattttataagtgtaaaaatgaaaaaacttcttttattttttttatagttgtgtatattatagttatttaagatattatgtaaaattttgataaatttagaataatttacaatgtagaaaacagtgttcaaacagtctatttcatacgtatataaaataaaagagatacgtgcgagtgcaacaaatctttgaaccctgttttcagtattttaaatttttctgaatttatcaaaattttacaggatgtcttaaataatgacaatgtacaggaccgtaaaaaaaatttaataaaaaattctccaagaatgcatcagtgcactataaaatttttcaatactatatgtgtacatatcttaattacaaatatatataaatttgtataatatgagtggaatatacaaaatataacattctttatactaatggacacatctcttattcttttccattttaaaaattacaagtaaattttgatataatgatactttagttttctaaccttattaatcagtgtatttttattttaatttcttgattcataaaaatattttatagtttattgtataaaatattttcaaaaattaaaaatataatactttttttgagtaaacattattttggacgctgtattttgtaaaagttatcgcgattggactttctgttatattaaatgataaaatggaccctgtannttctaaaatagtaaaaataggatcctgagcttaattttcgacaacttctttttttgatataaccaacttgaagacaaatcctaacacgaacagatacagaaaatgtaaacagttttttttatcatacctttatattagattattattaaattttattntgacaaaaaatcagttcagggtctattttatcatttaacaaaacaaaaaatccaattaataatttttgcaaa

SEQ ID NO: 56619 - DNA, 2969 bp, Cannabis sativa
agatgcttcgacgtgtccatctccttccttcattgtttaatatatctgatacaatcattaagtacgcggaagaaaaatgggttgatgcgagtcgcaatttcgcgataaaagtttacaccaacgctattggttatattggaaacacagaatacgatggtgaaactgaatatgatcaatatgatatcgatgattacaaaattaatttcgtcccagccattgaagagtctatggaaaggttggaaaaagcagaaataaaagatgatcaaattgtatgttcaatttgttttgagaatgttaatgattgtctaaaatctaggatgctaccttgcacaaacatatatcatgatcactgtattattaagtggcttcaaacaagtaaatattgtcccatatgtagattttcagttaattaaataaagcctactgaattatattatatgtcttacatgatttcattataattattattattgacattaatatcagtaattaaataaatatttatttgaatactacttactgttgaaataatcttaataattttgtcattgttaattggtaaaaaaatatttattttaaaaaaggttatattaaaataatcaaattttgtcatttcattaatatatgggaagttgaaggattgctctaataaaaatttgatataataaatgatatcttaatttatagatggactcttgagtgtcacatactcaccatttgtttctacaatataaatacagatttctattgacataaaaatattccacatcgaaagagcgaggtatggagaattcagaagaaagaactccgttaatctcaacaaaaaaagatgtggaacaaatcctacgacagctagaaaatacaaagtatgacatggatacacatatgttggatattagtgcaaataagaagaaattacaaatattgcattcaagaagcatccatcctctaatcaatatttcccccttacgtgagttgcaaaagcttcaaaatgaatcatgcggaagacttctttttgcgttggaaaaagaataatactacatccgattggaactcatcaagcttgaacgagatatcatgttctacaaatggtacaagaagtactttgctaagaaagtatagattagaagtttgtatccatcagtgggtgtgtgtgggtatataattatgtatgttttgtttgcagtgaaaactattgtcactgtatttttttctttttttttaaacatcattgtattttgtttcttaaatgacagttaatatattattaggaaaaaccaacattttgagtcagtattttaaattttggtgtgtgatactatgcattgacaaaatatcatgatattaataaaaccattatatcatcttcaataaaaaaatagtttgaaataaactgaaattttttgattatagcctttatcggccgacttcaatggtaaattgaaaagaatcatctttatgattaaattactttttaaaaacaaggaaagcaaaacttttgggctttttattattttttatgcttccattaggtgatttgatagaaaatcgtattgatgcatgccactacatgtcactgacattctatctctttttttaaaaaaaaataataaaaaaatataggtacaatagaacctctatttaagattgttaaaaatctcatctcatttgaaagctgtattttaaaaatttgatattcttaaataaaaatttaaattttgtaattggaaacatgtttctgaaaatgtgattggttcagtgtttatcaacaatttttgaatgttaaaatattgaatttgtgattggtacagaatttgaaaatataatggcatgtttacttaaagtactgtatatttgatcaaaatgtagttgtttacattgtgaataataacgcaagcaaatacaattgtattaagtttgaataaaaataatacaaggcatttaagataagtaaaacttaagtctggttacaaacttgtctttacaaaaatgccaccaggggcaaaccattaagtcatgctcctaaactacggatgagaggggaagccgatgaactcaagaaagaccgtctgcacgtagattggaaaaagaccaactacacatagcttgagaaagaccaactacatgtagagagtcttaatctctgcacggacctcattcccctcatcattagaagatcacatttcctgaacccgagatctaattcccagccttaggaaatttctcaacactggagagaggcttacgcgaagatctcctggcacaggttagggacttgggttggctggattctctgatagaaaccatgccaacttccttcccagatccacctgaaaccatgccaatcttcctttgaaatttttcatcagcctgaggaggatctttgagattgctcacaagatctataccctctgggatcacttgtgatgatcggccgtggcaggctacggggttcccctggtttggattggtcagaagctccacaaccctggaatccatcgtttccggctccggttgaggcttgaagtctgttggaacaaatggaaaatggttggtgcatatgggtattattagtctgaaaggataaacttctaaactcagaagaaatattttggcaggaaggaagtaatccattctgaaaatggatttcactaaagagctagaagatttgtgaaaaatgacaatgctcctcgccgcccttttatacataaagttcagtgacaagaaagccaaagattgagaaatctaacggctgggaatcgtgcagaatatgaataggcgattcataatgatcttcaaaaccatacaactaccagaatcaaaggaggcgtcctttccaagaaggagagttctatttacaccccataaacttataagtacaccccatgattaaaaaaaaaatataaacttaaataatttttaaaaagtactcttaatattttttgaaaactttttcttcacattatttt

SEQ ID NO: 56620 - DNA, 826 bp, Cannabis sativa
  modified_base (769)..(777): a, c, t, g, unknown or other
tggcatctcggtgtaactctatgtgcaccccactgataccttaatatgtattctgacagcaactaacatgcacactaaatatgcataaatatatgtaattattatactaaatcttaccttgattctgaatgcaattgtgctggtaactctcagtgaaaactactacaagacgatttaaggcccaaagtaacattttacgtaaaactggtaagcaatctactaaatcagtttcggggactctaaacatgaaagcaaaagttttcctatcgataaatagcatgaataaaccctacatatcaagaaaatcattgaaaaatgggattttgggaaaagtacccccaaaaaatggcaggttttctacctggaaaaatggtaggtcgttttccttgatatagcttgccattttcacaacacatttttccccaaacccaaaaactaccccaactcaaatccaaacctccccaaactgttaaaaacttcaaataaggctaaaacaaacctatttcaataactaaaagcatccttaaccccctggaagcaaaatcaccattaaagagataaacttgaacttaaaagcccaagcctagttcaatctctaccataaccattcaaatcagtatataacaaaatatataacttaaaaacaacccaagaaaaccttctctaaaatcccaaaacgaggagagctaaaaatctcacaaattacatgaaaacctagcctttccactataaaattcaaggaagaaagtgttggattttgtgccctaannnnnnnnnatttcaatataatcagatttagttgttaataaagatcagaataacattt

SEQ ID NO: 56621 - DNA, 2414 bp, Cannabis sativa
agactttctcggacaccataacactctgaaacgacaaagtaaatttgaatctcttcgtaaattccttaaacgctgtcgttctcaaaacactgatcagtctgtctccagtcttggttgatcactctcctgcttcgattgtttctggtattactatagattcagccttgcaccagcctggttctttcgtggtggatgctatgctccactgtgactcgccatgaatctcataagttggaatgcgaggggcttggggaaccccacaacattcagatttttacgcttgcttatctctgagcaagctccctgtgtgctttttcttatggaaacaaaattgcaagctggtagaattaataagtttcgtaatagtttacattttcctaatggcattgaggttcctcgtacgggacttggaggtggtcttatgctactttggaaatcagaggccgatgtggtcattaataatttttctcataatcacgttgaatgtttcattgaatatcaagatctgtcttcctttcattttactgggttttatggtcatcccaacagtagtcaacgagttctcacttacacactccttaaaagatgttatgacattgctcctactcatccatggctgtttttgggtgactttaacgagatcctcactcatgaagataaagttggtggtcctccccgtaataatggtcaaattcaagctttccaaacaactattgattactgtcatttagcagcagttgcttatgaaggtgaactcattacttggactaacaaaagtcaaggacttggtaacgttaaggagagacttgattatggtttcttcaatgatttttggtctgaatcctttgagaaaccaattattcagcatcttgacttctaccattcggatcacagagcacttaagttaatggtttcaatggctggggggcaacaaattgaaccttcatacaaatctcggttccgttttgaaaaattttggctcaatgatcaagattgtttggacatcattttcaagaattgggtcagcaattcttcgaatgctatatctcaaacaatgagtaatttacaatcatgtgctactcatttacaatcttgtcaccatcacaagtatggacatatgaagcaggacattaaagaggctcataaaacatgtggaagtgcttcagaattcctctaacacagatgctgatcactttactgctcttaaaaaatcagaaacaatattggatgattgcttgcacaagaggaagactattagaaacaaagatctcagatctcgtggcttaaatctggtgattcaaacactaagttctttcatcaatgtgccaatgctagacactccaacaatagaattaaaaaaataataagtgacgatggcagtgtgtacaccagcagcagtgacattcttcagcaggccgagctttattttgctgctatttttacttctcaaggtgttgatcagcaagctcttgaggcagtgctcgatacaattctagttgccattacaccagattcacaaacttctctatctcttccttttacggctgatgaagtatttagtgccttaaagtctatgactgaagacagcagtccaagaatagatgggatgtctgttatgttctgcaccaattattggcatattgttgggcctcttgttactagtactatgttagatgttctcaataatggtggtgatccctctacattcaataagacccctatcacccttatccccaaagtcaagaaaccaacaaagatcactccatttcggccgattagtttgtgtaatgtattatacaaactagtctccaaaacaatagttcttcgacttcaaccttatcttgcaatggttatatctgaattccaaagttcatttctatctcaaaggcttattacagatgatatccttgtggcatttgaagttcttcattcacttaaaacaaggaaaagagggagtcaatgttatgcagcaatgaaactcgatatgagtaaggcttttgatagggtggaatggtattttttagaacgtgtggtgttaaacatgggctttggtattcaattggtagagttgattctacgctgtataagctcgatttcttattctttcttgttgaatggttctattcaagggtcggttacacctcagcgtggcatcaggcaaggtgatccattatcaccctatctgtttctaatttgctcgaaggcttttctaggctgctgcaacatgaagaatctactggtgcactttaaggtcttaaggtctcaagatcagccccctcaatttcacatttattttttttgctgatgatagtgttcttttttgtcgtgcttctcggtcttcggctagagcaactcatcgatgtcttgatctttatagccgtgcctctggccaagtgattaatcctgacaaaagt

SEQ ID NO: 56622 - DNA, 1839 bp, Cannabis sativa
aataacaaatatttcaaaaaaaaaaaataactaatattaacaagaatattataaattaaaaagttaatgacaaaattataacaaaaataatgacaatattataatttaaataaaaagtatatttatcaattattatgtgtctacttaaatttatacaactattaacataaattaaaaaaaaaaattgactaattttttgacattgtatttttttttttcgatttttacaaaagtacttaaagatattaaacacttcaatagagatgttattataattaaatattcctttaaattagcttacatatggtgagaaaaattatttattatatgagataaaagaattaaaattgatattgtgtcaaaatttaaacaatatttattttaaatttttatataaaaaaagttttattattcaattttcctaggcctctcaataccttgagacgaccatgggtattagttattaatggttactaaaattttaacttgctcatatgtgagtaattaatttgtgagatttatattaaactaattagttataaactcacccatgatagaattttagtattttgatagatactattttagtgtgattaaatttatcaaatatatatatttaattcaaattcaattttttttatcttttttttattagataacatttttatttttttccgccaatggaacaatccaatacctcatataatataaaatgagatattttttaagagaaattatccaatttactattttattaacttaaatttccacttttacgagatatattttttattttaagttttatatatcttcatttttttaaggataaataccgttttggaccctgtgttttgcaaaagttaccaattagaccttccgttttgttaaatgacaaaatggaccatgtatttcccaaaatgatacaaataggaccttgaactaattttttgtcaaaataaaatttaataattaataatccgatctaaatgtgttatgacaaaactgtttacatttttttgtatctgttcgtgttagaaattaccttcaagttggttttattaaaaaaaaaagttgtcaaaaattaagctcaaggtcctatttttactattttgaaaaatacagggttcattttgtcatttaacaaaacagatagtctaatatgtaacttttgcaaaacacatggtctaaaatggtatttacccttttttaatcttattttaaaattaaatttttattttcatttttacgctttaattattaaacatctctcctaatattcgttcgatctcccttgcgattacacaggaggacaggaccaccaccggaggaggaagaccaccgacaagatcgaagaggatccccttcttttcaatgtctttcttagccatttgtttttgaagttttcagccatcaaaaccaatttattccatgtccctttgcaactcatttattttttgtgtgtgctagaatgttgttaatcacaaattctcaccattttgattgcggagaaacaagaattgtagcccaccgtgcaattcacatttttttagttgtgagagaggatataattgcaatgtaccttgcaactcacaccatcttggttgcagatacactagaattgtaccacacccccacctcacgctgctttggttgaatagaaaccaaaattgtagcacagatcgcaacccatgctacaactcacgccattctcaatacagagaaaccagaatcataacccactgcaattgctctagttgggaatcacaacctaactagcaacttacaccctttttgtcccagagaaactagaattgcaaaccccccccccccccccccccc

SEQ ID NO: 56623 - DNA, 1106 bp, Cannabis sativa
ataaatcacttcaaatttcttatattgataactaatcagattgtaaatggttttatttagggcacaaaacccaataataactcaatgaacacaagcagggttcatgtctactcaggattcaggctcatctattaatgatcatcgttgtgatatgaataactctttcatggtaaacgacatgttaatgagagatgtttattacatatcagtccagtcatgcataatcgaattatacataatacatttactacatgtctatccacatatgtgatcagaatcaaaatcacatacactaaaagtatagtgtatagtaaaccgtacttagcatcgcaagaaactgggcaaagtatgggtccttatctaaagctttggatggacttttggcaatgtgtctaggatgtcagtccagaccttgtatttctaagtagtaagcaaataatgcctccagtctctgttcaattcgtaaatgaaccgatcgtatccttttccattgatttggctagggtaatggtagttttgtaccacgggctctgcggagtctaatgagtcactcgtgacctcccacttgtcaaagcttgaagtggatgagttttcattcaacgaagatgaatccgcttgatgtcggggtcggttctcgtgaagaagttgaagtaggtcgttatctatccagtagttaccttcccaataatcgtcaaagttaatctacaaaagaaggaaggtaaagagataagaaccagatagaagtatgaattaattgaagggcaaaacatgtataatatgatgaccaggccgacttataagaaaaaaggatgaaattttattccaataattaaattctcgaattggaggtttaaagaagggccatgaacctcgaaaatcccaaaaacttcaaacaagtaatttcgaataggtactaacaaaaataatgagagatcgatggaaacttgaggagtcttaaggccatgagtgcgcttctaaatcaagaatagaaagctctaatttcgcctaactcaaattgtcgaagaacaactgcaagaacccaaatttcatagaaagcagttcaaaattggtagtgcatatatctaaagaaaataaaaaaaaaaaaa

SEQ ID NO: 56624 - DNA, 841 bp, Cannabis sativa
aatctaacttagctaatttattatttgttgtatgcttttcctactgagtcttttggctcacaaattctactatcatgtgtaggtaaaggaaaggttgaagctgaacaggagtgagttctgagcttgggtgatgattgtacatgtcaagacggcacgacctggagtgttcgatctcgggacatcttgggctatattttgtgtgcgacaagttataaaaaatattttgctagtatttgtaaaactttaattatgggatcccggtttatataaataaattaatatatgtttataaagtttattaaaataaattaaaagttttaatttgacacgatttttgagaaaaaaaatctttagttagcaaaggaggcacatcaattagaaaatcactgtagcgcgcttaagtatcgaggcgttacattatacatcaagcaaggatactaggaggtctactacctcttatgtgtttcaaaataatggagattgtattagttagaaatcacagctccaatctgtagtagcactttcaactatagaggcaaaattcatggcgaccacagaggcattcaaagaagcaatatggctacaagaaattctgaaagagttgaagcttctagttggaaaggcaaggctatattctgacagccaatcctcgattcatttgtgcaagaatccaatttaccatgagaagacaaaacacattgatattcgattgttttggataagggaaaagataaaagaagaagtaatcgagttggagaaagtgaagtcagaaaagaatccgactgatattggcactaaggtgttactgttagactatatatatagtgtatgtaatatagca

SEQ ID NO: 56625 - DNA, 1420 bp, Cannabis sativa
ctcctcctccacctttggtatatatatatatatatacaatatacataaccatgtactgtatatatttatttaaatattttttttatatatttatatatatatattctttttaatatatatagttatttttaatggtaattaggttaggtcaataaaatattctaatgaaagtttaatatagtttaggaaaaaaagtttagtatagcttaggtaaaaaaatgtttaatataataagtttagtataatttaggcaatgtttatataatatgtttaagtttatatatttatttttgatttaatttacttttaactcttgattcttaattttgtgtacgtaggtgtttatttgtggtgataccatttgaagatttttcgaacactatattagacttaataaacaactaatttttttcacttaatgtttaaaaaatactagaaaagtttgaagtttttagctattgttaattttagttatgtttaggtatttctttattagtgatgatattattcgaggaagttgatcggtagctttattggagtcgataagttactaaaatttttctcttagtattttataaatcttatatatttattcttagtgaagtaagttctatgattaattttactacggtcagatgtgtggaatatgcatgttagatgagtttgaatatcctaatattcatttatagttatggcttgggaaatgtcaagtgtgatgattttgagactgtgtaagtatgagactacacatttgaaaacgatttaaatagatgtactgcctatatcaaaaaggtgcatattattttcggtagcccattagaactccaaagttaagcatacttgacttgaagtaattttaagatggatgacctcttgggaagttttctcaagaagcttgcgagtgtggagaaagaatgctggaaacactcatattttttgtaagaccagccgttattctagaaaacagtcaaagtgttgtatccatgtataagagccataagttcgtgggtgtaagggcccaatggaagctttaagcaggggtattacatggtatcagagctttaatccacttgaaagtgtagtcgaagaggacatcggacctcgtagacagtcagagtctcgtgattcgtaaggggaaagactgagagctgtgaaatcccacatcgctcgggaaaagtcaagtgtgatgatttcgagactgtgtaggtatgaggttgtacaactgaaaaatggcttaaatggattgatgggtactacctatatcgacaaggtgcatcttgttttcagtagcccatcacttgagaactccaaagttaagcgtgcttgatttggagtaattttttgattggtgacctcttgagaaattttctcaggaattaagtgtgcgagtgaggagagagcatgatgaaaacacttgtga

SEQ ID NO: 56626 - DNA, 1145 bp, Cannabis sativa
  modified_base (67)..(79): a, c, t, g, unknown or other
ctattgagaaaaatatatagccatagagtcctgtgagagagaaagacagatatatatatatatatannnnnnnnnnnnnagagagagagagagagagcctttggggtgtgtattagaaagagaaagagaggctagggtttctgacctagaataaattggaggctaaggattaggcttagtgacttagcctttctaggttagagttaaggtctttatataggaagcttaagaccctaatttacaatgaaacccttagatatttacatattaaattggttgaatacaaaagactaaactaccccttgaaagtagatattttccatcagtttgttaggtcattacgggcccaattcataggtagcttgttgtccatgttttgggttgtacaaagagtcgtgtcaggttaatcctagctgcccatagacctataggagaggtttcgctggccatggtccagccaggtcaatccttgtcggctatggtcctactaggacttggtaggtcatgtgcttgcaaggaccctacaggccattatggctttaccaagaggaggcgagcctttggatatggaggctagccttttgtaagttgaggaaaactttgtacattattttcttgtagaggtcaggttcccttggtccagaagtcactttttggctggccagcttgtgctcagatcttagctggcctatatgctcactctggctggcctataggcttctcttggccggccaaggatgtttgtacaactccttgagggctcgcttcactccatttggttgctgcttgacagttttgctatatcttgcatggaggccttgtcttgctactggcaaggctgtattccacctgtactctttgtatttggcttacatggacatgctacatcaagttaacaaaatttaggataacatttgcccccaagtcctttttcaaacatctggtcggataggaactttttagctttcatcttgtttgtagtagtctctgttgtgcagtcttttctagccaagtgttggctttttgcatggcatgcttttggatctttgatcttctctctgtatatatctcatcttctctcttcttgggtatctcttttttatatctgccattaacaattttcaagctttttaagcttttggaaa

SEQ ID NO: 56627 - DNA, 1488 bp, Cannabis sativa
tttttctaatcaaagggttttattataaggcaaagcatgtggaggatttacattaccactgccataatcccttctaccgcctctacctcggccatggggatgagggggattctgatttcccttactaccaccaccctctaccatatcagcctagcttctcgtgtttcgataaacatccattctctaggacgagcttgtgaattcataagttagatcggtcaggcaatgatcaaaattgtaatctaattaccgcatacatggaaacttaatcattctcttattatgctatcaaactgcaaacatgcttcctatcatacttttctaatcatgcatatgtgattcaaactactaaagcatgtaaatgcttactaaactgtgagtcgagcttatctctaatgatgattgtacttatcttggcaatcttcagagaataacttaacggcttcgatactaaattgtaatgctcaactagcttaggcatgttattgtatttttcttaattgttgtgctaacatttgctaatcaaagggtttagtgtaaaatttgtttaaataaaactttaccaaatgagcataataaatacttaaagtttacaaattatgggatccaaatctatttttcaaaaacatacaaaaatacaacatatcaaaaagtgtcgccaggtgactaacaaaatctaagcccgtgttgtctagaagatccaaacactctaggtctaaccctagagatatgtacaatctttattgagctccagactcagtgctattcaatctttgccttgcctttacctacacatgaaaaacatacttgtgagtcaacaaactctgtaagaaaagcataagacataaacatataattgacttgtaattaggtgcccatacacctaattaccatgagtctacaacccttgtccaacatgtataactgagtctcaaacattcttgagtataacatgattgaccataatatcagcacatactcaacactctagtcatactgatgtgatatcataaattcatactttaagtacaactagccataataccacatgcattcagtactctaggcgtagtagtattagtaacactagttcctacttcctaaatttccaaacatatatatcatcaatatccaggtgtaactctatgtacacgaataccaccattactgatatgttatctgattgaaaagcattaacatgtatgctaaacatgtccatatgtgcatatcttacctcaattctataatcaggtgtgtcgatcaaccagagtggaaaatactgctcgacaatcggaggccctaaatcacattcacgtaaaactttttaaagacttaaacttataatatgaagtttctctattgataaataatttggcaataccctaaatattaataaaacgcaaaaattgaggtacccaaaaatcacctcaactgggtaaccggatccctaaattggtaaccatttactagggttttgcccgatgaaat

SEQ ID NO: 56628 - DNA, 935 bp, Cannabis sativa
ttagaaaccttggaaaataattaatatgttttattttggtatttttgcaagcatgtttactttacttgttattttctgaacttgtgtatgaattaaattggtccaataatttatttatgtttattgatatttgtagtgtcagattgtacaatccacacccccatcctcatctagtatattcctttaggaatgacctccaaagtgtgaagatgactcctggtcagagtatcacttcacacttgctcataatgaacatgaaattccagaaagcaactatactgggaattgttttaattagagagaaaagagttcattttgttctcaacagcttatcacctgagtttaaccaatttatgattaacaattagaactcgtcctacatagacaagctggatactgaattgtgtgcttatgaacggagattgtcacgtgcatggaggtccttctctagtaatgtagataagggcgaaaagaaagctaaagatattgagaatgattcctccgacaatcctactactttaggcttaattgagaaaaatagagaaagtgattccacttcctcagattatctttcacaacagattaaaccagcaataagaacaatccaaaaacagttaagcagacatatcattcaatgttcaaattgtgaacaaaagggaaattttaaatcaaaatgtcctagatttctaaacactaagaacaatggtaatgctttagtttttgaatcatgtgttttagaaaatgacaaatccatttggattgttgattttggatctactaaccatgtttgttgttcattgcaattgcttgaaaactggaattattcaaaatccagtgagttgaaacttaaagttggtaatggcaaaattgtatcggttagagctagaggaaaagccaaactcaagtttcagaatagaattttgaatttagacaat

SEQ ID NO: 56629 - DNA, 1063 bp, Cannabis sativa
ttattttatgtttccaacaacacattaaaataaataataaataacaaactcaaatgaagaaaaaaaaattagatgtataaagaatatatattttatctattaagttttgaaatataattgtattatatatattaaacggttaaattactattttttttacattaaaatattatttgtatatatatattttttaattttttataaagatgtgtggattggatttgatcggttacttttatatgtcaatcaacatccaattcgcacaaatgcggattttgaattttccaatccaattcaatccgcacaagtgcggatatctgcactttgcggattggattgaattggatcgtgcaaattaaattggatcggctatttatgaacacccctagcactaaattttacttaattaatgtcgatgttatactattttacattattaatgcgtgagccatgttattagcatgtgtacaataatttctcattttataaaaatgcttgtttggttggaaggaaaagtgaagagaggaaaattggtagaaaattttgagatgggacccagaacttttacaaaacaacatcaatgtataattactaatttgtttttgtaaaaaataattttgttaataaatttataggtatataataatgggaaattaccatttgtacgaatgttatcatttttttttttttttttcactttgacgattttttttttcatttttataattgacttattattttagttttaggttacaatattcatttttatttatacaatattctttattgtcatttttgacttttctgtaatttttcaatttcactgacatgtaggggtagcaggctagtattgggtgaaatcaatacctatcataaatgtttcatggaaattggacaaattgatcaaggcctatatttctaaagtcatccatatcttttaacttatttctttctaaattatggacttttttttttttaacttgggttggaacttagaagtcctatcatagtaataaagtagcaataaaaaagttttaagtttgtgagtttttttttttttttt

SEQ ID NO: 56630 - DNA, 2058 bp, Cannabis sativa
gatggtaatatataattttattttattatataatatataatattatctataagaaaaaatgttaaaggcactcatggtacttagtacaacctatatgtgtcatattaaattattataattaagtattagatcccacataaattaatttgataattattatataaaatatgactaatgctaggtatcactaaaaatcttattgttattattttttggtctcacatttgaattgtccatattaactgaaccttgcgaaatactaagctcggacatgtcataactgtcataactaacattttgttatgacagttatgacatcaactccctttgtctaagttctatgaaaggggtcctctctaatcgagctcaacatccagaaactcaatgtgtgctattgagacagattaagagaaagaaagagagaaaccaaaactgagagtgagagagatgtgtgcctcctgtaattgaagcatagcttcattcgagtgtttatgaactattcttcacagttcttggtgtaactttctagtgtactttctctatcaataaagattaatgcacaaagggttgtttctggctgtggagtaggcaaaattacaagctgttattcctgtttgaaccatgtaaaatctatctcccatttattgtttttgttttattcaattcattttaattgctatagcatttggtccacatttctgtgctcattcctatactctatttttgtgtttgtcattgtgtacttggtcgagttttcttcaacaattagtatcagagcatcaggttcgaattcaccaagaacagttcaagatcttgacaagattaagattaccagacaacaatggcttcaacacgttttgaggtagacaagtttttaggcactaatgattttgggctatagatgattaacatgaaagcactactggttcatcaaggcatcattaggccatagacaaagaagaattgaaaaaactgggtgaagacaaaaagaagatcaaggagatcgagattaaagcacacagtgccatacttttgagcttgagagatgaagtgatcagagaaatttcagatgaagggacaataatagggttataggagaaacttacttcaatttatttgaagtagtctttgccaaataaagtctacttgaagaagaagttatgtataccttgaagatggagatgatacaaagaatctcagagaaactatcttgatgaattcaacagaatcattcttgatctcaacaacattggtgtcaagatcgaggatgaggattaagggattctattattaagctccctttgtggattccatactatatgggaaagaaaccttgaaaatctcagagtttaaagctactcttaatgtaaaggaaattaagaagaaattagaagaaagattggacaacgatggtgtaggaatgtttggaagaagcaaatgacagtccaaggacaccaagaatggcaatcacaagtcaagcaacaagggtaaccattcaaagggagtagtaatggtcacagaccaagatcaaattccagcacaaactcaaagataggaaaacaattttactattgcaagaaggaggatcatttcagagatgagtgcagggctcccaaagcaaaactcaacaaagaaaagaagaaagattctggagatgcaggttgtgttcttgatggatatgagtctgctaatgttcttgttgcatcaagtcatgccactggtgatgagtggatccttgactcaggttgttcttttcatatgacccctaacaaacatttcttttgcagtttttaagaacaagacagtggttcagtcttgttaggtgataacaaagcctacaagattgcttgaattggttctatgttgataaaaatgaacaacagatcagaaagaacaaatagagatgtgaggtatgtccctaacctaaaaagaaattttttatttattaatgcactgacaattaaaggctgcagcatcaagactaatagctcacttagagttctaaaaaaactctacagtggtgatgaaaggaaatctcagaaatgggatttactatct

SEQ ID NO: 56631 - DNA, 1239 bp, Cannabis sativa
cacatatttagtcataaaaattagcaaaaaattaatagtttattagtaatttaattaatatttataattatatgtgcgttagtagaaaaaaattcatattgtaagagataggttgtaacgtcctactaatttaggcatgctacaatgatttctttgctaatcaaaagatttattggaaaacatgattaattaaaataaacttataataaataaacataaaattatacaatttctgaatctcgtttttattttacaactatttttttaaatttatatatttatataaggaaagaaaaaaaataaattacgtggcattttatatgattttctttttatttttactaatttttgaggctttatcattttgtgaagaaaatctaattataaatattttagaaacaatcctacattatttagaaactatttttttatgttgtcctatataggattgggcaacatccaatccaatctaattgaaccgaatcgatctaatcaattacaaaaaattggatatctaattacaattagattagattagatgataaaagttggattctaattggattgaactatgagatattaatctaattccatttatatacattaaaaaattcactacaagaataatggtttataccaacaccactattaccaacgctaaaaagtcctcattaaaaatgatagtatcaataacgacactaacctgtcgttgggaaaattattaatttttttttttgaaaaaatacatcatcaataacgacattgtcgttgggagttggtttaattttttttgaaaaatgcccgttgtaaaggcggtaaaattccctcccatttgagttaccaacgacaatgtcgttggtgacagactgacacgttgcagtgatcagtctgccaccaacgacattgtcgttagtggatgtcgttggggactgcttattatatataaaaaaaaacagcaaagccaattcatttcctcctccagccaacaaaccctaatccgcctgcccctttcctccagccattcctcagccattcctcggccgttcctccgcctgaagctacgtcagcccactacctccgtccgcctgaagcttcgcgcgtcagcccagcaacgatatctcctccgcctgaagcttcgtcagcccacaaccggcggcaatttttgaggtaatatctcatataccctcatttttaatatgtatatattgttttatgtttatatatgtatttatatgttta

SEQ ID NO: 56632 - DNA, 736 bp, Cannabis sativa
agacttgttaataatttgcttactaatcagaactgtggagaggtgctgcaaaaatttttagaaaaagaagcaatcttaagagaatagattgcactatatgtatattacaaacctgaatgggagccgttcacataaccagctatagaaatagtagacaacgatgaagaagaaattgcgaatgtgatggttgatattttaagagaagatcctagtttttacaatacaagttctaccactacttccttcagcgagtcccctctgaatggtgctggtaagtacgacgatttgttcaatgatatggaaactgaattgtacccgatttgcaaaaaaaatagcgcttaatgctttggtgaagctaatgcactgcaaagttctcaataagtggagtaaccattcttttgatatgatactctcaaaattgattgagttatttccagagggtacaaaattaccccaagtcccattatgagtcaaatatgaaattgtttaacattagtttaggttaagaatccattgatgtatacaagtatcactataccttattttggaaagagaatgagaaaaaagatttttcgcgagagtcgttagaaaaagaaaaagggagacgggaaaatgttgctcgaaaatttttgcggtactttcccttaactctaagactgaagaggttatacagttcaagacactcggctgaggacatgcgatggaactactctaagagacccaaagaggatggcat

SEQ ID NO: 56633 - DNA, 1446 bp, Cannabis sativa
taaagctcaaagattcaatggatgaaggtatttcgatccttaagttatatagtgtatatatttgtttattccgcattttatatacacattcatatatttcagtttatacatataaatgtctaacactcaatccaaaacccctttttgtgttttataattacatcagtaatttcagatcccatttcattatttttcaatgtgtcatcattatatatttatatatatatatatgtatatctatatattttggctctgaaagaagaagtgttacaacaaaaactcaccagagggtaagcttatattgatcttctttgtgcaatattctctcatcattggaataataagtttttctcaggtgagtttttttttatatataaatatataatttctatatatatattcattaagcttaattatttgttatgataaaactgcacttaaatttgctttctatattattattttatttctgggaataatttgtctttttaatatataagctttgctaaaatagtatgaattaaatttatagctccattaattgtaaaattattatgattattactaatttacttgtttaatttattaacttcttaattacattacattacatgcatgcatatattatttgatatgaaaacacactcataaaattgatttttttcctctctctttctaattagcttctcatttttatattcattagactaattatatgaacaaaatgtgtataaatatattatatagatatagttatgatatatatattctcttctttgtgagacattgtttgatttgcatgcaagaacaagatttagaaaaaaactagtaaatgataactttggttagatcaagattatatggcttaagatcacagctatgctatatgcataattttttcatattaatatattttaataactttaagtggaataaatttttgtgggaagaaataattaattagaataaagtttgaggattataactaaagtatcactactgctaaaaattaaacttaattatttatttacaatcaagagttaaatttaagtatttatgtcgcaaaatactctaaataaattaataaaaaattgatatttattaaactcaaaataattaaaaaaattaatactttacaatatcaaagttatttttattaatgcaaaaaaaatttaataaaatagttactcatattattataaaaaattatataaaatatataaaaatttgaaaattaatataattttatgatttattaattatcactaaataaattataatcacacacgaaacgtgattaatttgtttcctagtatatatacatataatattataattaatattatttcaaaagaaaaacaatgtacttcaattaattgaaagacatttgaaataagtttcaactgtacaacgacaaataactgtgcaatttgatacaatttcatc

SEQ ID NO: 56634 - DNA, 984 bp, Cannabis sativa
aatataatttatgaatttgttagggaagaattaggccataaaggtaaaattagctcttccagtttattttatcctttgattttatcacgtgtgcgtttctcatgtttctttttgcctacattaaacccatggacaatttttttgccatgctggatgctttgcataatcctagaggtggcggcactcttccatgaacagacttctcgaggttcatcgttactcccaaaggaccccaaaaagatgctttctccaactcggaggtggtctacatagataaggaagaagcaaccccactagaacgcaagagaaaggacatggatgttgtctctggatcctcaaagaaattcaagtcatccaggacgccttttgagagtactgatgatccaggaatcccttcttaagcaactgtttttttgcgtatcttgtccatccctttaactcctgtgcacttgatgaagctcacttgcagctccagatagccaagcacaacttttctattgatgagaaagctaagggaaatgtcgaagtgaaggctttgaggacatggttcatggacaaccaaatggtcctctttgaggggagtacactggccaggtatgggacttgaacttggatcccatgacagactgattctccaacttcttggagtcttccttggctccctttgcatcagaaatgatgagctagtttgtctttgacttagtccaacttcctaccaaaagatttgctgcctgtgcctcatccaacccgatctaccagattcataacatgagtgtagttctaatctcggtgagtccttgtacatcttgctacttgtttacttgttactttattttgctaactgtggtgttcaaaataaacaaattattgttactgaagtcagccccctatcaaagactttaatagatcaaggatatgttgttgtggctcaaggtggtattactgaggtgctcaagaagctcaaggaggttgaggagcaaggag

SEQ ID NO: 56635 - DNA, 1186 bp, Cannabis sativa
aacgttgacaaaacataaagtaacatttatcaaactttgaagaattaacttgcactcttccacaataaatccaaaaccagaatggagcctctcattgcttcgaatagcatccacacaaaccagactatcggactcgaaagcatcgtgagagtaattgtgatttttcaaccaacttaaggcttctcttatgcccataatttctgcaatttctggtacaactttgccttgcttagcactagaaaaaacagaaatcatctcaccttccgtatttcttatcacacacccaaagccatgcttgaaatcttgttcgaaaattgctgcatcgacattcaacttgatgcctacagccggtttaatccaaacctctgaaccatcaccgggtttaggaggagatagggaaggtaagttacttttgccttgagctttcaagaactggtcaaggctaaatagtgcatagtcgaccacctcttttacacttcgaacccgactcttccagagcaaatcatttctggccaaccatattgcccaacacaacatgacaactcggcatagcttctcattatccatctgagtagcattggaattaagccatgacagcagggaattggagtttctgtcagctgcattaaaacctgaaaactcccagcccagcagggcaggcccaagcgaattgaattgacaagatactagcagatgcaactcagtttcggcaaaaacaccacacataggacatttattatcagtcaacaccttcttaatacagagatttaccttggttgctaaacagtttgaagccgctctccacaccagatctttagtcttatgaggcaccttaagtgaccacatcttcttccaaaacagatggtcttctgaaggagctagaggatgcttttgatctcgcattaattgataggcactacggactgaataaaacccatttttctccgcaaaccagtaccagaaatcaccctctaccgactgttttatttgaattccaaggattgttgcggcatcatcaggagtaaaaaggtcattaactatttcagcatcccaggagcggctatgaatttgaaacaagctactaataaagttctcaagtcccgggacagtgggaacaggagaagttctgtcaagaataggcagccaagggtctgtggttatttgcacagtcaaaccagatccaatg

SEQ ID NO: 56636 - DNA, 1536 bp, Cannabis sativa
  modified_base (1323)..(1325): a, c, t, g, unknown or other
tacttatataagccaaatcaagaattggttagattggaaggctaatgccactgagttgtggacaattattgcgatggttggggcatagtaaaggtctatatcatcttttaagaggaaggattttgtgggtactcttgcagcagtttatcacatttggagagctaaaaatgaggctatttgggatcagtgtaaagtcattacttgtatagtgaatagagtctaatatgatattattcatagaatcacaggatattcaaacacaattaggaatcttatagataatgattggttcacaattcttcatgtataatttctttttagttgtctggttttagttttctcttttaagcaaagattggtatccataaaagtttatgaggtgaaataaatattttttatttaccaaatatatatatatatatatatatatataatttatggaacattaaataaaatattaaaaactaatatataaagttttaatttgtaagaaactggaagaggcaaatgacccactccttcctccccaaaagagaagtcagtagaaaagaaaaataaggaaaattttaacagagtatctaaacttgtacttttttggtaggatttttttttttttatatttgtagtatgaattgtttttaagttggaaaataacgttatttttatgttatagaaaaataatataacgttagaacaacataaaaataacacttttttaaaataacaaaacaataataatcttgtacttttgtaaaagaaaaataataatcgacgaaaagaaacccataaaaacctaaattttttgttacttttggtattataaaataattttaaaaaatatgatatgttgagaaataaaagccaaaagcccaaaagagaagcctaactcttaaaattggggtcagaaaaatcactagtcttattaaattaaaatatagaaatttataaaaatattagaatttaagttaatttttacaaaaatactgtcacatgaaatttttttccaaaatactatatttttataatacaataatttttttgaaacacaaacaacaactaaaaacaacatcgaaataactaaaaaacaaccgtagaacaatagtgaaaaattaacacaatacacattatttttttttaaaaaaaaacacaatatttttgaaaaaaaattcgcccaacataaagttaaaaaaattaaaatctcagtatatggtgtaataaaatattgggattatttcacaaaaacataaaaacaataaaaaaaattacaaaaatatggtttcacggaattttaaacatttttatgattttttttattttatttannnaaaatacggtttttttatgttgtaatcttgttaatttgttgttattttttgtcgtattttgaagttacttttatgtagttttcttgttgattttatgttgttttcgtgtaattttttagaaaaccgtaaaattatataaaaaaaaatattctttaaacgtaaaaatataaatattttattaaaaattgtgccttatgtaattaatcctaaa

SEQ ID NO: 56637 - DNA, 992 bp, Cannabis sativa
acttattggagacatgaatggaaccttaaaagactctgaatgctttcattacgccaaccaggggaactcttcaagatacgcttttgactttcggaggatggttaatggagtggggctaattgacttaggattccaaggtcctgttacacttgggctaaggatcgagatagcaataatcatgggggttcaacaaaaagagccagacttgatagaggcttagcttctccggattggcgtgttatgttccctaacgcgattgttaagcacctttcgtccatgggttcggatcatcggcccatcctcctagactcgaccgggggtgcaaattgtaagggtcgcctattcaagtacgaaaatatgtgggctagggacccgagatgtttttggattgtgaaggaaacttgggcgaaacggctacatcaaaatcccatgaccaacttttaccaaaaggtgaaagctacaggccgaatgcttcaaaagtggaatttcaggcaatttaggcatgttaaaaggcaagtggaggaagcctcatctctactccatgatgctgagcttaatcggcctgatgattggctcaccattaacatggcaaaaggaaagctttcggaagcactgctgagagaagagatccattagaagcaaaaatctagagttcaatggcttcaagagggcgacaaaagcacgaagttcttcatggcatcgacgattgttaggagacgaagaaattacatccagtgtatcaagagtgagtccgggacagattggattgaggatcccaaggaaattgcttgttgcttcctatccaaattcaagcagttattcaagaaaacggcaatctgtgagccgaactcacttgatcacataccccacctgatgctagatgattgtgatttggagagccttcaaactatacccacgacagatgaaattacttcggccctattcgaaatgggcagagacaaagccccgggaccggatggtcttccaactag

SEQ ID NO: 56638 - DNA, 1302 bp, Cannabis sativa
gataataattactctaatcactttaattgactaagctaaaagggaggtcaacaattatttaaaatatcctaaaatattttgagaaattcataataatttataatataaaaagaagtgattagatagtctatttcacacgtatatacaatataaaaggagtctgtgtaacagtttaaactttatttttagtgtgttaatttttttaaatatctcaaatttttttatgatatcataaataattacaacgtacattattataaaaaaaaatgtttataataccaaaaaaaaaaaaaatagaaagtgcatatacaagtgctccccttttaaagaaagcaccatgaagttttctattattattagtagtgtattttcataacctaaagcatgtatcatacatatatttgtagtaaactgaagttaaagttaaagttgttttaaagaccaaaaaggtaaaaacaaaagttaatgaaaaaagctcaattcaaatggtactttaacgtgttagaattgagtgatttaaagacatttttacaccataactagctactactactatacaactaatcacctacatcaaacttattttaaaatctttttattatatatatcaaaaagaagaaaaagaaaacaccaaccaacttcggttaaatatgttctaagacaagcagacagattaccaaaactactggaaagttaattaacaagataataccactttacttacactttacatgactttatttttctgttcttgtttaataaacttgaatcctcttttgtaattggcctcagctaaattgtatcaattatagtcaaaaagggttcttattctgtcatgatttgtctattagctaaaataagtacatgaccccataagaaaatttcttcatttatggacagacaatagggaccttagtgttcatcaacattgagagattatcagtgaaaattgaaaaagtggccatggagataagacccaagaggatttcaaaaatgggattgtatgggaaacgtgtcaatatgctggtgggtgatgatggcccaaaagagaaacctaaatcaatgagattttagaaagaatggtatgtgggatttatagactgttattgctatatgaggggtgtcgatacgtgtcaattaagggagccacagtaattattttaactggactgctgtgccagaaatcaagtgtgtcacttttctcccttaaaactaaaagcacaactcactaaaaattttactgggtaaataccatttcaaaaattgtgttttgtaaaagttaatgattgtacattttatttt

SEQ ID NO: 56639 - DNA, 645 bp, Cannabis sativa
ttatcttttgtatctcaaatctttttaggcttggtaccttttaatggaatttctctgtttcctttcaacaaaaattatgttaagaattaaagcacatgtactagttagtaagtaaacattttacaaagttggcatgccatattatgttaaattgctatttatttaagtatttgttttatttgaatttttgaactgcaataaattaacgtttataatattattatttgaaatataaacaatgtaattggaagatgacatttgtaacaatttttatagtttagggatttttttttataaaaaaattaaataaataagtacaaaactctacaatgatcataattgcggtgcaagaaaaaggaagagaatcctatttgtttatgatatgttttcattcatcaccatattttccaacatatattattttgtttatatattgaatagaattttttgagaaaatagttcaccttcaattaactaatgataaatgctcaagagttcaacatatctatagttccacacatttatatttgcattaatttcaaattgaaatacatagaactcacaaataaattgtattaataacaatatgttaatatattagaaggttacatattataaggtatcttaaaacgatgctcttaacta

SEQ ID NO: 56640 - DNA, 1985 bp, Cannabis sativa
gcttaatggctcgctaataaaaacagctacaactacgaacacttgtggccaattactaataatttattttttaatattaaagtttatctttgtaattgttgttctttattttaaataatgatttgagtatttcaagtaatcataaagttttatttctttaaaattacttgggggcatatatatatacaataactagattctacttagacgtgtatacaaaaagaaattgggatctccgattcgaaagaaactgggacttgatgatcttttagaagataaatacagtcggatgaaatttgacaaaaaaaatgtgaaagatagtgaaggcatgcaaaggaggagatggttgatgaattccaaacactagaaaggttcatgggaagaaatggcaaaaataagggagagttcgaaatttatacctaaatgagagtaacagttcgatcaaaagaaaattgatcaaacagatgggaagtgtgtgagagaagaatagtgggaggattaaatgaagaaatgattttcctcgaagttttgaactgcacaaataaagcatgcaaattttcaaatgggaaaaatacaatggtacacttgaagacatttaaaaagtcattttttattgaaaaatactttttatggggcaattgttataccctaattttggctaataagtagaagccaacacttgtaccatagaagtgttatcttcatttgtgacattagacatgtggacttcatatcaacatttaagacccatcgtggggccctctttaaagacaaaatgggccaagcccatctggatgttaccttctgaaaacatgtcatggttctgcactagcaaagtcttacgccttcaacaaaatgagcccagaagaaatatctagcctcacaagatcgtagagataagacaccactttcctagaagacccttctagtttccctttatattcctattcacaaataaggaaactccaattggcagataacaacagtgcatcgaatcaagattaaaggggaaacttcccacaacaaatattaagcaattaattcagattaattccccacaatcagtgtacacagtgttaagcaaatcattcccaatctaatctacctagtcagtagattatcttttccacaggctggagttcaagcccacgagtattctttattataagctccgcagtagagggaaatggaaaacctaatataattctaaaactactataaatatcccactaatctcttggattaagtgttgaactctcttgtatactttgctcagggaaacttgagatgatacattctgtgtatttcataacgcatttgcaagtaaaagcttactgaataatactaactcgtggactaaggctttttcacgccccaaccacattaaaaactatttgtcttattctatactttctcgatcgattatttacttttcagtttattacttttactctgtttccaaaaatcttggtaaatattttggtggtttcgttaagagctgaagaaagtagtaagaccacttgtagattacgttcaagtaaccatggccctcaccagaacaaaatttgggctttgtttcactggttctggcgccatagtatgagatactagtggtctccaagaggtgactagtcgctagaaaatccgttgagaggaagataagaatcgagatgattttaccattgcagatgcaaaattggaagaaagtagttctaaggacgtcgaagttaacaccgaggatgcagtagaggatatgaatgatgatgaccctcaggacaaagttactgaggacaatgtttggcagaagagcaaacctgatgagttagaccatgtagtcatcatggaacgacaacttcaactagccgaaagagattaacgtggaaggattaattcaacgatttgctaataggaaagatgaccaggatgtagtgttgggttttgtgccctaaataatacccattccaatctgattagttatcaattta

SEQ ID NO: 56641 - DNA, 1319 bp, Cannabis sativa
  modified_base (43)..(55): a, c, t, g, unknown or other
tttgtcatttaacaaaacacagagtccaattggtaacttttgnnnnnnnnnnnnnccaaaatagtatttaccctatattcaagtggggttttttactttttaacatggcacgatattagtattaattcaaaaaaatacaaatacgactcgaaaaaaatataaatttagacctaatactatacgaaaaaacataaatttaagcacgacacaaaaaatataaacttaaatacagtacgactctagcaacttgataaatacaaaaatataacacgaaagcaagaatttaaaaaacacaaattacacccatgaatataattttgggtgattctacgatgcattatctactatatcaacaatgtacatctagtccatcacgaaaaaatttcacaattaaacgtatttattgacttggcataattacacctaacacttggccgtggttaatagaattttatttttaactaagccaagagatcaagatatatataaataaaattaagaagcaaggagaattatatattaatattataattagccactatttttattttgttatttttattttcatttttgttgtcaaaccatgcatgcataatctaataatgatctacgaatatctaagagaaagttctaccaagttgtgaaataattcaataataaataaaatgggatcattaatttacagttaattaagacttaattaagagccgtgcctcaaattaattgttcatttttatactaaacttgttcgttttcacatttatgccattcatcaatattatatatatattttgccaaaaaatatatttatatatatattatagtttctcagtcaatcataacaagaatgatgaaaacatcgaattcgtacttttactttattttaaataaatatatattataagtatatttataatattgtaaaaccattacgtaattaaatttattagaaaattaataaaaatgttctaatatcaaattatttattatatagatgaaaactccaaaacttatagtgtatattataagtgactgagttaatatatttgaggcgtgtggatctatgatggtgatcataaatcaaaaaatatataaatgtaaatgaatgagacattaactatattgtttttattcgattagtaccttattgttagggatgatctatatatattatatatgtttctttaatttaaacattataatcaaatttttatgggaaaaaaacaaaaaaatacaaaaaaggaaaaaaaattacaaaaatactttgggccggcccattaaacatttatacagtccacatacaaatatttataaaaata

SEQ ID NO: 56642 - DNA, 1095 bp, Cannabis sativa
tggccgaagatggatcaggatgtcgagtatagggtggaatatccaaacgtgaagggatgcaggtctatcttggtggtggtagaccgattctcaaagtatagggtgttcattcctgccccaaacgcatgtcccgcggaggtggctgcggagttgatcgtgcaaaatgtcgtgaagtatttcggattgcccaaggacataatcagtgaccgtgattcaagatttatagggaagttttggaccgcgctattcaatttattgggctcagatttaaaattttcaacagctaatcatcctcagactgatgggcagattgagcgcatgaaccagttgcttgaggaatacctacagcattatgtaacagcaagttagaggaattgggtggagttgcttgacacagcacagttttgctaaaacatccaacaatcctctgccatagggatgagtccagcggagatagtctttggcagacagccgctcacaccacatgaagttgcaaaacaaaagtctcaaggaatatgccctgcagcatatcggtttgcgaggaaagatcgagttgttggaacttcccagggatagcctaacaaaagctcagaggcgcatgaagaaatacgctgacaagcataggcgagacttagagatgtcagttggggacaaagtgatgctgaagcttacaccccagatttggaagaaaatcactgacaaacgctgccacaaagggctagtacagaagtatgatggtcccttcgagattgttcagaaagtgggtgcggtcgcatacaaattgaagctgccagagcgcttcaaggtgcatccaacttttcatgtgagtttcctgaagaaatttcatgaagacaactcagaagaaggaagacaatagtgcgtgagagtacctcctactgatcggatgcaatttgggaagaaattggcaaaagtcctggatcatcgtatattgggagctagcaagaaaaaccgaaggacggagtatttggttttatgggaaggcgaaagcgaggcagaagcttcgtgggaaaaagccatcaacttgtggcaattcgaagacaagttgaacgaatacctcagaagtgtgtcgacgag

SEQ ID NO: 56643 - DNA, 1313 bp, Cannabis sativa
gggtattatatgtgtatgttttcggtttgtgattgaatctttgtgaatcttttcttatttatatactcttgtagttgcatgtgagtctgaatatctctctccctctgttttctttttctcttttgcaggcatgttctaactctgttttggtggatttgggttacaaaattctctcacacttttaaaggtcaattttttgaattgtaaaacatatttgcagtgactgattctctattattggtaaagatttcaaattttggctttaaggggttcatttatttattttgttagtttgctctgctatcatccaattaactcagtaattaattgggttgtttaatgtactgtatataaacactgacttatttatcagtgattttagttttaattaacatatctataaatatgtatcacttttgaacattggttcggttgtaaaataataatttacttttttatatttaacttatttgtaaaaaaatattaacaaaaaagaaaaataaataaatatctaatgatattatattgaatacggataccaaggtctaaattagggttggagtctaaattattaattaaggaaaaaaaactattataaacaaatttgaacatgacttttttttgttttcataattttggttctcaatagaaaaaattgaaaaagtgaaaccagttttacagaacatgattttagaaaatattttaacttttcaattaaaaaaatctgatttaaaaaatattaccaaacacacctttcataaatcacattttttttttagaatacttgcggcaaaactttttaattttacatttacaattattacacatataacccgaataaaaaaagtagcccttatgaacttactattttgttgtagttgtaccttttagttgttaagtgctaactaaatctattaagtggcagttcagaaacatgtgtccatatattatttgaccacgtattaaataattattattcattctatttttaattaaaaaaaatacaatttaaatagaaaaattaaatcaatttttctttaattaaataaacagttttattttttcagaaaaagtataatttttttatttaatacgtgctccaataatatggtgtcatgtgtgtttttatgttgacacttaataaccaaactcgtatagaaaatgcttttgctgttattttttttttattaaagtcatatgtgtaataattataaatattaaaagaatttcaacgcaaatatatatatatatatttttacacgcaccatcttcacataaactatatatatacatttttttgaaaaataattagt

SEQ ID NO: 56644 - DNA, 1517 bp, Cannabis sativa
ctttcaaaagtgttattcttggtatgcgtgtcccctgaattttacccacaaatattgctgggttagcactatcgggctcaaacaccaccatcttcagtttacagtcgatcgttgccccatacttagatagaaaattcattcccaggattatatcaaaatcagatagttgcaattctattagattggcggttaattcaaaaccaccaatccaaaaggataaggatcgaatccacctaatggatactataaggtctcccgaaggtagcagggtacgaaaccccgatgcataaatatcacgtggtttatggaaacattcaattactctactcaacacataagagtgagtagctcccgagtcaaacaatacagtataagaatagccatttttagacaactgacctgtcaccactgacggactagcatcagcgtcagcctgagtcatggtaaaaagtcatcttgggttttgagtagtattcttcttaggctccgctttctttgcctgaggacaatccctaactcaactatttactccatataaataaacacttaacatatagcattttaagcattgcatcacataacacataaatactctagatgcttgcatactgcctaaaatggaaaggataatataaatgatcacataagcagtaaagcatttactctcaacacttagtgcaccacgagtcgagcttgtctttgacaatgattgtacatgtctagccaatctataggaagtttaaaaatcttggtgctctaataccatattataacagcctaacaattaggcatgctaccaaaaatgattaagaaaccctaatcccctaaccgggattactaaaaaaattagcactggaaattaaactttaaacaaaacggaataaaaatgaacttgtaaaaatttgaactttacaaccaaaatttacatgcttcggtatcccaaaaaaaaaatcacaaaatattacaagtcttttccccttagctgacctaagcggcaaaatagagttacaaaaattttaacactagtagaccccaacccggatggtctagtgttgcccaaacatgtacatacatcctcctgcactcatggctgatcagaaacagatttaccctttcttgcatagtagaccacccgtgagccaagcccagcaagacagtataattatcaataatcataagtaacacatctcataattattaatgccatttcatatttttctgtatgacacagacccgcgtgttacactcacaggcctatttatgtctatatggcataaacctacgtgttacgctcacacgtctatttacaataaggccttagaacggttcatctcggttctagttatcgagtccaacctgattatgccttgaacacataacccttaatttcaatatatatcatggcataacaattacatattaaaaatttactagggtaataaccctaagccaataaaccgctctatttagagtaataactctaatcccggtgtctagcttcgcatatatatcatatt

SEQ ID NO: 56645 - DNA, 1125 bp, Cannabis sativa
attcttagtcaattattagatggattagtatttatttttgtataaatttgatgtattttctccaagtgtgtaggtttgtgcttaaaaggtaatattgtgattgattgagatctttgagccaattttggataatgtttttatcattttctcgaagagcttatgaaattcaaaataatagagctcgctcttagcttttcagaacatattaaatcatctcatttggaattcgatcgcgaaagttatgcatgatttacttaacaatgtcgaagcagtaaaaaagtgacaaaaaaatttcctgtggcactatagcgccaaaagtgtggcgctatattatggaaaaaattaattctggcgctaaaacgaagcctcgaggagtaccgcatgtgctgtagcaccgtacttatatttttgaattaaaaatcttaattctaaagggattctttctatctttttggatctatataaaaaataatataaatcaaattttgggacgactggagagataaaaataaacaactttgagattagaaaatacattgaagagcaagaggaaagagacttcaagcaatcatcatcaactatcattatttcttcttcttcttctttattcttttgtttagttatttaattatgaacatgattattgtggttattatgtttgtgattatgaactaaataatctttctagagtgttgatggaactattttagattatgaattaaattttttagattattctcatatttgttcttgttatttgtttatgtaattttgtgttaattattaatgtttgatcaccattaattagtatagagattttaggttttacacgagaagtaatctaaaattggacatagaattacatgacactaggaaaagggtgagattgaagtaattctatgagttttatttaaagagaatcatattgctttattattgcttaattgattaacattgaatatagatatcttgttagttaattaagttataactatcatcacttgagagaggttaataaattacattaagatttttgaaactacaaattatagaataaattgagataatcggtaaattgagattcatagtttaaaataggaaatcaatactctaggtctttacttt

SEQ ID NO: 56646 - DNA, 553 bp, Cannabis sativa
gatatcaaacagaaaaacaaagttccttctgttcatatagacacacaatattttgaggacaaagaaactataacgcggggaaggcttgaggtctcagttggggtacatgtgcagtcaaatttaaaatttcaattggttgtgacattttattgtttgttctgttcctttttgttattttattacaatttctgttcattctttttcacgcaggaaattcaagcagctttacatacacttaatgaagggtcaagtatcgaagatgcaaaagcagtttgttcatctgatgttcttgagtggttttttaaatggaaggtctgtattcctgcaagtatttgatttattcaactatctcaagctagttataaactttatgctatttgtttttgtattctttgtacagttataatctaatatgccaaaattctatgcttcctttacacttaaagatgttgaccaatatttctgaaatttttttagtggaaagctatgcatttataataatttgttttcttaataaagcttataaatgttttcttattttttattgatgttg

SEQ ID NO: 56647 - DNA, 986 bp, Cannabis sativa
ttataattttataatttgtatatttgaatgttagactattataatgagttcaagctaattttaactagctgaatgaatatgctgtaattttatacttaatttgtggccacatcaataaattgtctcaaaaataaactaaatgctaatgaaaaataaatttacagttatttttaatattcgagactgatcaagagatatttttgttaggattaaactcacttaatctgttaaaatcaatatgtctatctattcactcatcagatgaatctgaagaaagctgctgttagttttgtttttttttttttttttttaaaagaacattgattgttcattaaagcaagtagttgggaatcacataagggaacccctccctttgacaccaaccagtcatcataccattaattcttgcatcctttgctaacctatccgcataatagttttcttcacgctttatgtaaataatttggcaatccataaatccctccataagcttccaaacttccatcgccagcggtctcagcttccagtagggaggaaattgcctcttctccaaagcccgcacgatcagcaacgcgtcagacaaaatggttaccgtcgccagtttagagtccactcccattcgaagagcccacttgattgctgttgttagttataacaatttgatttaatactaatttaaagggaacccaccaataactataaatagtagtgcctttactcttttaagagagttctatatccaatctctaaagctcatactttagattcagattaaagtttacaaagagagaatccaagatcatagtgagtgtgtgtggagaaaaatgtaatgagagtatcacccttaaagtaatttctgtcaatgtgagatatttctttgtaattatttactgtgttgagttttattcttagacatatttaattgtgtattactaactattaaaacaataaaaatctacgaattatttattctcaagctaaatttt

SEQ ID NO: 56648 - DNA, 685 bp, Cannabis sativa
tcgtttaaatgtcatattttagtgttatactgaatgtgtaatgatatgcacaaattttaataatggaatgtcaaatttgtgcctatcagttggtaaattgagatttcaagcttctaaactattattagatttttttccttttcacgaaaaacttgcagaattgactgtcatttctatgttcaggtctgaccctaagttgtacggtgaaatatttcaaaatttgtactcccgctgaaagctagtatcccattgtgtttgggtcaatttttctgttagatattctattttaataatttttaggttaattagcaatttttctctccgaatttagacatattaaattatgccctttgaatttttttggccattaaaaattcccctgaactattaagcttgttagatttaagaggacttttgtttaattttagtaaaaaaattctaacatggatgaaagtttaggggacatgatttagtaaatgatcacataataggcacaattttgacaaattatattcttaaaagacaaattatagtaaatgatctcaaatcataggactatgttagtatatgtgctcatttaaaaaacaatatagcaaatgaccctaaatcataagaatatgttagtaaatgtctctattccaaaaacttgtataaaaatgactcttttaaactatttattatttat

SEQ ID NO: 56649 - DNA, 1862 bp, Cannabis sativa
attaaatgcggaagtgacagagtatatttacaacttgctgactataagatcttacacgagataaagatatacaaactgttgcctcatacattagaaagaaaccatatgtcaaaggatgcgtaaggcgaggcatcaacctcgttaagcatgagtagacgtaagcgagatataatgactgcgaagacacttagcgtgtaatatagagtatacaaactaagtataacagatgggtaaacccaagcaagtgataggtgggcgtccatcttgtcataggaataagacatgcgcatgattgtagaggttcaccttatcgttgagaactgcgattatcagatggagtgttatgtcttcagtgcaggaacgacgagatttacatatcaacctcagaaagatacggaaaaagctccagcttgctgtcaaggtcattggtactgggttcttatcgagacatcccagaatgctatgatttataacgtgtttcatacatgattactttgacccagtaaaagcgaactaatcacagttgtgtgatattcaaatactaaccgcatttatcttacgtgatatgtaattaaaccccacaattttaggggataattgttgtaaagatttcagccaactctgtaattaactgcctgactatgtaattataaatagaggcaagtaagactgaaagagtgtcgaataattcataagaaaaaaggccctagaacaatatcagaaatttaataagactgactcgtgggctatgtagaagtttaactgcaaaaccacgtataaaaaatcctttgtgttcatactttgttctttactgtctttattttttttgtgcaagtttatcactgcttaggctcatatctggttaacgaaaatctgcgttaatatcaacctatactcaatactctagtcgtaccgatatgatagcaccaatcagtacatgagccaaacatacatttatcggtatctaatacaactttacgtacattgataccgttatttcaatgtaatctaacatgcattcataaatatgcatactaaacatgtaatcacatatgcatataactatattaatcttacctcgtttccaaattcaagtgtgtcgaacaaccagtgtggaatagctgctcgacgatttacaggcccttatgtcacaatattcataaaattgatgagtaacacattaaatcacttttcggggacttaaaatcaaaattaaaagttttcttatcgataaataatgtggcaataccctaaattttgcaaaaagaaaaaaatctagggcacccttaactgccccaaccggtagaccggttcccaaccagaaaattagttttgtggggtctgctatgggaggaactggtagaccgattctacagggccatactgaactggtcgaccggtttaatataggaaccccccaaaaccacacaaatacctcaaatcaatcccaaaccgtaccaaaatttctagagtacctaaacaactcatatagaacctaattcatgctacaaagcccaacaacatcctcaggaacaaaaaccaccatagaagagcaaagtttgagctctaaaattcaagccttgctcaaacaccacaccaagcaacaattacaacttaaaattactaaaatcaccaactacaaacttcagaatactcaaacaaaccaaaacaattcgcatagtaacctaattcaagaaaacaagcaacaacctaacttataacttaagaaaataaagagaagtgagtttgggagttttaccttggattggattcactgatcttgctaagacaccaagaattgagctgaaaaccctaacttttctattggttttcctaaggggtcgagagagagagagagagag

SEQ ID NO: 56650 - DNA, 661 bp, Cannabis sativa
  modified_base (48)..(60): a, c, t, g, unknown or other
  modified_base (251)..(251): a, c, t, g, unknown or other
tccatagacctaagatcaactagttatattgacttagaaagatataannnnnnnnnnnnnatatcttatccaagatcaatatttgtccgatccaacgtatactccatacatccgatattggtaaactttaccaataccctgaaaaggacataacacttctccaaggtgtaagtataccttatcgccaattatcatgtcagtctaaatctagtgaactgacaaatcacgagaattaaacttttgaacatatnatcatgattatattctactgtgctaacgacactaaaatcatgaacaaatatatataatctatatattctggacttaatagaatttatacattaagcatataatcacaaaataaatcatgtaaaccatgcaacataaaataatttttgatcttttattgactagtaaatctgattatattgaaatatttatttagggcagataacccaacatgaacatcaatccagaatttaatccttgaagttttactaaacctcttaatattagcaggtctctttttcaagtttgtatgaggtttggtcatactgcaccaacctgtcactacaagtttgatcgtaattgggtgactctgaagtattcctcttcctcatctcaagctcatctcactgagttgtctcaagattatgaatct

SEQ ID NO: 56651 - DNA, 1635 bp, Cannabis sativa
aaaaggggagttacgccatctgtcatatcatttatagaggatttaatacgtcttcccccatgcgacattaaatgcgaagtgactgtacgagcaatctctttacctccgagacctgccttagcatgactttagcctcccagagcataaagatgggccttatgctctcttccgggaggaaccttccctgaagtgttcttttttcctgaagacttagttgattttcatgagtgatagatctttaagatccacgtgtcacccttatccgcgtccacatattttgggaaataacaaaggcaacatttaccccccaagcctcatttagtgaagggtaagtgaggcttgcttgatgccttcggttagcttgttggtataacggcacgtgccttaagcgcgtgggctacatttatgatggccatcattaatatttatttctttttgcaggcaacgattcgcttcccgtctattaaaaaactggcgcatttaatccgagtgtcaaaaaagtactcaaacattttcaaccgccctgtcacccatttatctcagccgttgaatttgtagaatacgaatcgattacgattctcaccgtacgatggtgtctgatcacagctacctttcaccccttctgttctataaaagccagcatttttccttcattgggttactttcactattttgccatttcgtcccaagaaactcctttgagaaaatttcagaaaccatagctttcttgttgttgtttctccgtcgttgccaatctgcattctaccgccgatcatcatcaacttcccgttcacgagccttacataagttttctgggtacattttactttcgctgttcccttgcatgttagtgtagatttttcggtaaagtatttgatttttatggaatgattttggcgaagaccgtcgcctagcacaatttttcatttgtgttctattgctttctttcttttttttcgttttgcaaacaacttttttgcttagggactgctcagagtatgaaatggttttcatacttatgttcctcttcttttttcctctgctttcgctgcctttgggatatttgcacccaatgtttgcctaggatagtccctgtatttttcatttctggcagacatccggagggggtctctttccagcgataagggtaaccccattccctcctttcatggtagggttcggttttggggctaactgctggatttttctttttcaaaatcttactattctcatgacatgtctgttcccacgactggagcgaaatcctcaagtagaggatctactaccctggccaccttggaagaggtgatgaagggacccgtagtctaggagaagtacacttgccgatccaacagctgggaggcggttgagttgcactcaactctaacttgcgcccaccaactggagaagaatgtcactatggccaagatcaagccttctggtttcagagtctttcaccgtcttcctagagacgaggagacgcccaaccataattacggtggcttcggagcctggagccagactcacctcatgtccggggcaatgctaccgctccaggattacttcatcaattttttagtttttgttggccttgtgccttaccaactcatcccccaagcatatcgcctgctttca

SEQ ID NO: 56652 - DNA, 685 bp, Cannabis sativa
agggcacaacccaaaaccttaaaagtgataattagattaagttgagggaaacatggtatttttgtaaaatataaatacaaggacttctccaagaataataagcgagataagtagaaaaatacctcatttttgtaaattttaatcaaaactatcctcatattgtttttttattaagtctagcatatattttacattaacctaaggagtcttctaatgaggacatcatttataaaagtgggtatatttaaaaaaaatatgaaaataaaagtaaaaattaaaacaaaagtgagtatacaatataatttcctcataataagcaaatatacttttaagataattgtacttctcgaccttaagagcgttaggaccgctttaagttcagagatagtttcatttttaggtttaatttttattttatatttttaaagtattctataaaaatacaagaaaacaataaaaaatttaaataaaaataataagaaaacaatatcaaaacaacaataaaataatataaaaaatcatatatataaataataaaaaatcaacaacaaaataataaaaatctaacataaaaatacaccaatagaccatattttatgtaaataaaatttaaaaaaccgtaaaaatattgataattccgtatagactatactttttgtaattttttttttgtgttttttttaaa

SEQ ID NO: 56653 - DNA, 1265 bp, Cannabis sativa
actgtagcgtgccttagcattagggcgttacacgagccctactcgttggatccaccatccacgtaacttccaagtgtccgcatctcggtgaacaggtaaattttcttctagagttatgcattcaattaagaagtctaccaaggcttggccattgatggatgttcgagggtggtatgttatgtcatactgcctcagttcaattgaccattttctcaatcttccagaatcgtttggttttgataaaacttgtctcaagggttgattagttaacacttttattgggtggacctggaagtaagatcgtaacttgcgagacacttggattaggcataaataattttttcaagagggggggtaccttgactctgcccttagtaaccttttactgacatagtaaataggtttctggtgcttatcctcttctcgcactatagctgcactcattgcatttttcaagatagccagatagaggagtaacatttctccagttattggttttgctaaaactagaggcgtcgctaaatgccttttgatgttctaaaaggcttcttcacattcttctgtccactcaaatttcttgttgcctcgtcatacattgaagaatggcaaacacttatcagttgagttcgaaatgaatctattaagtacagccatccttcctattagggcttgtacttctttaggcttttttggtgacgtcatatctatcgaagccttgattttttcaaggtttgcctcagtacccctcgcgttgactatgaatccttgaaattttccttaggaaacgccaaaggaacactttttcaggtttaacttcatattgtacttctttaatatttcgaagcattccgtgaggtccgtggtatgactcccacttttcactaactttaccaacgtatcatcgacataaacctccatgtttagtccgatctgatttgcgaacatctcgttcaccaatcgttgatatgttgccctagcattctatagcccaaatggcaagaccttatagcagtaaagtcccatgttggttacgaagctgatatgttcctgagcagtcttttgggcataccttattcagatcagaaagtcaatacaagttctccaagtttcgttaggtttcgggacgagaacaagattagctatccatgaggggtgaaacaccttgcgtataaagtcattaattaataacttatccacttcctgttttagcgccccttacctctcggaatccaagggtctccttttttgcctctttgctgggtagt

SEQ ID NO: 56654 - DNA, 1320 bp, Cannabis sativa
gaacgtgtgtgggaagatttatcaatggatttcatcgttgggttaccaaaatctggcagtgtatccaacattctggtggtagttgacaggtttaccaagtatgcgcattttggggcattatcgatcaatacacagcaaccaaggtggcagaattattttccaacatggttatcaaactccacggactgccccgttccatagtctccgaccgcgacccaatttttactagtgctttttggaggaaattatttgaattaatgggcacgcgattgaagatgagttcttcctaccatcctcagaccgatggtcaaacggaggttacaaataggtacttggaacagtatttgcgggctttcacagctgacaatccgcgacaatggagtcgttttttgccatgggctgagtaccattacaacactagttatcactcttccatcgagatgacaccattccaagcggtatacggtcgtactccaccatctattcctacgtacacccgagggaccactagcattcacgccgttgaagaagatcttctttctcgggatgacattctgaaacaactcactacaaacttgcaggctgctcgcaatagaatgaaacaacaggcagataaacaccgccgtgacatcaagtttagtgttggtgatctggttttgataaaactacagccttatcggcaaaatacagtggcaaaacgactccatcccaaactttgtaagagatactttggtccatttccgatcaaggctcaagtgggacaagttgcttacacagtggagttgcccgaaggcagtaagattcatcctacgttccatgtttcggtgttgacaccgttttatggacccaaacctcccacttgttatccgcttcctgagattactgtcaataacaaaccagtgatgctaccccaagcaattgttgccgttcgaacctttcgaggggagaagcaaatattggttcaatggtcacttagcgcattggaggatgctacttgggaaaacttggctgaatttggagcactctatggcattcccaaccttgaggacaaggtcgttttcaatgacgggggtagtgttgggtcggcccaactatcaagcccattgcaattagacttgggagaaatatgcagcaaggctcacgatcggctaagggaagaggaacaagttgagatgcagagttcgaaggagccgagtcctgagaatgcaatgtccgactcaagcggaggcaaggaggcgagtaagatacgtgcgcgtggaacccgagcgcgtgtgaagcccaaatggctggaggagttcgttaggcttgaagccatgtgag

SEQ ID NO: 56655 - DNA, 939 bp, Cannabis sativa
aaagctcaaacttaagctttaatggcactttccatttaaggaatcattttttattttggtcacgttgggactattgtatgggtgatatatttgtgtgctatgaagtttggaataatttggataggtttcggtggtattttagagagtgtaaaacttaggatatacgtttgttgtagaaaatagtctgccgtttgggggaaaacggctagccgtttcctgctaggagacctagagaaaatgattagttgtttgctaaaacggcaggtcatttctgatagtgttttttaaccccattttttgtattttctcggaattttatgtagggataccgtagtgacctgtagggaattcttgggaatgaatttttagacctggaataaggttagattacttggttaatcattcttttattgttatgatatagggtccaggactgtcgatcgttctccaagtaggtcagccaacatacctaaactgaaacttcatgtaagaatagtataatgtacgacatggcatgaaatatctcttgattgttaattgtcgatcaggcaatgacaatgtgattcatgggctcacctaattaggtgatgcgatatattggtgctaggttagggcacaaactcgcttgattaggcaatgtgatatattggtgttaggttatgtcacgtgctcacttgattaggtgatgcaatatattaatgccaggttagggcacatgctcgcttgattaggagatgcgatatattggtgccaggttattacatgggctcacctgcttaggtgatgcgataatgtgatatatggtgctagactatggtatgggtttgtctaattagacaatgcaatatatgattacttcattttttctatatatgtgattatttatattatataatcgttagaatgttattaatcattttatgacggtaaaatggataa

SEQ ID NO: 56656 - DNA, 966 bp, Cannabis sativa
gaatcttatgattgagtgattggaaatcagtttgtatatttcatgttgggtatacattccaagctactcttttttctaaaccccattgttgaaattcttttagtgagttgcctgtttgaattttatcaatgaaattttgaatggaaatttgcttcaggctgcaaccaaatactttgctcaagctgtaatgaaagtcaagtgatactttatttaagtgaccatgctttgtttcttgtgttcttgtcgcataagcagctcatccaacactgtttttttttaaaggaacctaaaagaggtgaacctagatgtggaccgtttcattaaagacatggaatcagtgatgaagcaacaaggttttgaaaacattgctagtgatgatgatattgaagaaggatcctcatctgaccttgattttggtatgttttgcaacatatatattaatggaataagcagttttgtttaatgaactgtttttataggtgcaaatatctcttaaagcactctgctattgtctcacgttgttttcagaaacaacctcttttaaaagcaagattttcagaatgaatagaaaaataacttttccttaagaaatatattttgttataattggaggcacttataatttctttatttttgcatttaaataatttgttgacagaattttttggaaaaatcttataagatgtgcattctgacttgagaagttgagattatgtagaatgtttcagtaaaagagatatacattatgctttgatgtgcactcgttgtctttgttgcaaaacttggcaatttgtatgcagcagcacctactagtactacctcttctgtatgatattcctcaatcctcaaaacccatccttttctttttcttcctctgctacataaatatatgtgtgtattaatgaataatgtactaatgatgaattgcataggttgtactagaaatgaattaaggagaatttttac

SEQ ID NO: 56657 - DNA, 531 bp, Cannabis sativa
tttacaaaaaatattaacaaaaaattggtctattatatttgaaattaattacttttaatataaattttaaaaaaaaaaaactaaacatggttgaaaatataatgttttcttgttacaaaaattaattatcattaacactatgtttcacaaaataaaataagatgatatcatgagcctatttatcgaactattttagtgttaaaattatattaaaaatcaaactaaaattaaagataaattttagaattaagattgaaaatgttagtctaaaatcagactcaaaatattattatattttattttataagatatatgtggtctaaaattatattaactctagtataaaatcgcgggaagcgcatatatgttatttagtgtaatattttagtaagttataatatatatttgtaattaattaaaactgatatctataaactaaattctagtttttgtaaaattgttaatctttttttggttaatttttatttaaattatagttttcgtattaattttcaacctcttatatcatgt

SEQ ID NO: 56658 - DNA, 1198 bp, Cannabis sativa
ccaaagggataataattctctaaaacacatgaatttataacaaagttagaaataccttatttctttgccgaaaacttaggacattggggtttcactagcccttttcattgcaatacaagaattttcctttttcatttgattttggattagcagcctttttagccttattagatgtactattgacagctgtaagaggcttcttgctattcttctttttgggtttcgaagtagaggaaatgtttgactctggttttgttgtactaaccgtagcattactagagcttggagctttgtttcttcgtttttgcggtcctccaattaaattttcaaatggctgaaggttgttgatcaaatcgtgaaagtcaaatgtcaacttgttcatgacataatttgaagtaaaggacagaaaagctagagttaaactatttacgatcaaactcacttcagtttcctgatgtataatagctccatgattttcagctttatggaaataactagccatttggagtaggtgatcacgcacattttgatgaggtttcattcgtgcattgattaaattctcggtcgcctcaaaacgagcttgatctgacaccatcccaaacagttaagttaattggttcatgatttctgcagctgtgagagtgttcggaaaccttgtcttcaaggtatcaaccatgctagacagcagaaaatgtcgagctttattgttagcattctaccaaagctcgaacttttccttgactgcctcagttgcattcacacatggttgctcaagatcttctttagttaacacaaacaaggagttctcacctataagagaaatattaatgttctctttctatttgataaatttagctccagagagctcgttgtcagtgaacagtgacagaattgggttgttcatagtcatattgggtactacaaatatcaataaatagaaattaaattaggttgaatacaaaattatattcggaaattattaagcatttaacaaataggaatgacatgtgaaaatacaaaaataaaacaaataatttctaaggttttcaactcaatgatataagtgtctcgtttaggcgatagtgaaatatatcactagttaatagagttgtcagctcatctaaaatggataccattttagcaaccttttattcgatcaagataagaattcggcgttgccccgtttaggcgagagtca

SEQ ID NO: 56659 - DNA, 1832 bp, Cannabis sativa
tataatctctattatatacagtacctaccttagatgtcatactacatcaacaatctgaattaagattgcttgcactgaataacgggcattaataaaacatactagcaaccgttgattaaagatttgataactttaatatgttcttgactattatattcaaggctaagtgatcttgattctccgtacaatacatgtcataacctcatatatgattaaggaattttttgatatttatatataaattattcaatagtaatatcaataattttacattcaagcatataaaaatattacacttttatttatcaatagaaatgtctttacaggcctttcagagcataaaccctaactcttcgctcatggtccttatcgctaacaatatgagtatttcccttgagttcatggagaagagttgaacttgagaaatcagttcaactttcttcacacttgtgaccttgtagaacacttttttgaggggaatagtaagtatagtgctttggaagatcactcttccagcaactaatccaaggacgactctgtcgtcatatgggagaaatccctagacttgccttcacaaccttatggttaggaggttgcagtgaaacccaagtcaacaaatatttttgattaacttgggaaatagaaagatctatgtgacaccctaaattagagattattggtggaagcaaaagcttctagttgtgaccccgtccaccgagtagctgaagttccaattgggatgtaaaccaccacccgtggtatcaacaatgatgagtttgattccttagccgcactggttaaaggaatcacaactccaaagctatcaaagtttgaattcgattgagagaaacacccactgctctcagatcaaattaaatctttggagattcctccagctatcccaattttcgcccacttaacatggcatggccacataggaaaaactaaggccacgtgaaatatagctcatcaatgggtgaacaaactttccttccatggcatgtcaatcatcaagggttcaaggcaatcaagcaagatcaagctaggaagaaatggccagccaaggaatcctggtcggacgacaccctagccagccaatgaggatctatatgctagccaggccctaagaataaggctggtcgaccagtatgtgcaaagagcatcaagaggagtctaaataaatggtggggtccacacaaagcttcctgaacagttcacaacttaattttagttacgcgacaactccaacatcccacaaagatagggattcatcctcaaattatgtgcctattctttagggatattacttatccatttttgtaatttaaatatattattgaaagagaaattttccctattttggagggatattcacttgttttgttatgttgttatccctaaactatataaagggccttaggcaaggtagaaagagacctgaattctaagttccataagcactattgcttatctctctcatgtctcctcactcactcactcactgactagacacttattctatttttttcacaaagtctcataagtctcataagttctgaatttataacactcagttctcattactgtactattgaagagagccatactaagaattatgagattcaagcatgtaatttgtgtggtattatctcaagaattaatacaatgaaaaggggagtaggtcattacccactaaaaaggggactgaacctctatcaatcccggtgtcacttttattatttgttattattatttacacgttgtgattatcagcaataaataaggctctaatgtcaattgactgaattcttggtcaatattttggtgctttc

SEQ ID NO: 56660 - DNA, 2579 bp, Cannabis sativa
  modified_base (302)..(309): a, c, t, g, unknown or other
gaccctactaccagtaaattaatgatgtaactcacattgctgatgtaatattttgaacttcagttatgaataaagagaattatttcttttattcaagtaattacgtagtgttactctttaaaattactaaaggggcatttgtgtatgatttaccggaattcatctagaaatacatgatataatgcaaacccacaacttaatttttttttttaaagtttttggtcaaacctttctgacaagaaggggatcaaaccatcatacctttttgatttaaacttgtctgacgagaaaggaaaatcaannnnnnnnaatgagatataactcataacttgcgtacgcagctgaatattaacggttcgcgcaagataggaaagtattaaaggagacatcaaggtgtctcgataaaagtacttaaacctaatgaatgaatagacaatctaactattcatatcaggaatcaaaaatgtacaaagtgataaaatcattaaaagtatattcatgtttgcttaagctagattataactgtcatgtcattgcgaggcgaggcgaggcaaaattgaattgatgataactgctcgtaaatcaaaagtctggtagataataagctgcccgcacacataatagattactaactacttgattaggaaaattaggagcaatggaaagaccaaatgtactctatatttgataaaaatatttgtgtttacattgtgaataaaaacgcaagccaacataaatatattaagttcaaatgtaaaagtacaaggcatttaagataagaaagaaaaccaagttggtttacaaacttgtcattacaaaaatgccactaggggcaaaccattcagccagtttcctaaataaagagtacaaggttatttataggagacaggagagctcgagaaatatcggctccaagcaaaaggactcaaactaatgtactaactcagtaggatgtccctttacaattcttgttgcataaaccttattctctgcagcagagacctttagaagatcccatttcctgtagcagagttctcattccctgcggccgagatctcattcccagactcgagaagtttaacaacagaagtggttggctggctcgaagatttcctcgtgtaagctttggtcttcagccatttgggttctttaatacaatccacaacctcgccaattggggttaccttctttcgggatttcttgtcggctcggggagaacctctaaacatgctctcaaaatctacgtccattcctatagagacaaagataaaagatcaatgacgcaacagtggcaaaaagaaaaaaaacatgtaataataaacgaattcagatcagaccactatttacaaagaatgatgctaatttttataaatcacttgtaagaatcgcccataacgatcgacagtatctccttggtttggattaatcggatgatcttcagtcttggaatctttcatttcaaatttaaactgaggtttgaagtttttaagacatatggagggggaaagcggttggtatattccggtgttacaagttttgagggataagtttctgagcctggatggggcatctccgcaggagagtgacaatctaatggatgaaattcaccaaaaactaggagtttatggaatgtagctagcctgagcaatcattttatacttagaagccagtaacagtaaggccaaaggttgggaaatttaacggttgggaatgaggtagaagatgaaagggaaattcattaatgctaataatgaccctcaaaactgtcgagccgttaaaattaagggcatgcgtggtcttgaagaaagggattatgatgattgtaccctcaatggtcaattaaaaagtaccttttatttaaaaataactttttaaggggaaattgttatacgtgaaattcgactaccatttcaacgaaaaacacatgtcaagattgggaagaataggaatcaatgcatgaaacggtaatcacatatgaaaatggaataactcattaaatgcaaaaatgacagaatatattcataacttgctgactataatgtcttacgcaagataaagatatgcaaactgttgcctcgtacatcaacgagaaaccatatggaagtggatgcgcaaatcgaggcatcaacctcgagtagacataggcaagatataatgactgttaagacacttagcgtataaaacacatagcatacaaactaagtgtaatagttgggtgaacccaagcaactaagagcaaggcatccatctcgccatatgaagatatgctcgtggaaccttctctaatcagctccaaacatctttcaataagattcacagctctgtcgaatcagttctctctaatagatgctgacatttaaatgatgtagactcttgaagttcaccttgtcaccgagaactgtgattgccagagggagcgttatgtctttagcgcaggagcgacgagatttacattatcaaccttgaaaatatatcggaaaaactacagctcgctatcaaggtcactggtgttgatttcctatcgagacctcccagaacgttatgatttataacgtgtttaatacacgattaccttgacc

SEQ ID NO: 56661 - DNA, 1705 bp, Cannabis sativa
  modified_base (226)..(227): a, c, t, g, unknown or other
attttttgtccaaataaaatttaataataatctgatctaaaggtgttatgacaaaactgtttacattttctgtatctattcgtattaggaattttcttcaaattgtttatgttaaaaaaagagttgtcaaaaattaagctcagggttttaccattttagaaagtacagggtctattttatcatttaacaaaatagagggttgaatcgataacttttgcaaaacacnnggtctaaaatggtatttatcctttctaatttcaatcctttaaatgtcaaaattatttatttattaattataattaataaattctcataattaacaaataaaccctaaaaccaattttcttcacaattaagccattgctaagtgaaaattcataaataaagacatagtctatgtaaagaccgcttaactttaatttgaagttagctaataactaaggcttacttatgaaattacaatattaattatgaattatgttcttatagagatttatttaaattcagggtgtcttatttatgtcgtataaaaattttacgtttttccatgttttgtgccccgcaataatagaacgcggcgcgtggccaatagaatcacattttaatatttttgtaatagcggggcaacttagttagacattgagaatgttgggattattcgaggatttagaaatgaccaatataccgctatgtagcatgtatgcttttcggtgtgtgtaagggaaaatggtctttttccatttgttggcttttgtcttctagcgaattagtaaattattccaagctttattaataagattataagttagtatatacttagaattattatgtttatcttttactagttagcaattaagaaaaatacctccttccttctctctctctctctctctctctctctctctcccgaactctcatgaaggtaggaaggagttctggacttttaaacttttattcaaaggtttctagcagaattttagtgtatcaattcaaggtaaatccataagcaccattctctttgatttttcctaaattctaagctaggttttatgtttgtttttgatttagggctgctgtagttcttcttgatgtttgagtttatattctgaagttaagattatgttatttgagctgaattagagttagtttgtggcttggcttggttgttagacaaggtttgagttttagaacacaagcttatgtctttaatgatgcattaagttttaggggttgtttcttgtttttgttgcacggattatgcttattatggtgtatataggtgatttgaatgttattaggttgtttagaaccaaattgaggtgtgtaaaacattttgagattttcctgcattgaactggttgaccaattcagggggacctataggtaccggtcgactggttggtccccaaaaaaacccacagaattggaattctagttggggaaccagtctactagttggggcattttagggaaccctagttgttcttgtttcgcaatatttagggtattgcaatgttattcatcgatagggaaacttttagttttaagtgtaagtccccaaaaagggatttagcgtatcacgtatcagttttccaaatactgtgatttagggggtctataaatcgtcgagcaggtgttccactcaggtttgccgacacatctgaatttgaaaatggggtaagattagtataatggttgcatttat

SEQ ID NO: 56662 - DNA, 687 bp, Cannabis sativa
aaagtcatcacaattcatgtaaattcacaatccatcactcacaagaatcacaattaaccaaaaaattcttaggcactcaagtctggcaaatggcttaattaaaatcgtggcaatcgaatatcaaatcctatcaatcttcttgaacagagattcaattcaccaaccacaccgatacccaccctaaaaccttcaatttcacaagaacttccaatacaccataaaataatttagacactattagccaataaaatcaaacatataatgaatgaaataaacctagaaaaaatcaaccaaattcaccttaattttaaaaggcagagatgtgaagggtctagtgtaagcatgctgaattttctctaataggctttttttaaggaaaaaaaatcataaacttgaaaacaaagattatcttatgattgatttgagaaatcaattgtacaaaattaaacttcatttttcctacatacgtacaagaatcttaactcatttgtgtattaactgaaatttctagaaatgaaaaataacaaaatacctggaaccaatgaatcgacgaagtggggttgggcagaggatccaagttgagcagaagaagatttgatgatttagggcttttgtgtgaatttgacaaaggaacaatatcttaggtgaagaaccaaagagggacagcgatcttaggcgattggagtc

SEQ ID NO: 56663 - DNA, 763 bp, Cannabis sativa
gttgtagttcttgaccaatgtacattttaattattggtaaggagacatatcttgtagaatgcataagctgaaaattaataaatacagtcttaagtttgaatgtatccagtaggatcatctagtaccaaatgaaattaataaacatgcttagtcttaagtttgaatatatctactaggatcgatgtgtgtgactctagtactaaaaagttcacatgtacaacatgacttttgcttaaaaaaatcagatccaacaaaaagaaataaataaataaaggaattttgaaatggaattgcttaatacaatcaagcatcatcaacaaagctatatttccaatcaaatatttttacattctactaacatgacaaacgatgttacaaccaccaaaaatttgacaatctgatcaagtcaatttagcacaactgccaggcctttttgacgactcaatgaaagaaacccaagagatatataaacaaacatatctacaacagccaacatcttcactcagcttctgttaggtctattaggtgaaatttgttgatcaacagttgacagcatcttaggcaccaacttgtctctggaaactacagtttctgcatttgagaaaaagagaaggtagaatctctgtgaacgttgtattaattaagggtaaaccaagattttgttcacttttgaggccaattttgggtttcatttcttagttgattgttgacagcagtagcgattagggtccgacaggcagtagcaatgggtgtttgacgatgg

SEQ ID NO: 56664 - DNA, 865 bp, Cannabis sativa
taaataacaacgagcaaataattaaataacaagtgtatatattaatataaaaagttattaggcaccaacacattatatacataaaaaaaaaaacacaaataatctaaaaaaaaataatagaaaaacacacttaatatatatgtgtccatagaaaactaaacatatgtaattttattttattttgaatgcaactaaataataacaaataaataattatataataattacaatgtaatatgcaaatttaataggcatcataaaataattcagcagattttatcaataaataaataattaaataggcagtgtcaacctaaccagttgtggtggtgaagtttgtggtgcctgccgagttgggagggttggccacatccgtcagattcgtggagattccaagtttggctggaacacgaacatcaggatcaccaatcatagggtcttgagaaagacccaatgaggttggatttgtaactggagttctccttgtgttaaccatggcgatagaacagatcaatagacaacgctcttaatgaaatcactagattattgacctcaaatttggccaaccgacagtggtgtagtatttatgactgatattaacacgtgtacacaataaagagcaggaaagtaaagagacacaatatttttatagaggttcgacgcctttagttacgggtaatgacctacttccctttaagctgtattaataccaaagataataccactcagatcacaaatattgtggatactgaagtgcctctcttacgattacaatatgataatcagtagggaaatctcaagtaagaggaatgagagagagttattctcttctacaatcctacgacatgtaaagaagagagagaga

SEQ ID NO: 56665 - DNA, 631 bp, Cannabis sativa
ctagctactcataatcattaaaaacacatgataacaattaattaagagcataagaaaagattagaagaaaaaaattcgtcgaaaaatattaagaaaagtccccagagctgctttttgcttcaatttttgtccctaatgatggtctactcaaaagtgctgaaaaaaggactttatatagctaataaaagattaaaaaaaacctaatttttgcattttaaaataggcgggcttgacgcatgatttttggtagcgagcttcctggtgcgacaactgatagtgttttggccataactctttcaatatgctcagaattagacgattcaagatgttttaaaaaactgaaagagagatctaaaacttttattgacaacattttttctcaaagggaatggatcatagtcaaaaattggcttggagttccagacttgatttcgatcacaaatagagcgtgatgagcatccaaaacttaaaattttcactacttatatcctagaagttcaaattccatattcatctcatttaacatgtttcttcttattttcaattcatattataaattttattatttgaacttgaaacaaatagaaaacaagtgtaattttgcacaaaaagaatataatcgattgaaaca

SEQ ID NO: 56666 - DNA, 1716 bp, Cannabis sativa
aaatgaaaaaacccctttattatattaacatctttaatttattttaaatattttatttttagtaatgtataagaaattaagtaaaattatttttttaaaaaaaaaaaataattttacatttattaaaggaataaaaagctaaaactttgattgtattttatattgtaaattctttaataagatacttaattaagactgttttaccaaacatctttatatatatcataattttttttttcataaaacaacttataatttttcttaaaaaattgtcaaactatagctagtaggacatgtgcaagataccttaaataaattaagttaactctttgtgaacaataaataaggtagcacaatctataaagcttaagctaattcatgagactcatgaaaaattaatgattagtgtaattttctagtaatgaatgatgctatagtagaagttgtgaaaatttaagatcatgaaaagttgtagaattcactttatttatcatttggtacaaaagtgaccaataaatacaatagtgaaaagcaatcttcttaatctcataataaatggaacatttaattttaaactaattagaactatatttattagcaattgtgtactagaggagagtctaatttttttagatacagtaaaacatttgtctagaaatatcttattaatttctaatttgttataaaaaaaattgaatctcaatttagatcaattaaataaaaataatctttaaattgtaattaattatactttttttaagtctcccattaacaaagtatacttctatataagaataattatattttaataatatatatacatatattttataactttatttatatagaattaataactttattcaaaattgtaatacatgtataaatatatttactcaaaaataattttatcatgatatagtattaagaattatttattgttattgttgttacattaatatattttgatattttaaatttttttttagtgtaattctatttaattataatctctccattaaaatataaattatttagtcccaagtatatacaatctatagtttggtacaaatgataaaaggtaaaaaaaattaaattattatatgtttcttaattaattactctatttaacttatttaaaagatagggtataagtataagtggatttctattttcatttatttggttatgaacacatattctcaactaccttatcttctctatttggacctatataactctttctatccaaccatccaacaacaaagaataaaaaagaatcaaaatcaaaatcaagaaaaactatattttatgtatcatctaggtttttttaaatccacatctcaatcacaagaaatcaacaaatttaattagttagatttgatgaaaaagaaaggacaaacttgttagacatccatgtccctatcgcgtgctttgtggcctagttgcaagctaaaacgcaccatattatcgtgtctcaaattaggtttatgcttccttttttctctcaaaacctaaccgtctaacaaccaaagccaatcgaagtctcaattcttttcattttatctccaatttgtgatgatattgacaatattttctatttcttatttattatcatccttcatccttctatcaatctatcgtacccctcgtataaacaaaaagaaaagaagaaaatgtgagagggaggttgaaaaaaaagattattttatactt

SEQ ID NO: 56667 - DNA, 677 bp, Cannabis sativa
aaccaaactcaccagaccttcataatatatcccaataaagattttccaagtgatagaacaactacccatgctcagaattgaaaagcaccattaaagagccaagcttgagttctaaaactcaaagcctgctcaataaccaaactacctaccaaaacatgctcaaatcaacctatataaacataatttaactacaaaaaacataactaaacaccagcaataagagcagcaaccaaaatctcaaaaacatgcataatccattttcttttaaatcaaaaaactatagagggagttgcttaaaactttaccttggcttagatcctcttaaatcagctagaaatcacagcaaaatgcaactcaaaaatcagaaccctagttggttttatagggtttcgaaaagagagagagaggtaggaaagagaggaagcttttcttaattttgtattttttgtaaaaataatttaaatgaaatgattattttgttttattaataaaatatcagcataaacaataataaaaatctgatttaacataaactcattaaagacaaaagcttatggggcaaaatgaccattttgcctctcccacacaatgggcataaaaggcacttaggggtattttgcaatattctaaaatcccgactattcctgacattcctaatgtctaactataatgtcccg

SEQ ID NO: 56668 - DNA, 5241 bp, Cannabis sativa
tttagcatttctctttaaaaatatgtgtgtaattactactaggttatgcagtttagtaattatattatattttaaaatataaagtgtatttaaatataatgtggtacatatgaattcttaatagtttgtgataactttacttttggccaataatactgagtttagaaagcgattaaaaattgatcaaatccaatgagaatatatctaattaaaacataaattaagaacaccagattttatagaggtcagcctcatttatttggtaatagcttactcttttttctgattatatttgacttgtgagaagagaagcaagtgcagcttgatctctcttgaaagcttttacaaatatttaagcaacataatagctctcttgaaagtatatttgggatcccttaataatggtatggctcgattatttaaaggaaataattacaatagaaaatagtttccaaaaagttgtcaagccataaaaatagaaagttaatgactttcctaaactgtgacaaatatttttatatagatatgaaaattctctcaatagggatttgattatatgcgaaatgggaaacttcatttaatgaattctcttcatgcgttttcctctggttagatcgtgtgaactactggctcttttatcccctccaagttacctttgttcattccgtacaacaagttttactttgcttatttattattgcatttggcaagttgtttattctgtacgggcacttggaagaccatctgcccaggtattggaaccatgatacgtgtcacccaaaagatgtgccacatcaaccaggcaagattcgggataacattttctctccaagtttgcgtgggaactttctggttgatgcgtggacttgctcggctcgcgtattaggtagatgcgatgacacgtgttagatggataagcatggcgaacaggttcgtcacttcaaatctttagagcatcttttcaaatatttgatgcatttaatgctctaatatagacaatcgtgccctaggggcatgcactgacgactatacttattataagtactcattgtaaatttttttggggaaacaagcatttggtttgggtacccaaattatggttataccccgtgaagctctaataaatagagaaagagaggttcatttgatattctttatatcttagccccttaaataccagaaagattttgcatttcctatgatttgaagagcgcatttggagacttcaagcactactcaatctttgacttgaatctcgactttgcacattcttccaactagcaactccaatagtgagtaactatcatatttcttcatgcattttctctttacttccttacattcaattttccatgttttctagaaaaacctagattttttccattgatgttcttcacagtttgaatttactatgattattgtggttgaatatgctcgtgtaggacttaattgctaacttatcgaacatttaaaaagtttttcctgagagaatttgttggatggaggcttgtacgtcgtttcaacaaattctgggtttttatccaatctttgaatatctttgtatcaagttctttgtcatttggatagagttctttcaattgatccgcgtttttttggacgaaataaacaaattttttccatttagactcttcacttttttcggtacttacctccccttcttcttttgtagatgaatttgggtgactattggggaggtaaaaactgtattgacaatgacctattacaactactcttcgaggatcaaccaaaggtctgtgcaaagtctcattcttctgacggtaactcctcctctagcttcgaagagtgggaagtatcaagtgacgactctaagcatactatagtactcatccagcatcatttttatctggatcagatcagagtcagtgtgtacgggagattcgtctgggaatacaacagaggtttgaggtgatatttgccttctaactggatgtacattgtccgtacaagggttccaaacactctactggaggtgaatcctgaaccttcactccgatcgagggttgaggcagaaattactatcactgtcgcagatcaccctccatcaagctatccattccgctcaagaaaagtggcttgtaccaaaaaaactgtccaaaaaattagctcgagagattgggacttcgtccacttaatggccaggcaacacgacttgggaagggaaaactctgagggggaagatgtcctgcctgtaggggacccaaaagtctaagaaatcgaagagcaaggcgaaaatgataggtatgccttcatgcctttcaaaggtgccagttaatattcagaagacggacaaccttttgacttttggggccattttttagtcctaggtattgattacacggatgaagagttcaacgaggctgaaccattcgagcatcaggaggtggaaggctcaatgtggatttctccgccattcaaactgacagagaggtgccttcagaattcagacaaaaagggcttcttggccacgtgcatgtatgtctcccctttgaggggcaatttgccaatgatctgggaaaagggatgtgtgtgtggtccggtcctcatgctgagcatagtgccttctttgcacttcatgaagctggctaattgctacagaatttccctaatgcaattcacgcggaaagggaattaaacacttggtcgtgatgtttgtactgtatgcgtagaaaggattgggggaacattttgctcatgacataaactggttctttgaactgaagtcttccttgcatcacgaacgctcgggatagttttacttttcacagttggagtgttcatggataatcggcacaaacaagaagtttgtaaataaaattggtggtttcctccgagattattacatagtcaccgaggtgaagactaactttatagccttttaacatgctaaaacttacatccagcccgcttttacactcggccttaaggacagggtccaggccatttttaaacttgtttgattttgctcagcatattgtcttgttgacatcccctaagaatttactcaagtatggactttatctgagctcgaatagtctgttcctcaagaagtcattagcattggtcaaaccaacctctcccaagaagaaaaagaccaaagccaacaaggtcaaggcttcgtttgtggaagaacccattcgtcttagggattctgagaaagaaactatttttagggttgtttagcatgttgaagggaaagtaaaggaaatccttgaataaattaaagtagaatcctctaatgatgatgctctttcaatccttttctgggagggtgctcctccagaagttcaaggtagcactattaataggttgtgtgccattttataatcttgaccaagattttgaccaagttttccctctttttttatgtagagatgtcaagcaaactgaagtctttatacaaaaggaagttgggtggtacctcagacaaggaaagcccaagcaaagtgcaaaaaactaacccaaggtctgtcctggagaagaagtggtattcatcaactccgagcaagagatggtcaaaaccaaatccttagcgaccaaaatctcgaagggtatgctcctcgctcctttcccgtcaactcaaaaattaaaagatttggctgtggccacggtttccttagagttgaatcatgctgaagacatttgcaacaactatcatgaaaggtaccgtgcggaggccggggaaatgctgggtggagcaaacattcttccaactgacaacctaatgtgcagtttgcttaaggaatgtaacaatatgttgttgtttaccttccgtattttatgtttggccaattcatttcgtgtcttctttctgacttggctctattttctttcaggtgaacttgtaggcgagctatatctattcgaggactaaggccatggctaagcaatctgttacaaactaagttgagtttgacaaggttcaaaaggcaatggctgagaaggagacaaccctgaagtaagccaacaaagatttgttcgagcaaaagaagaaggtcgaaaagttaacccaatagatagctaacactctatcaaccatccagctggaaatagaccttgaggaggttaccaaggccaaaaatgagctaaagaatgaaaaggaagtcaaaaaaacatgaaaagcgaatttgcgagctagaaattgcccaagttgcagttgacaaagaaattgatagtcttgtatctactgacacaaaggttttctacgagttttggacagctaatcccaaagctaactttgatcatctaaaatatgacaaggagttcatgtttgctcgagtagaagagataaaagctcaacatgccaaataagcatacgaagttgaaacttcttccgtgcctcccaactcttttgtggccgaccagaatgctgccatagcattctcaacttattgactctaatggatttctaatccatctttttttagtttttgctttaaaaaatagttttgcggcctttgcggcctttatttttcagacaaacaccgaccaagcagtctttttccttagtttcttcttaagacaaatggctggcaatgcagcttttaaccccagacttaattcatgactttttgccttgctttttaatttgaaattctttaattttcttcaaattttcattgttacttttcaatgttgtaaggatataagtgccccaagtgtctgagcagacttttaactcttgctcacttctaattcatttttgcctctttttttatgttttttttgtttggtatttctcttttgggtggacctccctgtatgcctgttttaagtaattttgtatttattgaaattaatcaaaatatatttttattttctcggtgttccgctagttccttgtcatgataaatatctcgggttgccttgctttgtgggtaaaattaagagtggcatgtttcaatctattaaagataagatttggaacacgttttttggctgaaaatcgaagcttttctcttttggagatcgtgaagtgttgttaaaattggttattcaagtcattccttcctatgccatgagcttgtttcatctactagttggtattgtcaatgagattcaccaaatgtgtgcaactttctggtggggggatgatagtaagaaaaagatgcattggtgtatgtggcttcgactctgttggcataagaatggtggcagtattggctttcgggacatgtttttatttaatcagtctctcctggc

SEQ ID NO: 56669 - DNA, 1145 bp, Cannabis sativa
gccaagaaagttaaagaggaatttttgggttgtgtttcagggtctggtttgtgtattaagctgaaaagctttattgttttctgggtttgtattttcgggtagaacaaaaagagagtaagaaaataaaacctagaaaaccctaatatttccttgctgccattttcaagaaaagaattattttgtaaccctagaaaaaacctagttgctgccattaaaatagaaaaggaagaagcttgaaaagattagatccataagaacccaagaaccctagtgtttcggctatagcaagaagagaacaatataaccccataaccctagctgccattagaagtgagaagaagagagcttgaagaactaggtgcggctgtagagaaaataaaaagagaaagaaagctttagaatcctagaaccctactttgttcttgagagaagaagaagaagaggaagaaaattttagaaaccctaaccctatattttctttttctaccgtgagaaagaaagagaagagtgtttgaaaaagtttgaatttttttaggcaaaaatagttgctgccgaattagtgtgctagggttagaaacttaccttttatattaggttattagggtttgtcttcttgttgcgatgtctttgagtgagtgggtcgaactcattaatagcaaagtgtcaaaagggggcttgattggagagagagaaagtgatttctcttagctgcctttaattgtgtgggtcgaataaattgattagggaagagtcaactctctctttgaatgttgacttgattttttgttgggctccttggtattgggctcttcatattgggctgaaacataaaattgcatttgtgagattttgaataataccaattattttgggacgcataaaataataaattttgaaaaatatcacttttgtactattgtattatttgtttctttaaagtgtgttggtcaaaacaaaattccaacagtggtattagagccaaataatttccacaaagattcaaaataatacattcaagaagcaagtttgaaagatattgaaaatcaagaacaggaagaatttgatcttcaagaacacaaagatggcaaccaagaggaggaattagatattggagatttggaggacattctaaacctttatctaat

SEQ ID NO: 56670 - DNA, 575 bp, Cannabis sativa
ttatgtaattattctttttttttattgtgttttgtctttttttattataaatttacttttatataatcaaattaaatcattttctattttactgtaatggggttgcttcatttttttttattgtgttttttttttattattataagtttttcatgttatctttttatatggtcaaaattggatttgtaagtttttttattataaattttacttttatataatcaaaactagttttccaataaagaatctagttttttaatgaaaaaaatcagtttcttgatgaaaaaattaatttttgatgaaggatctttgatgattgattttgatgacatgagaaattaagcaatttaaatcgcaagagagaataaaatcttgtgtgactggaaagaacatgatcctattttaaaaaattaattatcttttttaatgttttttatgacattttctatttaaatactcatatatttagttagtttggttataaaatttcatatttagtagcattaactttacatgtcatatatattaaaaattttatttattttatcccaaaaaagattatttatttttttatt

SEQ ID NO: 56671 - DNA, 685 bp, Cannabis sativa
ctaattatctgctaattccaaattaaaactaagcagtgtttccatcggccaggtcccatgacccagcctagggctggccaggaacttcacttccaagcataggccagccagcttgtagggtaccacccttggctggccagatcccatggtggccgcccttggccggccaggtcttgaacaagacctccttagttggcccgaaggtgtacaggatccgaccatttgttttttcaagagctcaaacatgtgctttgcgctcttcgtgttcttcgtgactcaaagagttaagaatcacaatgaatgtcagaattagatattttttttttctagaaatcacacattacaaatcttaagactaccatgtggatcagaatgctgaaagaattacaatctaacatgggaattaaaagacattcaaagcaaagaacaaggttcttgtattcatggaaaaatcaactaaatcaagtgaatggtgggaatagaaagcttacccacaactagaaaccattgatgaagaagatggtaagcttggattgtcgaaacgatgcaaaaatcttgagagaatgaagctatgtgggtttggccctctagagagaaggaggagcttcttcaaaagttactttctagtgagagagagaaaagtgaagaggagtttcccccaaaaaggcttaaatagtttatgtgg

SEQ ID NO: 56672 - DNA, 1010 bp, Cannabis sativa
ctctctctctctcactcttaactttcagatctgttgggtatgctttcttaggtggcttcgggatcaaaatgagatatctctctcaatttttttttcttttttgtttattttctgccttttcacggttctacatatattttaatatatgttgtatttttctccatctgtaaggattttttttaatggaactttttggcatttcatagttcttatttgagtttggtttcactgtttttgttgattcaatttaaacatttttaagaaatttttggaggggatggacttaatgccgacagaatggattaacgatggtggaacgaaggaagaagatgagagcaccaggggcttgaagtcgccagagttgggtttattctgcagtttctcggtctgcttttttttttttacaataaaataagtaaattaaagaaacagtgaaaagaaaattgagagttgatttgattttgttttgtaatttcttcttttgtaatcacaaatctgtggaatttgtatttttattttggggtttacttttgaatttgttcaatctttgtaaaagaaattgggttatatttgttcatattgttcttgtattgtacagatatgaagttttttttttttttgcattataataattttgtaatttttctgaattttagggtgtatataaaaaaaaaatttgtgtagaatttccattttaattttgagcaccaaataattaaattatttgataaattaaaaaaataattaattattctgcccaaattaatcaattaaatttttcaaaaaaaataataaaagtaattatttatataaaaatttgaattaaaataattatatattatttttttagaaaaatatttaatctagtgttactctttgtgtgtcactatatctccaaaattattaataaaaaataaaaaaagaaacaaaaaaggatatagtgacactttatttgtgttgctattactttttcagtctgacaaaacttgactctatacgcctatagtgac

SEQ ID NO: 56673 - DNA, 1462 bp, Cannabis sativa
tgcttttttcaacttcaaagagtcaatacttttgaaacggattctacttttacagataaaaaaaagttctcctttcacatttttttttattaaatacacacataaataataattacagagaaaatcattatatataacgatctagttcctttcaaaaccaatgcaaaaatgtaagacctctaattaagtagagttcgtagtacatacatcctctaagggccagttttgtggttaaagttcctctgcaaggttggtccaccgaggagttgttaagattttattaaaataataataatgctgatttgtataaaaattttattttccataaagttttaattattttttttttctagtataaatttttaagagttttttcatttttatacattaaaatattttttttttagtatttttacggaattttacacaaaatctcttatagcaattaacggagcaacctaaatcgtaacgaaaattgtcatagcaactcacatagaaactattggagaaacgaccaactaaactgtaaatttgaaaaaaaaaattaaaaaaatattatatgagttaattctccaaatttttatgtgtaattatttttaaaggctttttcatttttacacttcaaaatagtttttttatatatttttacggaattatacatagaaatccatattgcaactaacagaacaacttaaatcgcaacaaaaatccgtataacgtcaacctacatagaaaccatcggagaaaccactttagaaattcaaacgataaactcaaaaaaaaaaaagttaaaaaaaatagtatatatataggggtaatttcccttatttttatttgataaaaatattttataatattttttttggaatttttgtatttttacacttgataacagtttttatacagaattttatataaaaatttccatagcaactaacggaaaaattactagagcaatttaaattgtaaatttaaaaaaaaaattaaaaatgatatataagataattttcttatttttaaattatatttttgtcaattataaaataaaattataatttataagaaattactttcgtggtttgttaataaaaaatttaaattatttttcaaaacaaaataaaaaataagaaacttaaaagaaaaattctcaaagaaattattttttgtaatgtataataaataattaaatttatttttataaaaaataatttgttataaaatttgtagtttttctataaatcctttaataaactcttttttagttgtttattaaatatctttttattaactttttaaaagaaaaattgtcaaagcctttaatataccaaggagacattatagactccaagtatctctagatataaccattcttattccgctccaaaaagtaaaaaaattgaaaactttagtatatattataaaaagctcaatataaattcttcaataccaaaaaaaaaaaaaa

SEQ ID NO: 56674 - DNA, 1772 bp, Cannabis sativa
tttttatatttatttaatattataaattaaaacataatattttgatgtgcgtaatataaacaaaataatattattaaaattaaaaatataatttgctattttaaaaatatatagaaagatagtaatattgtacataaaaactataaaaaaaattatagaatcaaccaaaaaattgtaatgtattttaaataaaataaaaataaaaagataacgatttttaattactttaataaagtaacatcattttatattattgttaatgttaattaaaaataattaaccacatctcattactaaatttccattatataaatatatagataattaatagattttattttattttgtttgatcatatatatcccatattattttctaattgcattatgattagttacatttatgaatgatatgaattataatttacatgcatatatattagagtattaggttgatattacgtgtaatagtgtaatatgtatatgtttaattttttttttaattaaataatgtattttttttttttaatttttaaaatgaaatttgagattttgatttgtgagattttttttaactattgtagcaacattatgagatatttacatacacatatgcattatgtctcataattttggagtttaggagtactccaataatatagatacatgtatattaatttttatatatacaatatggttttgtaatggaaattatatatatatatatgcgcatattttttaattatatatatgatcactcattatcatgaactatatagcctttttatatatacatgcatacatcgatctctaaatatcaaaaagcctttaatttccttgtatatatatacatattatataataaataggtgcccctactaatttcgaagccattagaataatttaatctaagaaaatatataacaaaataaataaaataaaataaaacctcaagtatgctattagctcattctctgatcgatcataatatatataaattaatatttaaagtgttttgcatggaaagaatagaattaattcacaaaacctaattatatataattaagctggtttttcccatgcacgtgtaaattcctcttttttgtcaattggttaattatatatatatatttataccaacttatacagtgtgtgtattcccacattaatttaccaaaaataccaaattaatatttgtaaatatattaatcaaaaatatcttagacaagaaaattagctgtatctctcattcagaattagttggtatatattaattgaagagagaaagtggacttgtaattttggattttcgaaagcatgttccaatctgcaattaattaaattccaaactataattacacacaatcacacacatatatataaaatgaattatataataacttaattttagtattggtggtggggtgtgttacaaattccaagtagttaatttgtgagaggttcaaggtgaaaaaataattatagtctacaagtccaccattatatcacctaactccacgtggccacacatcatcactatcctaatcaccataagatactagtaatatctaatgctgtgtttaatatatattgctattaattcattaagtatcacatcctatataaaatattattagccaatcataaagcgacatatttaaaaggttaattaggatttttgctttttgaactttgacatgtaccaaatcatgccacctgaacttttaaggtcgtcaaaaatgtccccttaactatatattgagattgttggat

SEQ ID NO: 56675 - DNA, 901 bp, Cannabis sativa
acttcaccaaagattcaaaaggatattgtaaatgcatgtgctgttgaaacaatcaatgttattattgaagacattggtgatgctatattttctgtgttagttgatgaatcctgtgatgtaactataaaagagcaaatggtcgtaatgtttcattatgtggacaagaaatgttatgtaattgaacgattcattgagattgaacatgttccaaatactacagcaatctcactaaaaatagcaattgataagctatattcaaagcatgggttgagcatatttagattacgtggtcaagggtatgatagagctagtaacatgagtggagagtttaacggtttaaagagtattatcatgaaggaaaatgaatgtgctttctttgtctattgttttgctcatcagttacagttaacgctcatggatgtggccaaaaaacatgatttaataggtattttctttattatttattatttttaatactcatttcataaaccatgttccaataattaatgatttttattttgcaaaaatataggtacttttctcattgtggtatcaaatgtggtgaatattgttggagcatcatctaagcgtcgtggcattcttcgagaaaaacaagctgccaaagtcattgaagcattaaaaagtggacaactttcaagtagaaaaggcctaaatcaagaaaattggattaaatgtccatgtgagacacgttggggatcacatttttgtactttggtaagctttactatcatgttttcatctattattgatgtgcttgaggaaattgcaagtgatagtttgaatagtgaccaaaagtctgaagcatctattatgttacaagtggtgcaaacatatgattttgtatttagcttgcatttggtgaagaatatacttggaatta

SEQ ID NO: 56676 - DNA, 1641 bp, Cannabis sativa
tttcatattttatggtgccaaaaactgtatttcaacaatgtgttttacacgtataacaaatagatgtgtaactaattggaacttttttaaaataattagtcaaatatctgagataactacaatatacatcaaaaaaaaaaaaaaatctctattaaccaaaaatacaaacgtttgcagtagaactcctacctgaaaaaatgctatatatatcacttatatatatgtatataaaatacagtaactactattaatacctcttataatgtcattttgtggtctcatcattcatcttgcaatctccaacaactttgtcatccatgaattttacttcaaaattgatgagaactaatgtataaactatacttatataactaacctaaattaaaggaagaattcccaaattaatgctacttttattttctgttaatatgttgtgacttgtgctaggtcttacttttattgtagatgacaccccaataatgccatacattacatgctttctttctctctgctttttatatttaaatttgaagattgacaaagtattattggcatcttgcaatctctactttctagtttttacttacttttattcactcctcattatatgcgtgaactaattttctgaccaaagaaatgattcatccaaataatcatatggaaagtccttcatccaaattgtgtcaagttgaatgtgaatattccaatcaatcttcaagattgtttgtgattataaaggttttccatttagttctcttgagaaagactttcaaggtttttgactcgaaaacatggagagtctggccatttttttttttttttttttggattccttatttcttcattcgaaattgtttgtgctccttgtttttacttttaatgatttgtttcttccaatgtagttataatataaagaacattatattctttgtatctcattttaagtgtatgacatgttagtcaattgtacaatgatactaccgttactcatagtttagttaaatatacaattcaaatagaaaatgaaatttatcaatgagcttgatcaataataaagaaaacacattttcatatattaattaaagtagatttaaaatttatagaattctatcaattccatgtcctaattctattttctttctcctcaaaattatgtgtaaagataaagtgactagctatgaagtttgcatatactttatttcattcacactaatttttatttttattattttattcagtaccatttgactttttcccaaataaatatgcttggtggaacttttatacataccacataaatatgtgtatcattgttgtgacactcaaattacacaacaatcaaattaaacagagacgagaaaacaatcaatatcaatgtgattaagaataaagaacctcatatttccatttgaaacatatgttgttgttcactttcttttttctgtatgccgatctgcacatatatatatatataaaatatcataaatatagttacttatacaataaatatcaaaatctgtacaagttttccaacggccaattctgttttgtacactataatatatttacaaacaagctggtccctatgcgcagagtatccatctctcacaaaactcgcttctgtcgttgaatggcttactt

SEQ ID NO: 56677 - DNA, 944 bp, Cannabis sativa
ttagacaagggtatacatggcccttggtaagtgtttgaagactttaacgacatactgagtctagaagaaagagtcaaaaacaacaagttgacaggtttcaaagattgtataaccgaatgcgaggtggaagatgttaagtacttgggcaactatattacttggaataataagcaaggggaaggtgacagaatctactctaaaatagacagaattatgccgaatcaagcatggatagactactacatagatgtagaagatactttttaacggaaggccaatttgatcattgtcctgcggttttgtcagtctatcctcacctgaatattggaaaaaaacctttcagattttttagattttggcagcaatcaaaaggcattctagagctaattttcaaggcttggaaagaaagagtacaagggacacccatgtttaagctaattgctaagcttaaaattttgaagaaagagattagagtctttaattggttggatgctggggacattgcagccaaagacatcaaagcacaaagtcttttaaaaacctggtaagaaagcttgcaaagggatcctcttcacagtaaactcattcatgatgagagaatggctaatgagcgatataaggaaactcatagtaaatatctttcctttcttgctcaaaaagctaaggcacattggctagaagatggcgacgctaatacttcaatcttccatgccaacatcagagcaagaagacaagagaatagaattctcttcattaaagatatggctagaaattggattagtgatccatccaaagttagtgatacttttctcgatttttacacaaagttgttggggactaaaatggagaataggaggactgtgttgaaaagtggcatctcggctggacctattttaaatgctgatcaaaaagctctactcagcaaactatattcgaatgaggaa

SEQ ID NO: 56678 - DNA, 2192 bp, Cannabis sativa
aagttattggagctactggatttatggattatgtatacacatctaataaattaaataatcagttataatctacagatactgcataattcaatttgtaatatggattttaacggaaaaaacagctagaatttaacctgttcttttggaatgccaacaacagatgcaacatattctgctgtacttctcttgtccccagagagcatatatacattaattccttgtcgggacaaagattcaacaacttgtctagcatcttccctgatctgatcctcaaaataaataacaccagctagattgttatctactccaacatagacaacagattgattcttaatggtttcttctacttgaaaattattctcaataaccccgttcctgcaaaaataaaataaaaatcttaaattaataaatactgcaatcacatgaaatgaccgaagagcagtgatagccagcttcttgtagagacaagcatcccaaagacaaggttagtccctttctctgtgatgccaagaaacatttttgctaaaataatcaactagagcggagattttaactccgtataaaaatctacatgcctgctatctggcttcaaactaagtgatttctactaccacaaggtatatatttattagcttacatatcaataagaacctgaagtgatgagaaaagagaagaggaaatggtttcaacatgactagaatgatcatgcaacatgtccgtaataactcaaattatcagctactaagacaaatgccatcagatttcaatactaaatgaggaacatctactattaagttttgtgaagattccagataatacaacgtcaaatgaaattttctttctaaaatcaacttgaaagtaattgaaaactttttaacagtctaaacagcattaacgtatgtgctgaaaaatttcattttttaaaagtgaaattatcccattttcaatgcaataagaatgataatatattagagccatcaaatcagaacaagtagcaaaaaacagcaaaggcatattacctctggacccaatccaaggtgccaactgacacctttttgttgtcaatggttgcaaccgcaccagacccgggctcttccatgaaagttccatcagctacctataacacagacaagaaagttccatgaaagtgtgagatgtagagattggtaattatacatgtaatgtgctattttttagcctcctaatttctttttgttttctctaatctgctggttgtacctatacgagatgagtaaagatgtgattttgtttttaaaaaaataagaaaagaaagaaggatgagaagtctgatcataactgtgtcaaatactcaaataaggaagtaaaagaaccctgaagaagtatctatcaaatgaatttgtgaaaaggtaccttcacattttggggatttatagcccgagcagcatccacaattgctttaccaacaggatgaactgtatttgcttccacggcggctgctaacttcaaaatctctgcttctgacaaaaaatggtccgactgttgtacactgaaagggaaagagggaatgatggggttattatcttctcaaaacaaaacgtgagtgacctttagacttaagttaagcctcaacaatgcatcttctaccggaccttatagcctaacaaggagacacaccttgaaactatttttgaaacaaccgtgtgaatcttgatatatgtttcggaggagaaaaaatatggaaataatttaacgaatcctaataaccttgggcttcactttgagcatctacgcaccttgataatataagatatattgatataacaagatggatgaacaagaagtacacacacacaagcaaaggcttgtttgtataactgatttaaagatgtctcttattttccgtttgatgtggtgcattcattttcctccaactctttcttgatgaagttttccaaatctagttttttttttaaaatatatctatatattcttctatttctcctagtatataaatttcacttctaaatcaattctgcaaggatctatactggtaaaggagaatttctacagtgttaatgtgcagtgccattttaaaaatgttcaggagttctgcctagtgtgacttctacagtgtatagaagaaattatgtttccaagtgatgagcaaaacagaaaattttcggctcgattagaattttcacatacctggg

SEQ ID NO: 56679 - DNA, 743 bp, Cannabis sativa
ctaagcaaataaaataggtgtggtgtgagacttgataaaaaataaaacatatatatttcatttaataaaataaaatgaatttggcattataaaattactatatagccctcacgaaatatttgaaaaaaaggattgtaaggtctattaagttggaggtgaataagaaacttattatatactagtggcaaagcacatccaaagggttgtgctgccaattttttttaacaatttttttaatttttttaaaaataatcatatatatttatttttaaatttaaataataaattttaaatacgtaacactatgtatacattaattttaaataataaaattgagcaatacatatagaatctattagatcatacataatttttactatgaaaaaatagttgtaatatttatttaataaaaatttatattatgttcaaaagactttaaatttttagttaaaaggtattattagttagttttaattttatattaactttacactatgtatactgttatttaaataatttatttaaaattatataataagggaagaaaaaaatgttaagtaaaaatttttatttttaaggatgttaattagattattaaattaggtgtgtttggtaacattttgtctgaggtcgggaccgggggcgggtccgggttaatttctaaggtctaaattaggtttggagttcaaaatattaattaaaataactgtttaaaaaaaaaaattgaaaatgatttttttttt

SEQ ID NO: 56680 - DNA, 1052 bp, Cannabis sativa
agagaaaatgtaaaaaagttgctttaaccgtgtgtaggtttatttgaaataaagtgtgtaaattgcatttttggtataaaaatttcttattaatatcattttatttttttttaaaataaatatatcattaaatattataataatatgtataaagttttaactgtatacaagcagtcctatagtaaaagtatacaccttatattataataaccacaagatctaaaatcaatggtaaaaaaaaagttccctacttgtagaaaactttttctaggttctaccatagtcttgccatatttatattatatctataaaagttatattcaaaataaaaatcaactaaattaaaaacaaaattaacttgatatttatttactctaataccattcaaaaactataaaacacctaaaaacaatataaaaaaataatattaaaatatgtaattgtgaaaacttaacatatatatatattatataataacatacatatatttttttctcttagttgaacatttaataacaataaacaattgcaatggtaggcaacactcataattgacatatttttttataaaaattactccaatagtgagcaactctaaaaattgctcattatgatcccacaaaccactttttaactaaattttataattacatgttctctcaaaaattgatttgtgataaaatattttttttaaataaataaataaataaataaataatgctacatgatcattgcttattttaataatgttcataacccagtacttgcttctccatcgttctgatcctccaacaaactatcacggtaaatatctctctctctgattttctttttttttttctttttcgtacactgaattcattccattttatatagctgtatttcgatattatgtgaattgtgatagtgttttagttggtgtatatattgtttgatataatgttttttgtgattcatgaaagaattagttatattaagggccagtgatcacgattctgaagcaacttttctgtagtttaatacctcttgatcatattcattgttcaagttac

SEQ ID NO: 56681 - DNA, 1788 bp, Cannabis sativa
  modified_base (735)..(738): a, c, t, g, unknown or other
aatttcacataaacacataatttgcattctatttatagattaacatgtagagctcgaatagttatggaggttgtgaccttataaaattgttctttggtagtcatgagactagttccgatattttcttgttgaatctaaggtgatttagagttaaaaattgagtttaaaactttttatagcttaaatctgaacattagtgatgtttaccaattaagggctcaattttagtttctattatgtatgaatggttatatgtatggtatttgtgtgtcctgtgaagtttggagtggtttggacaagtttcagtagcgtttcggtgagtgcgtaaattgagaatcgagagtttttaccccttgcccccaaccgattaactggttgtgaaaatcggtcaaccggtttaccatttctgggcagtcttgggaaattagggaatcatagttttatcctaatttctcactcgggtgtccgttttggatgtctatataacgtttcaaagcttgagacaagctttacaatatggtttatattttagagccaaaatataagtttattttagtgtatttgtactacggggtttggtaggaaaccctaggttgtcctttacaactattaagtagtattttgggataaatatacatattgatttattattgttacgacataggacctgggatcatcgatcgttctccaagcaagtcggccaatatacttgaactagaacttgaggtaagaaannnntaatgtaccacatggcatgacaggctctgtaattgtcggttgtctgattaggcaatggcaatgtgacgataccgtggatatgatatacaggctcaccttattaggtgatgcgatatgatgggcatcgtaccttattaggtacgagcgacagtgacatgtaagtaccgagcatagatacgagctcgtctgattaggtgatgtgatatattggtgtcaagttgtagcatgtgtgacatgtgagtaccgagcgtaggtaagggctcgtctaattaggcgatgcgagatattggtgctaggttgtggcataagctcacctaattaggtggtgcagtgatattatatatgatgttacattatgacacgggcttgcctgattaggcaatacaaatacatgagcatatctatttctatgcatatgactggttatattatctactattgaatgttatggtttaaccatttaataataatgaaatgacatcttagaatggtgtggaaagtatgcacaggaactttgagatgctgggacataacaaaagcttaaagagcaacgtgctacaaccaaatggaagttgcctaatgtaggtgaatacaccgtaaatgttgatgcttgctagggttgttcacagattggtttggcccaggcttttatatttttttaaccaaatcagtataatggtttgaatattgaaaaccaaaccagaccaataaatttctcaaatcgaaccattaagaacggtttggtttggttcaaaatcacagtttaagtagaatttacaattattcatatattttaagtaattgtactatttttactaaatttttaattttattttcacaatatatatttaacatgataagtaatagatctataacatataaataacaatataaaaacattctcaaaattcaaacgtaacataaaaatccaaaattcatgcaataaaaaactaacacacattaaagtttaaaattatacatatagtcatatataaaatatatatatatataaattaattatttatcataaacggttcggtccggtttaac

SEQ ID NO: 56682 - DNA, 953 bp, Cannabis sativa
agtattcaatctaatttgtcatctttgttagattaagggatggaaaatgataacttttgccatagtacttgagctttgaaaggaaaccctgtgtacgttcatgataaaagtgacataaatataaaagttgatattgaacttataatcaatttacattatgaaggaaaaaaaaaattacattatgaaggatatgccctatacttgaacaaacatgtctggtatgagtgaaattcattaacaatataaatttgaagttagcctttcatcatcttcatacatcccacaatttgtttaatgcgtatgctattatttatatcctaaacatccaattttgaatttcttttcagatagccactacttaaatgaagcaattgaccgattgaagaacaaacttattctttcttgaataggaaactaccctggtattaaagtaagaaatatttctttcatatatttacatgtgtattacatttacttacacatataaagacacataatttggcattttctcttttctatgtagaggccaatataggtgtaattgttagttttagcttgccaagaagctaagaatttgattcattttaattttcattgtttcccttatagactgtagtgaataatatattttagaaatattttctaccagcaatcgatcacagctgtctttataccctttgcaatgagatttggcttaagaactttcttaatgaactagagttcgtcctggttagagttgttccatatgcttaattttacttttactcaaatagattgattctgaggaaaaaattgccaacttagaagtttctgccttaggggttgattctaagctaaagttagatgcaatgaaagttatgggaacccacaactattatcatgctgctgttgttggactgggaattggagtcgatgttgaagccattggttcaactattgaaaagctaaggctg

SEQ ID NO: 56683 - DNA, 951 bp, Cannabis sativa
acttcaaaccagataatacataaccataatttatgcctaaaataaaataagaaactttacagtataagttgagaatttttttttgttatgtacatacctgttgatatatataatgggaatacgattcataaaattaagtataaattaaaaagtaataaaaaaaggcaaaatttaaaataaaaaaaatgaaaaagagtatacacttaaatattttatttttttttaggggtaaaaatactcaatcttacaattctcatatattcgttactacaacttttattaactcataaatataaatacgtggagggtacaaatatattacatttattttattttttattttaaagcttaattttgcatctctcttattttatttttgaaataagtaatatttaatttttgatattaaatattaaatattaaattttaaaataaaataaataaatgtaatgtgtttgggtcctttatatgtctctatttattagttaagggaagtggtagtaacgaatataagagaattgtaatattgagtatttttgtaaggaatattataatgggagctatacaataggtattgtaattcttacctatcaaatagatataatgatttatagccattgatttaatcaaagggcttaaattaactcttggaaactacaccatacttaatatttttttatttataattaattttaaatattaatttggatccaactaacaatacttcaaagctaataactccaaacctataatttttcttacttatttaccttataacttgttataattttaattaattattttttaattttgaatttatatattaatttaattttctacttaacaaaaattatagctaaaagagtacaaaatattcaagttatttaatcctaaaataatcaatacaatcaacaatataatcatagtgtaagtggtaaaattctcttacat

SEQ ID NO: 56684 - DNA, 952 bp, Cannabis sativa
attttgctcagatatgctatcattttttctcctcgagcctcgtattctccagatacatgatttaccaccagctgtgaataactgcagatttaaatgttttgggctttcatctgccgggctaattttaggccactaatgaaagcttcatattcgacttcgttattggatgccttgaatcaaaacttaactgcagcgtgcaggtgtttcccaccaggtgtgacaagggtgattcctgcaccggatagttgatctgtagtcgacccgtccacatgtggtttccaaatcagcttgtcttcactgtttcttggctgaagtgtttttactggcttagggtttccttccgagatgctttcttctttgcatgtgcattctaccacaaagtctgctagggcttgaccttggattattgttcggggttggaaggtaatttcgtactgacccagctccacttccctcttaagtaaccgtccagatgtgtttgacttttgcaatattttgcataatggttggttagtgtacacccgaataggatgggcttgaaagtagggccttaactttcttgttgccagaatcaagtagcaagcgagtttctctatcaattgttaccggcctttggcctcaatgagtctcttactaatgtaatagaccgggtgttgtatgttgttttcttctctgatcagcacggcactcacagccgctctgtgacagctaagtatatcccatgttcttctctgtccagaggtttcaagagtacgggaggcttttgcgagttgcatttttagctcttctctgtccactcaaattgcttatttcctcgcaggatgttgaaaaatggaacacacttgtctcgttattttgaaacaaatttgctgagagcggcgatccgaccagtcaaacatcgtattcctttgttcttgttggcgattttatatcaaggagggcttgaatcttc

SEQ ID NO: 56685 - DNA, 1193 bp, Cannabis sativa
aaatctccaatttcaaatcatacgccaaaggatcaacctccaactcttcatataaaatctgacgcaattgttgtatggttgtgtcagttctaactattaacgtcaatctgtcttcagctttataaatccaattaaaaccttcaacacaccaaacaccattgtacgatataacaagaaacacaattgatcctgtaatttgaaacaagaaaaggttcgttaggaaacaataccaaaaaaatataaaaaccaaaattgaagaaatttaatataatcgataacctatcgacatctcatcgatatcccatcgataagaagtgccatgatttcgagcagtgagaaaaattgacaagtgtcaataatctatagatataatgtcatgtcattgaggcatttgggacactcaacaaaattgtcgacatatcgataaagattggcttcaagaacctatcgaaaatctatcgaataaaattcgagaaaggtcatcccaaaccttggaacatctgcttcgagaaccattcgagaacttatcgataacaattcgagaaaaataatgtcatgacatgacattgaggcagttgagacactatacagaactatcgacatatcatcgatatcatatcgataagtattggcttcgagaacctttcgaaaacctatcaaataacattcgagaaaggtcattcctgaccttgcaacatctgcttcgagaactaatcgataaccagtcgagaaaaatacaaaacccaaaagactcatatcgataaatattggctttgagaacctatcgaaaacctatcgaaaagcattcgagaaaggtcatccctaactttggaacatctgcttcgagaagctttcgagaactaattgataatcagtcgagaaaaatacaaaaccctgaatactctgaaaaaataaatctcgcaattttgacgaaaattttacgaacaacaccatagatttactgaaatatgctatacttttacaattatttaacaaatgttttaaaaaaacacttacccattaatccacaatgaaagagaggtcgaggaggggcggcgcggtggtcggaatgaggcatgaaggatcgtcggcgtccttcacggtggttgggctggttcgagtaggtggccggacatcctcaatggttgtaggcagcggagctagagagaaatgagtgttggaaattattttac

SEQ ID NO: 56686 - DNA, 1361 bp, Cannabis sativa
accaatcttgatgatttcaaagaaagaaaatatatattcagatttaaaaattaatattactatagtatatattaaaatagactcaatctaataactaaagtctttttttttttttttaccaaaaacaaaagcaattaatgaactaaaagtttacattaaatgccctacagatgggattttttttaatgcctcaccttagaaatttcttataaatacatacataaagatcttaaattttagggtggacaattgccaagactagaatagaaaaatatattatgagaaatgttaaaaggcacttatattatctagcacttttaagatattatatcactaatagaatcgtattgagtcccacataattttattttaataattatgactacccatcccacatgatttaattttaataatatactatatcgttaactatttgtaattaggcgttagttcatagtagtagtaagcactaataataccaaataacaacactcatatattataatatatgaaatcataatttatatattgttattacgtaccttgtgaccagccacgtcatccatgtacctgcaaacactagcgcttgccctaacaatcttggggtctttggagagccactcgaaaacttgtttggttacaatattgttacttttcattccaactaaagagcaagccatcaacatgaaataaccagaagtaaccaaagaaacttttaaatgctcctcaaaacttggcatgtatccttcattcaaccatcgagcttcctcaaaataacctcttaataatcttttaaactgcatgtttatatatatataaatatattattaaaaaataattagaattataaaaaaaaaagtaaaaaataattataagtatgtcagttttgcttctgttgtagaaacttttttgcacctaaaaaatttatattttaattatttttgtacaataatgtacattatatttgtattaagcattctaattgttttttgaaattttgaattatttactgttgctaaaaataaaaaacacttaataaaaattattttaaactttatttctgacatggtatgtaaattattttcagatttttataaaaaacagttgagatttgagatgtctgtttataactacaatatacaatgttatattaattttctgttttataactctttaagtgccaaaaatataaaatgcccttgtgctagaagtaaaaataatatttaatttttacctataattctacctatatattactttgtatctgttagaatttgggataaggtgaatggggttccatctcaaaatcaagtggctctttttgctctactttttggatcggtatttttggtggctctttt

SEQ ID NO: 56687 - DNA, 1212 bp, Cannabis sativa
tgttttatcggtttggatttggatctggatctgggtctaggtggattatcttctcgacaacgatcttccttcaagcaacctctttggtaaggattatcaggatgtcgccttttcatgcaattctctggatgtttaacgctacatccaggattttcatctcttataattgttccatacccaatgtatcttccatcaataacactactactccatgcataaaataagcttattatacaaacaacaacaattgctctttttgataaatacatatttcccagtttttgctttaaaattctttctttttaactagttgtatgattaatgtttatatgttatggagtttatatactcatatatggattgaatatatactaatattagaggtaattttgtttaaactgaaatgattaaggctacattttgctagctagaaagactatatattaatatattatgttataaagataacaaacagataggatgaaaaatgtttttcgatttttattctgtttatctgtttctatgttttatgtttatcttctaatatcaatttgcacgaaattctctcataattaatgttagtttcttttttttttgtttagtatttttcatgtgatttataatataaatttaatgcattatatatatagacatgcaatagtgagaaataactttgtctatactattttttttaaaagaaaatagtacaatatatatttgtgtaaatatatagataataatatgaaattattaatttaataaaaaaaattataaatcacatgcatacatttaaaagaaaaagttctctaatttgttatattcaacttttacaaaaaaacaataaaataatgataaataagattcgcccacaagataggaatacaccttgaagacacacaagccaacaaagaggactttgaccaactgttaaaagacgaaacgaagtgccacgtgtcaaagaacataaaaattgtgatcaatgtcctaaccaaattgcatacctagctaggtttagcccttaggatttatatcttttcaataattcaagaaatggcaattcagtttgaaactgtaacccaaggaaaattccaacaaggggacaacaatgcttaactagtttagaataaaagaatacaaatgacaagacgacatcatcagatgcaaagagaaagtgttatacacgaccactgaaacttttctaatgtcagtggt

SEQ ID NO: 56688 - DNA, 805 bp, Cannabis sativa
tttgatccaatttaaagcttcccttacactcaaagcgcttcagctagcaaaggctcaactatgccattgtagaaaaacgtgcacccttcaacaagaaaccattctcgtccctagcaaccaaaccaaaaccgtagctatgaccatggttaaatagtgttgcatatacattaatcttgatactattggactgtggcaaagtctactactcttttattattaagttaaaagaataaaaatcgaaatttcttcttctggtgtaattttttaaggaaaataacaaaggaacaaaatttatgcaacgatgattttttttccatctagctatatataaaaattgacccactaataaaacacctacaaaataaaaaaaaatatatatatgtatatacataacaaatatttatttataaaatatcaaattttatataaatattgttacaataaagttttttgatgtaaaatttagccatacaaaatcaaaattaatcatattgtccttacaaaactaattagccacatataagtcatacaaaacaaaactagccatagccttacaaacatttataaaactatagaatagagatatatattacattacaaaaatcaaaaagtcacattagccataaaaaacatgaatacaaaacagtactctttttagtcaaaatatatggaaagaatgttacataaattaataaaattagttataaatcaaattacaaaaaatgagataataattacatagtaattatatatatatatatatatactagtaaaaagatatgtacgaggcacgtatactaaattt

SEQ ID NO: 56689 - DNA, 1183 bp, Cannabis sativa
ctgtaaataaaataaaaaaaatgtaaaaatatttaaaatttcgtgaaactgtatttttataatttttttgttatttttatatatttgtgaaattatcccaataacttattatgtaacgaacatcatgtttaattctatttagttttaatatatttatgcattaatttattaattaaaaaaaaaacataccatcacacaaaatttgagtatttaaaatgagaaaaaaaaacaaatgtggaatgaatggcactttttgctttctacattatttctataatgcttacttacccgttttaataatttattttccgagtattaatagccatcaaacaattgttataatggaaaaaaaaaacatcatagtaattcacgtgatacttgtccttaaatttgtttgacacgcacaaaaaaagtggagattggaatgagaattgtacaatattattttgatggcattgtgttgtgtgtgtacttttaggaagatagtagtaattaaagcaagctactctactctagatttaatttgcaacctagctagtaatgagaaagatatatataataagaggttttatagttagtggggcatttctttaatttattacttagtggacatttgaatattatacctcccaattaagcactatgaatatgatccaattccaaagtgactattactagtcggctttattattatgatcaattttgcctaccaacccatattgtgttgtaatgaaacttatgcatatactctctttattgatgccgataacagtagtcttttctcttaattcgatcaggttgagccacagtttgtgtcatgcgtagtggtacgaaggctaaagttatacccattgaaataatatactatagcatattggaaaacccaattaatgattgaaataaataactacttgatcacaacatcttttatgtatggtagttttacaaacccatcttatccttaatgaatacaattagtggtgggttgaaaatttgtgtataatttatatgtacacatattattactcttactgtctctttagtagatcttgttgtgttgtataatatatgttaagttaggttggattgtattgtataatattattttaatataatattttgttaggtattagcttatataaataggttgtttaccataaaatcgatcacaattctggaccta

SEQ ID NO: 56690 - DNA, 908 bp, Cannabis sativa
ttatattgaaaagaaatcaagttactatatagttgttatacatataaaaatatatttatatataacccaagttttcatgcaatattatagatatgtttggataattattaaaaagtattattgatgtctaacactctattcggtatcatatatataatttaagaaaatataatttttaataattatcgttaattaacgccacttatagaatatgatgtctaataacaattatcatatatttagaggaggctgggagattaaacttggaaaattatattaatatttatgaaagcctatataaattaaataaatatttatagttaattaatgtgatcatatcatgaaagtacccctttggattgattaattaatccttatttataataataataataataatattttggttctaaataagcgggcactcctaaaaaattattattattaatattataccagtaatattattatttaataaaatccaaacctacccttttatatatttatttatttttgatgaattaattaattaatatttcttataatgcttcaaatacttggttatatataataatatatatgatttagtgtcggttctcctagattacgtatgtatatagttatacgtaccatattattaattatgtagaaataatttgaaaagcaaatattttcatttgacaaaactaatatgatcagaaattaataattaatcaagaattatgatttctttaatgaagaaataaagaaacacttaagggactactatatgcagtgtttactggatcaaatccaatgtttttaggcttattcagatccgatctaatcatatatggatgttaaattttaccactgatccgatccaatcaatttcagttatccagtcgatccaacatctattggatgtt

SEQ ID NO: 56691 - DNA, 1113 bp, Cannabis sativa
tccctccgggatacaaagctcctcccgactcagtttgcaaactcaataagagcatatatggccttaaacaagcctctagacaatggtacgaaaaactaagtaccacattgaaagctgaaggatttcatcaatccctttcagataactctctattcatcaaacaaacacctaccctcactcttgctgtcctaatttacgtcgatgacataatagtggctagcaataacaaactagccataactcatttcaaacaattcttggacaacaagttcacccttaaagatatagggccactcaagttctttctcagcttggaaattggaagaacaaaacatgggatttctatttcccaaagacccttcaccttacaacttcttgctgacacaggttatcttggtgctaaaccggcttccactccaatggaaataaaccttaaactcagcaaagacaaagggaacctccttcccgaccctactatctatcgaagcttaatcggcaaattaatatacctcaccatcacgaggcccgatatttcttatgccgttaaccatctaagtcaattcctaacatgtccgagagtgccccatctacaagctacccatcgaatcttacaatatctcaaatgcactcccggacaaggtcttttttatccatcaaacaccaccccacatgtttcagcttttgctgaaactagcttatcttcaacaaatgttcaactttctttctttgcagacgctgattggggagcatgtcaagacacacgtcgatccatatcaggatactgtatcttccttggccaagctcttgtctcttggaaatcaaaaaagcaacaagttgtttctcgatcatctgctgaagccgaataccgcgccatggccaatgccacttccgaagtaacttggattgtagctctcctcaaagattttggcatatcactcaacaaacctgcgtctctatactgtgacaatactgctgccatccacatcagcgaaaacccagtatatcatgaacgcaccaaacatgtagaaattgattgccattttatccgcgagaagattcagcaaggaacactcaagttacttatatacaatccatcttgaaaggggctattag

SEQ ID NO: 56692 - DNA, 781 bp, Cannabis sativa
aaataaaacttcacataacacatcattttggcttacatgcattattattagagttagtcctagtaattagtaatgtgtgtcccttaattctaatctatatatgttcactacgtttcaaaaatacaattattttggccgagttttcttttttcttctctctataacttctattatatattgaatgagtgtgcatagtttgatatgtattttggattttgtgctttttcattttcaatctgtcatgtattgtcttccttctttgaattgtcaaaatcatgcatatatttgtttgtccttatatatcaaattaataatcatatatatatatatacacgatcatattgcaactcgactacatataaaaatctataaaagcattaaaatcatttcataatttgtctgataaaaaaaaaatagaatatataatatatgtatatgtacactaattaattaaattttccccatagttgatgctgagtcggtaagtcactgttaacaatacatgtgtaacttaagaaatacctataataatatactgtactagctagttttggacagatgcatgtttgtgctccatttttaaatcctcctataacaattgattttgctatttattaaaatatttcctttacaaaaagagaatacaacatcgtatgccctgtaaacacatgtacatacatcagtcgcgtatacattagaaagctgatattttttttcttcaaaaaaaaaaaaaagaaagctgatattttatttaataattttgtcaatttttcatttgtat

SEQ ID NO: 56693 - DNA, 1899 bp, Cannabis sativa
cgtcggtattttgtgtagctctatgtacactaatgccgccgttactgctatgttaactaacaggcattcataaacatgcacactaaacatgtaattacatatgatactattatactattcttaccttgattccgaatttaggtgtatcggtcaacctgggtggaactgctactggacggtttacagtcccctaagtcacaacatacacaaaactgataagtgatacgctaaatcactttttggagacttagactcaaaactaaaagtttccttatcgataaatagcttggcaacacactaaatattaagaaaacatggagaaaatgataaaacgaggaaactgcctgaaaaacagtaggtcgtttctgtaaaaatagcgagccgtttttttgggtttttgctccccagtaaaaatggtagaccgtttttcactatagaaaaataaagagtctccaaaacgactcaaaactacccaaacttcaaactaagctccattatacctataatcatcatagtgaaccatttccaagtgataaaaccagatataatacaatgtaacacaattcaccattgttaagtcaattcacaattcaaactaagctcaaacttgctcaactcaagcatcaaccactaaaaccacaaaaattaagcttaaaataacttgaatatactacagaaaaaatcaagaacaaaccgtaattctaatagtaacaactcaacaattgcatgctcaaaactaaagaaaactcatgtttggatcacaccacttgaattcagctaaaattcacttgaattactgaaaaacactctgaatttccccttgttttggttgaaccgaaacaagagagaaagagagcaacaacagattttctagttttttatcttttcctttgtttaattaattaacttagataaatcaatagttttaacttaatccactaaacaaaataattgccagctgccatcaaaagggaaagccacctaaatccaaaactaaaatacctatttgaccctcacttaaatgctaattactaaaatggactaggggtaaaatagtctaacaccataacccccctaatcccgatattctaaatatcaacaataattcccctactaagaccaagatacaagaccttgtctatgtgactttaccgattaaatgtcgcgttccattgttactgggcataaaaatatgaaaaatataaaattcatagatatcataattaatacacttagaattcaaatatatctccataatcataaaaataataattaaaagtctacttttgaaaataaaccctaattatctgttaattctcaaaataaaactaagtggtcattacatcagatctaattgatctatgataaactaggtgatatgaccttaaaataattatagaggtaagattatgatcactgttctatttgtcaataatggtctcgttccgatgtaaatccttacctccaatgacaagtttattttgttagttccttggaaaaaaaatataccatttactaaaagtgtaaataaaccttagatattgattatcaaatcagtgtaaatttagtgtattcataaatcatgaaatttaaatattcgaatcatataatcataattaatttttactgtgatgatgttgctataattataaataacttatatcttctaaatttaaaataaattttttatattaaacatataattatttaggtaaataaatatatgaactaaacaattgataaaataaaaatataatttttgaattttattaattaaaaataatattaaattgaatttaagttttatttaacacaaaatcccaacattgataacatagatgataaatatcaataaagaatttcttttccccaagtttgattatcttgatagtattataa

SEQ ID NO: 56694 - DNA, 827 bp, Cannabis sativa
aaatctaagcccaggggcgtgttctctgaggccgaaaatgttcatatattaattggattgtacttatacacgaaaacgtccaattcggcacaaaacaaaattagttttgaagcaattaaaatcaagaaaaaggtgaaaacactactaaaagataaaatttcaaaaaggaggaagacttatcaatattgaagcaatcagataacttgcattccctccgttgaactcgtaagaatctcagtcacagaatagtgtatcatcgtcatcttcttcccttcgataagtcgccattgtcaaaactctaagcacatcttcttgtatcagaagtgattcgaatcaaccattttgaaatatgactgacgttattgtcttaaataagtgaaatgggtaaataaattataatttttggaatcatattaaaaaaataaatataattaaaaaaaaaattgtttgtgacttgctatatagtaagtcaccaaattgtcacctcattagttttttttgttacccattaatgcgtattacccatttagatatcatccatatatatataaaggagaagtatgagacggtgacgtggcggtctgaaatcacttcaaatagcactatctgttctctccttaattctctcatttttttttaattttttattaaatttataaatattaattgattaattaattaaataaaatattcctataatttttttttaaaaaaccaaatatatttataaattctaaaaattaaataataaatctaccgatatttatttatcaattttattaattgacttattctattatttggtatatatatattttttaaaatat

SEQ ID NO: 56695 - DNA, 867 bp, Cannabis sativa
caacggaggatattttagtcacttgaggaaatatagaatttggtaatgttagaaaatatgtcatgtaagttcaattagttggtaatggcggggttgttgttgtggaccattttacccccaagccgatttttgatctaggtttagtgatgggggtaatttagtaatttacctttattttaaatgggtgtctttaccatattttgacagcttccaattaattaggtaaaggttaattaaataaccttttatttgttaattggagaaattaggaatagaagaggaaaacccttcattgttctccttcttctttgttcggccagcaagaatcatcagccaagggggatttttctttcaatttctgaagctattaggtggaatttgagggcttgatctgaggtaaaccctaagcttgttctattgtgagtttatgatgttcttttgaaggttttgttaggttaaggatgattttgatgaacttgattatgtattgttaattttcgtttaggttagcttcggtaggtcttagatgaagttttaagattgttggagttattttggtggtaatttgtgggtttggtcaagtttgagttcatggagctcaaacttgacgcaaccatggcatgttgagttttgttgtgtttttcttgctactgttgtgtgggatttgttctagaatgtatttgcaggtgttctggaaggtatggttgcgtttgggaaagatttggacgagttgtgcaatttttggggattgctggagcaaaccggtccaccagttttacaaggtatgtaaaactggttagccagttttcatgccaggtccccggaatcttgacttttccgagactgtgttattttttgagcatggtt

SEQ ID NO: 56696 - DNA, 1753 bp, Cannabis sativa
tagtagtatttagtccaattccctgtggttcgacctcacttgcgtgagctactacttgattgcgtatacttgcgtagtgatcataatttttgtaatagtgttcagaaatacaatacatctaatatctaatctaactattaatatttttatttagtttaggtaaacaattataatttatattgttatacttaaatatatacgtatacatgaaagttaaaattaaattttgacattttcttgttgaattggatggttcctatttgatctaaaatattagatggatccgatcagatccaaaaaattgcatgcctaaaatatgtgataaagttgaactaattcaataaatgtacatgtaatacatccaatggatagaaccgatccaatccaacatccattgaatgttggatcaatcgtgtttaccaagatttcaataagtaagagccttaagaaattaaatagtgattaagtaaaagagatgatggatttttatgtggttctagcattaattattactagtccacgagtcggtagtggccttttaggcttttaaatgtattataaatgagttttacaataagaaaccctaaccctgactataagatggtttctcaagatttctcttggagaagaagaaagcttagagtaaaactagcaaagcttcagctaaaactctatcccccttgcatgaagggataatggggtttatataggctagagttcgagtccgggcatacccatgacccattcaattttcatcgtaaaagcaagcccactgatgggttaaatacacaaatacatgactatgaggcccattaagaatatccaactcgtggggcgacagtttcatactgatgacgggaccatttttataggacacgtgttgcacggaggtcattcttggcagacaaaggtgtcaggggagctattggacaaaaggggtgtatgaaaatgtagtggtggtgcgcccactaccatgatctgacactggggatagtatctgatcttgtgtcaaagaggtgaacatgtcaataaaggggagatatccacctcttgtcttatggtagacatccggtactcaccttgcggtagacatccaactttggtccatggtaggctttcgagagtcatcccgccgtagacatctaggagtatctcgcgtagtctgcctccttgtgtgcccttatcctcattcaaaagtcttcataccttctgttaacgcagattttcgttaaccaaatttgagcctcgcgatgataattcaacacagaaaaaataaaagttatagaaaaataaaatatgaacacggggttttttacgtagttttgtagttaaaactctgcatagtccacgagtcaatcttattcaaatttctgggtgttttttttagggcctcttgcataagagttttttcgtcccccttcttgatcttgcataagagtttctcgccaatacataagtttaaaaggctattcaaccagccgagttataaacataccctgcaaattatatttccaacaagtcgttccatgtcgagcatatttgtcgtttgcgtgtttaagtttttcccagctcgacacgtgtcctcctctgatgtgcttaccgaacttcgggtataacaactgccactaagggtgtcatgccatctctaacttggcagagtatttacgatgggaaagatttgttggttaagggccttcactggaaaattggtttcggaaataaagtttgctatgctaaagatccttggtttcca

SEQ ID NO: 56697 - DNA, 1172 bp, Cannabis sativa
aggtagttagggtgttacaacctgcttccaattttcatatgacatccctattgtcatacgacatctaactcctaaagtcaatactagcttgacatagttttttccacaatactctcctttatcattgacaaggagacgaagtctttttccttggtccatcagcttggacacttcattcatctcagttctacctcgtttaggaatctccctaggacactctgttgttgggtctgaatctgagtttgaagctatgttagccatatctacaccattaacaaacaaaatataaaattagctataatagagtaactgtgtacattaaaaaaaagtatcacaagtaagctataacaaatattaactacataaacaaacattatcacaagtaagttactaattagacacgttttcttttcttttttgtttatctttgcctaaatcacaattgacccatattccctcattgacatcgtttctaatgtatttagcagcatcttcctcaaggttacgatcaatttccatagtttgttcatgaattggttgcccaacaatgaagtcatcataacataaatatgcattctcctcatcctcttcattctctaagaaccttctctctggtgtcgataaaacaacaatccatttatcattagccgtatcataaatgtaaaacacttgtactgcttggctagccatgatgaatggatcattcttgcttcctctcttacttaaattaaccaaagtaaaacctagctcattagtttttactctaatattgttgtcaaccaaagaacattaaaaaggtggaattcaaaacgcaaaataatggagctcccatatttcttcaataaccccataatacgtcatgatacctgaaacatggtttttatcttttgcacttgcaaaatgtatggtttcttccacaatacatatgccactattttgaacctctcgagcatcatctcttgactttgtatgaaaatgtttaccccttacaatgtacgcttcatgctttgctactacaaaatttgttccaagggtaatacgactcaactcatcagatactccatgattcagttcgttcaactttgctatataatggtattccttaaccccctaataaaagtttgacgatgctcgtctgcaatctattcttgtttatttttatgatttcttag

SEQ ID NO: 56698 - DNA, 680 bp, Cannabis sativa
agtgtattctgattataatcgtgtatgttgtaatattatttaaaatctttacacaattttaaaaaattttaaataagttattgtctaaaaaatatggttcaaaaaagttacttactatgcgtgttataaaaaacagtcaagggtgcaataaaaaatatttaaatttaatttttagtattataaattttataattttttaaaagaatttataagttgtcttaaataactaaatataggtgaaaaaattcaactaatttttttttaaatgttaaaacaaataagataagaaatatatcaaaacaaacctttgagtgtggtaaattttttccaagaagtttgttttattttatttatattttcgtacatgagatgagttattagtgactaaatatgttgtaatcttaaatgttttcaatgacttgactatgatgggtagttggagatggtaataacaactcaaccaccaaggccaatttgcactaaaagattggtcaataaactcaactcaaaactaaagccaaagggccaccaggctagcaacagtaaccattaaccaaaccaagttgttcgttcattcattcattcatttcatgcatatgatttgtatatttattctctctttagttgacacaacacaattttcttttccttcaaagcaaaggctctctctctctctctct

SEQ ID NO: 56699 - DNA, 1943 bp, Cannabis sativa
  modified_base (90)..(109): a, c, t, g, unknown or other
  modified_base (1247)..(1248): a, c, t, g, unknown or other
  modified_base (1298)..(1302): a, c, t, g, unknown or other
ttctacttttaaaagcagaaaactaattaaaaaagtgttaccaaacgccaccaaaatttttaaaaccaaaaattttactttcattttgtnnnnnnnnnnnnnnnnnnnnaaagtgttaccaaacgacacctaactttctcaattttttatatgatattttaaataactataatgtatatgactagcgatgtttatcaaactgtccatactgcacaaactgcttgcaccacaccacaccgcacaaaaaatgcaatttgaaatcttttatggtgcggttgcaatttgtattttcgtcaaaccgcgcggtgcagtgtgatttacggttttgaatttaataatcgtggttcaaactgcactgtattatatattacaaaaatactaagttttacattatgatttgtcttttcatatatgagcaactcgtatgattacaaagtccaaatcatacaattaaatttaagggacatccatataaattattttcattttttatttttttttaattttttattcttaacatattattattgatatgtatgcatattatataatttttagagacaattcaatataatgacttgattagtatatatgttatgactttaacagtttgataagatagtttttttcttgtctaattgttgaaactttattagactaatattttatttttatttataagtttgataatgatgatagtgtaaactggctaaatcacaacacatttttgcagtgtgattttcgcagttttaaagtcttacggtgcagttccaatttgagaaattgtaaaaatcgcatatgtattttgttttagaaaatagtctaaacctatcacccgcactgcgaacacccctatatatgactatgaaaaaattaaattgaaaatttttttgcatgtcaaaataaataaagaaagcattagtggaacccttttaagagatgtattgtggaaatatacaatattatatatgcacactataaatgttagggtgctactacagtacaccctttgaaaatagtatattgatgtattctctaactattttgatatctagaagaatattttagtctaatttttttatggtcgtgtacattataattatttaagacatcctacaaagttttgataaaaaaagttcttttttgcatttttacggaattttacatagaaactcttattgcagctagcaatacaacctaaattgcaataaaaaattatctagaaattcctattgcaactagcgctnnaaccactttagaaacacaaaccgtaaatttgaaaaaaaaaaagttaaaannnnngtatatggggtaatttccctatttaatattcaaatagtctatttcacacgtgtgttaaatatactgtttgaactctattttcactgtgttaattatttttaaattttttaaaatttcatagaatatacttaaaaaaaattcaaataccgaaagagataatactcaatcacgatccattgtagaattttcatttattgtccccacattcaaacagcgcgtgaaaacaccgcccaataaagacatgtggtatataaactattgttttaggagtgcgtaggttaagcccgcaataactatggatgcatcccccttggtttttaaaactacaccacgtaccaacgcctatatttcttgctattttgcgccactttttctgaaatttaccacttttttttttgttgggtgaaatttaccaccttaaattgaatatagaacttggagtttttctattttattagataaataaaaataaaactttaattttttatggttaaattttttcaattattattttacttacacttaattttttaaatttaaattttgacggtaaaaccctctaaatatataatgtatttactaattacaacatttttcatatttgtattaatataaaagtaatggttgtaagataaattaac

SEQ ID NO: 56700 - DNA, 704 bp, Cannabis sativa
taccgttagaatttatgatttccaatcattgtatttgaaaaagattctcttttcacctaatttctgccaactgtatttgagctaattgctcacatttgtaattggctcttggccatctctttctatataaagaaatcgaaatctcaacagcaaattgagctgaggaaatcaatttacaatatctctaaaaattaactagtagtacataaagacaatcaagttgtcaaaactaagtaaaaaaaaatcgtaatacaaaaataagttgatgagttggtattgttttacatattgtaacgaggttgatgtcttgatattattctcttgctttgtagttgtctttttattttttttaaattattttcatgttgttttataggtattgtatagtcgttttttttattttattcaacacttttttaattctgaaactttaacttttaagatagtatttttgaaaacttatgacaataaaattgttaaaagaaaaaataaaaataagacaataaaaatgtaaaaataataaaagattttttttttttttcgtaaaacccttaataaaattgcgaaatttgtttttgcaaaaaaatatctcaacaaaaattaatttgtttttacaaagaaaaaatggcagtcatgtcgatttgattattggctaagtctaagacgaggagacaatcccctttcaaatttaaaaaaaaaaaaaa

SEQ ID NO: 56701 - DNA, 754 bp, Cannabis sativa
atttctggaataacattgtttgcaattggaactgtatatagtgcacgtgagaattaattaactatataaatataataatacgactacttttgtttttaaagtaagcaactaataattagtaatatatatttattttgattgcttgcaaactggttggtggcacaatctttaatttttttcttgctttgtttctctgcagccttatctttacttattgtgtggtctaaattaatgaacatacatgatgcaacaaagaaaaagaaaaaaatatacaaattttatacatttaatttgtatgacctacttaattacatagataacttcttcttttttaaaaatatatatatatatacacattgtcgatcaattaaaatcgaaataaagcaatattctcaacgaagaatagaataatgaatagttctcttcaaagaagagagaaaaaaaaagaacacaactttacatgataaatgctagcttaatgtcaaaaccaacaaaacaaagtatattgccggagtggaaactggaaaggaaatgtcaggcactaggtatatacatataaatataatttatacatacatatacatatacattcattattcatacacatacatatacatatatatgtatacatacatccatcaatcccctctattactattactattaccttccagttctgtgtttttgtattgtaccaatcagactgtttcaaaatcacccacatgttatctttcatcctatcaaagctcaattt

SEQ ID NO: 56702 - DNA, 1029 bp, Cannabis sativa
aaagcgacgttgggccttagagagagtcgctttttatatgttttaaaatattattaacggggtatcattgttaggtattaaaataccgagttttgacggcatttgagaattgactaaattgccttttgttggtaagattgcacttgttagtcaagatgtatgttagtcttttcttagatttttgtctcttgtgggaatcatgggctgatgttaaattataaaaaaaagaaaagaaaaaggaattaattaattcaacctaaatagctaagtgatagtgagaagaaaagcttggaaactctcttttcgctctctctccttcgaaccagcctagggtcgcaagatttgaagtttggttgagcttaatcaagggattttatcaaggatttagtgcttcaactcaaggtacaactctctctagtgtccttttctttgctttctttgattttaagttgaattatagtggagtattgtgagttaggttactgtgtttgttttgggatgtgagattttgtattctggagttaggatttaattattcaacctactttgagctgagattgaggtttgtggtgagagttgatcaagagaaagtttaaggaacctaagttgggtctttaatggtgtttttatttattgagttgctggctgagttttattgattgttttgggcttattggagtgtatacaggtatactggaagttattaggaagtttgggtttgattggtgaagtggggagcaatttttgggttcccagcacagaaccggtagatcggttctaggggaccattagaaccggttgaccggttggtacccaggaatcgggattccggttgggaaccggtctgccggttggggctttttcccgaaccctagtttttcccaggtgttagcatcctatttatcgatagggttaccccttgttttaaatttaaatccccaaaaagtgttttagcatgtctctcatcgagtttcgaatattatggtttagggccctgtaaagcgtcgagctgcgtttccactcaggctg

SEQ ID NO: 56703 - DNA, 734 bp, Cannabis sativa
aaaaaaataaaacaagaaaacaaaaaagaacatatatagtatctatctacgccattattaatttttctgtatactctctctagctgttgggatttcaattcggtgcacctcatcaacaccactacaagattgtacgtactttgctgtagtttcttagattccaaggaatttgctggtacacgcctcgttcaaattaagctcattattaattataagctattattggatcaacaatcctttcatttttctttaagcttttcaattcagtcacgaatcaatttttttttttttttattgtcaacctcacttagattttcttatgcttaaatttaaacgtttgtacccattagatgtatgtgtgaggaaatgtcatatgaagaagaggcgtcatgaagatgtagccaagaggtgtgtgtcgttgggtatacccgagccgcgatgtgatctcgggtataccctgagtctgagaggtcaagatgtgtgtctccaatctccactatatatatgtggagggatgtgtcaccaccatatgttgaggagtaacatgaacctatctgctgggctatatgcctgaaccatagtatagaggagtagtcattgtcaaggatactaacggttaagttagttctcctgtgttagttaagtgtttgttagtctgttacaagttagtttcatttgcttctgtactcctctgtatataaatactctaccttgtaatcaaacatttaacaata

SEQ ID NO: 56704 - DNA, 618 bp, Cannabis sativa
tatattagattataattaatctaagatcctgatatagaaaacataaaacaataatataaacacataaaaaagtttagaaaaccttacagtggttgcagcagaatatattatctccttccgttcagttctctgatccttgttatttctgtcatagagtattaccaaaaattgaacttggatcttctcttcctttgattgtgttcatcacagtcttccacaaacgcttgagtatcaacttcaatagtgtggatttatactcaaatcacctttcaaacaattttaagattgagatttactagtgatttttgaaataataaagaaaaagagaaagagagttatcaaacattgaatttttcaagctagaattatgagacttaagttaattctctattctcatcacttaggttatgtttgaaatgagatgggctgaaatagaagacttaggctttaatcaactatagggtcgaataatacaatgggcctaatagttaaatttttaccactttattttatttaaataaaaaaaatgtgttttttcctattttacaacttatctcatttaactatttaaatactaattttatttcttagtagaacagactaaactaagagacaaat

SEQ ID NO: 56705 - DNA, 1393 bp, Cannabis sativa
taagttttttttttttcttttctaggaagagaaaaaaactagttgtttgatttcaaaatatcaaagtttttataacatacatataattaagaattatacgttatatagattatgtaaaccttatcaaagctatatttacatatattgtgttcacatatatgatttgacaaattaattaattaattgtatatatgtatatattgattgatccttgtaaggcaaagttaatttaatatgatcctttaacataacaacaattcaatccatatggtgacgtggaagatattctttaatttttttcaacggaaataatgagattaaaaataatgattattagataatatatataaatgagtatttaatagttagagtaaaaatataaattatattttttatcacctgttataataattagtaaattttttatttttaaatttaaattaattatatatatttaaagttgttgtccttattttctcccaaaatacgtggatctggatgaggatgacacgtggatctgtgaggatcaacacataaaaaatcgattaagtcctaggtgaaaggaaagtatctcagggaggtgtctggaggaggagagcataagaagtatttctactctccggaaggccgaaggtatgataaggcagctccgggaggtattgagttctaatgaacaatcacctcgcatttaatgccgtatgggaaaagacgtattgaaatctccataaatgacatgacagatggcgtaaccccccttcttccgctagtatgctataatcaataaggctagtgacggctactttatgaggaatcacatcaatcaagaggaaataaaagattatatccatcacactataaataccccacaaacagactgagaaagggtcgaacattttgggttaaagggaatcaaagagagaaatccaccaagaacattatctgtaataaatactctcattaataataaagactcgtggactaagggtcattaatgccccaaccacgtaaaaatcttatgcattaaactctctacaactcttcttatatattatttacttggttgccgaaaatatcggtcaacaaaagtaaattaattttttaattaaatatttaataaaatatttttagaaattaagatttataatttattttatttttatttattaattatttttagtaaaattttaaattaattacaacatttaataataatctaacgattcaaaataaatataattattgtgattagatatttaatatattatatatataattatctcaaactatattattaaaagtgatatagtttatatcacttgaaaatttaaattctctaatatttattaatcattataatactatattataatttaaatgtgcatctatatatata

SEQ ID NO: 56706 - DNA, 1222 bp, Cannabis sativa
agatcctggtaaaataacttccaacagagctttctatcctttgttaatgtttaattacctcttggaactcttctgcaaggctgtgtactttaaagtttaaactaaactttagaacatatatttcagctcacctctaaatgaatttttataattgtgattttgattatgtctgttgcttcgttttaagctacactttcttcttctaaattcttacagttcttttgtatggaggtttaaatagacttttctttaatggtcattcaatgtccttaggtataggccattatagccgtgaagaaaggggaacatttgctgaagtttgggcgtaggggaagtccaaaattttgccccttccggctttctaatgtaagtttaatttcaattttaatgttggtgtttttttaacacatttggatttggcttttttgaggagacaaaaccattctaatgaagtttctttgaaaacacaaatattagatgttgggaaaacttgtgattttttatggctgtaatgaaaacatgcttttgttaagattggaattgaaaattccttgtaattttctcaatgtgattagaaaaaaaaaggtttaaaacgcataaaatggtcgacaagacttggcacaagcttgcattggcttaattctgccaagctttacagttatgacaggatttggctgacattttggaagcttaaacatttgttgagttttgcaaactttgactctactctttcttttattcctcaaaagctttgtatatcctcttatccgtatacatataaacatctgtatgaccatatagtggatgtactatagctcaagttcttatattatacctacaggaggagaacttgttgatatggtaccgcgagaaacatgagaaacttcttaagctaagtcaagtctcaaaaataataccgggacagcgtactttaagtttgtcccgcattctttttgaaaacgtttgtctcacatatttatacacatactgacacacacacacacgtgtatataattcaaagttttccgggaaaaatctggtagttcatgttgtactttacaaaaatcatctttttgtggtagattttaccacattagcttgaaacaataacaagtgagaaagttttgtatatttcaggctgtatttcagcgatatcctcagccagagaaagaatatcaatcatttctctgatatacaataacaggtccttggacttggttag

SEQ ID NO: 56707 - DNA, 1678 bp, Cannabis sativa
  modified_base (534)..(534): a, c, t, g, unknown or other
  modified_base (579)..(592): a, c, t, g, unknown or other
gtaaaataatttccaacagtagccgccttgatgaagtctgtaaaactggctcaacagccacttggaagaagcctcattgcctatgatcttggaactccgacagtgcagcaaatgcaagctgtgacatgacgtcaacatgaaaaattgtaccgccaaacaacactgaatttctatcgaattagacccaccaaaacatcatcaaagcatgctcaaaatctccacgagaaagcatctctgacaaggtccgtaacacctccgaaactggaccaccaagacatttacgtaagcttggccatcgattatatatgtataatatttagttgaaaaaaatatatatttacatattttctcacaataatatatatctctcatttatcaatcattagatgacatggaatttattaaaattaaggctaattaagatttttgctccctaaatttaaacatgtaccaaatcgtactcccttaatttttatggtcgttaaaaatctcccatgaactattgagaatgttagatttaaggacttttgtctnatttcattcaattttactattttactgattgtttatgtactaaannnnnnnnnnnnnnctttgatatctaccaaattataccattttgattaataatgcctttcttatatatatatatatttatataaaagataatatcaatatccaacaaaactaagttttaatcctatctataattaaggtacaaataaaattagtaatttctatctttcaaaattaagcactaaaaaacttattcccttttttaaatttctttatcttatttattttatctctctagttttcactttcactttcacaagaaccaaacaaaaaataccagattttttttctttcaatttctataattttggtggtgagagtttttcctttgttactacagagattgtttctacttttgaacgaaataaagataattttttttttacaattattataataagaaagtcatgttctgtgaagttctttctaacttcatagtcttcacttttcatttaaattgcttgtgtggaaaataaataaattaaatgaaaatttgatcattcctttgaaaaaaatcattaggggggagagagggggagagtctcctttgaagaaattcatgaggggagagtgagaaagagggttggaaataaatcgagctccattgtaatgaatatggacgtcagagatgcgcccatcgaaagaccttgttttcctttcacatatgtgcctgcatataacaaatccagacaaaagtctcaattctcacatcatttagaaaatggagtgggaacagatcttactggtgagcttgatttgattttactattatttttatattttaagagtttttctttttgtcagacactttttcagaatttttcagatttttttcagtagagccaaaaaaaaatcatacgtaatgaagtccacacttataattatattcctaagactactgcaccgttggatcatcaatcaacgaataataaattgtccccaccataggaacagaattgatgtgcttattgtagatgtatcctatataaatatatatatttcgagttatttgcggcataacctccttaagtggtcaagtttttgcaactaatccccaattctaaaattttggtggtataacctcccaaacccaagttctgtt

SEQ ID NO: 56708 - DNA, 1394 bp, Cannabis sativa
  modified_base (417)..(420): a, c, t, g, unknown or other
  modified_base (476)..(487): a, c, t, g, unknown or other
  modified_base (1313)..(1317): a, c, t, g, unknown or other
atgtgtttcatatctacatgttgagaaagtacgtgtgtgttagatctgacacatattttgacctatgacgatattaagcttcaaacaaacttatcgtatgaggaacaacctatcaggtttggaccaaaaggagaaagtactttagaataagaccattccattggttaaagtattgtggagaaactacaaagtcattgggaattagagttcgcatatgcgtgagtagttatccccgagttgttcaagtaaattttgaggacaatttctataagcagtagataattataatatctcaaaaacctaattatgaataattaacttattatataaatatgggttaattgagtaatgagtgggatcatgtgttgggattttatgccgtaattaaaactgatttcaatataatcagatttactnnnnaataaaagatcataaatcattttatattacatggttcacatgattactttcatgannnnnnnnnnnntatataaattctattaaatcccgaacatatagttattcatgattgtaatgttgtctacacggtagaatataatcatgattatatgcttcaaactatttagtaccacaatttatcagtgtactagatttacactaatgagataatcatcggtaaagtttacttacacaaagatatatggaatgtcatttccagtgcattagcaaagtatactagtattggatgtattggctatacatcatactagaccgatattgacatcagaaaagatatcataaacttactattatgtcttttctaagtcaatgtcacttagttgatcttagataaaaagatcttaatcttgagatggttaggttctatcttaactgtataatatatgttctttgacttgtttgataaagctgaccacttggattagctcaatacttacattttagaaatatggtagtgcaattgagtgagagcgctaatcatagatatggaatctgcagcttctataactatttagaagtgaaatgattttcttagagcttggattaacatacataaacaaaagagctcttatttcagtaattataatagtttactgaaacatcatttataagaagataagtgttttaaggacaaaatacattgaagggtagaatggtaaatttatccctagttgatgtaaatcatctataaaggatctttgattatttgaattgaaacaatggataatttttaggtatctattcttggtgaataaagtattctgtgtaatgaggattgtatttttgaatttatagtggactcaagagaaattaataagaaagagaatttactnnnnnaattctagaactacttattgggaggttgattatataggcccatggtctccacgctagttgagataatattatcttgt

SEQ ID NO: 56709 - DNA, 1235 bp, Cannabis sativa
gtctttctgcgaagaggaaaggatcgcttctgcattcagtgagttggtccggatgacctaacaacctcgataacctaataagaactcgcatgtcttatgttatcgatttattgcaggatgtccatatacgcgacttgaacaggacatagacatcttagactcgattagtcttctgcgcatcccaagcctgcaagcttaagcaagaatatgaataggcaactcgtactatagaagtcgcatacattgatatatttagtgaattaggctgaaacggttctttatttattatatttacgttttatacagatttaattgttataatttgatgtacaaacgaattgataatgaattaaatctctgtgtaattataggacacttgctttgtatataaaggagtgatccaacatgaaatggacaagacatacaactcttgcaacagtggactaagtagaccgtgatctgactgaaccactatatttctttgtgatcattatatttccagtacgtctgtgttttcatagcttgaatacttgccattctaggtaaagtactcgcacattttctatttatatctttcttatattatttattttggtgttgtctaaattcctccaataacaatgcagaattttaactgcaaaaccacgtaaaaacctttgtgttcttactttttctttatttattttattttctgtgcaaatccatcacgatttgggcattaacatagctaacaaaaatctgcattaacagtttggtgctttccttaagagccttcgtgaaaaaatctcagtaaaaaccttcctggtataaaaaaaacaactttttccatggctgacaacggagaaaacgttgacactccacatgaaaaaacaacccaccgtcctagaaaacagccaatgggctcttagaggcctcccaactcacaatctaaatggaccactcgttccaaaaggtcccaacctgagggtggcccaagtatacggaccacacgttcaaagaggacctagaatctgagaacaaggtatgaagagcctgaaataaacattggtagagcccatcctagggcaactggcgaggatggcgcctacgatcgaacaagatatgtgtcaatcgtcgagttagaaaactgccaactcaagcgccgcttggaggagacaaaccagtggaatgctgagttggaacgtgaggcagtcgcggccagggcgacacaggagaataatactcaaaatcaacct

SEQ ID NO: 56710 - DNA, 642 bp, Cannabis sativa
ctcagtaagaaaagcataatcatagcataaacataaacttgattataactaggcgtccatacatccaattacaatactatctcccgtcccatgcgtactgagtctagaacgtttgtacgacaatacgattaactataatatcagtctatactcagtaccctagtcataccgatgtcatagcaccaatccgtactatgccatatattcgtcgatattcaatgtaactctatgtacattaaaactgtcattactgatatgttatctattaggcattcataaaaagacgctaaacatgtaatcacatataatattattacaccaatattaccttgattctgaattcatgtgtgccgatcaacttgagtagaactactgctggacgatttacaagctcctaagtcacaattatgtaaaaatgataagtgatacgttaaattactttttagggacttaaacataaaactaaaagtttgcctatcaataaatagcataacaatacactaaatatcaagaaaataacaaaaaaggagatttttactgtagaaacggtaaaaatagcaagttgtttcctaaaaaacgataggtcattttttcgggtccctaagtgctaaaaacagtctgccgttttttactgtagaaaca

SEQ ID NO: 56711 - DNA, 703 bp, Cannabis sativa
catgctaatgtggcaagtctctgaagtaaattttctttctttattttaatagtcacattggaaacaacgcgagtctttagtttgggggagggatttacaaaattttaaatttttgtttgttatttttgttgtttacgttagtgtttgtttgttaagccattgtatttatctatattgcattattttttttctagtaaaaaggaaattgctaatgttcgtgtgcttggttcaactatttttgagtttaattaaaaagttttatgagaaatttttaatatgtttcacaattactttatatttttagatttttctatatatgattgactatagttggtggtatgatagtttgaatttgatacaacttgcattatttggcctttgaggtgagatccttgataacttatattttgaaaaatgatttaggcaatttctttagaatgtttgtgtctttcaagctaagctattttgtgattattcctagtttaccctttttgagccttaaaataaatttttttaatacacacttttggagctaaaaaaaataaattgacccatttattattttcctttgtcttaactataccatgagtttcaaataagtttgagagaaattgtaattgggtattgtgttttgagaaagcttaaaaataatgagagagaatgttttatatgttgcaatcctattcttcaaaaaaaaaaaaaa

SEQ ID NO: 56712 - DNA, 876 bp, Cannabis sativa
atccctggagcttgattctctgaaaaacttaaataagagagaaggagaaagaaagaagagaaaacgcaaaagagaagacagtaaaattaattaagggttaaatcacaataaatgaggaaagagaaactattaagatcaattacacaagattgcaaaacaagtaaaggaaagaaactgagaggagatttagaaacaccacgagggagagatcaaaactggaatggaaccagaacactgtaacgggatgcaaaccactagaaagttccagagagagaaggtttcttagatcttattagaaagaaagtgttgattttaataataattgtaatagtttcccctccatgtaattgataagaaactattacaaaatagtttaaaatagtttcgctttcttcaacctttctgtctttaagtaatgttgtcgaactccaaccacgactgtcatcgcccgcccgccctctcttcagctcgtatatatctattttatacaaaatatcactatgcaacaaaattttaacccaatttttggttcttaagttaattttaatagaatatatcaattagttaataaaatagtctttattaattttataatattattaaatacatttaaaaataaaaattatttaaatattttatataagaaatttttttatttaattatgtatatttaaaaataaacattatatctatatatataatcacatcaatatataaaatatatatttaaatcttaatttcacttataatttattatgaccacactctcctaactacaaattaagaatattgtatctgttataatattaataattgtgtggatgttcaaatcttttatttattaccattaatatttgactcttgtatttgtataaa

SEQ ID NO: 56713 - DNA, 903 bp, Cannabis sativa
gggaccctggtcagcctaagcctatgtcctaagcaggtgaccagttttttatccacttttgaccttggcaagaatcatgtcatggccttgtaggcatatacaacctttgtctcatacatggctcccttagaaactctgtatgacacttaatggtgagtctattatagtcgaatgctcaacttaagactcaacattttttcaagttgttacacttgaaactgtactttattgatacccaaccttgtacgataaaattgtctggcaagtacccttgggtacgattgaccagagccttgcctaaaccttgtctctttgtcaagttgctcacctccccttatcttttgtgtgtagatgatccttagtgatcgttagggaggtgaccactgcatcgacaaagattttttttatcttctcttcaaggactaatgtccatttgattcctctagaaactctcggggagatatctaggtcagtggtggttcattatgtcaaggatcaagtagacatgccacagggcaccaccttatgacctctatatcgcaaggctagcaactagcgagagagtatacattgctgaggaggctgcacagtctttggatgacagagagcccggggctagccaagttgaggtacctatggttgggcagcccatggctgactgagatgaggagagctcagacagtgcatctgagattgaggaggtcattcttatcaggaggagacagtacaagacttgcactgttttctccaacaaccctttgggttcacatgatgatgtttggcagcctttgaatagccttggttgtctcttcaaggtcagagtggaccacgttctagaggaggctgtagagccccgagtcgttgattatggagatcagtagaaccggtggatatctcccctat

SEQ ID NO: 56714 - DNA, 1588 bp, Cannabis sativa
tacaaacattgggtactgatgccgctaaaaataaacattgggtttatgccgcttacaaacttaaaatattgggtacttatgccgctatttatcctaaatataattttacttataatacttattgtgactaaaagtaaattagtgacaacttgtagttgtatctaaaagtaaatcacatttagtcacaaaaaaattatgtggtaactaaaagtaattgtttttttgtagtgagttaacatatttaatataaattaaattagttgatgtgtcaaatttaaattgatttaacacaatattagaacaccaatttttaacaaaaaaaaaaaaaatcttcattcattacgattacatttacataaatatagcatatatatggtaagtttttttaaagtgaaaaatctttattactattattattttaataaaacaaaacatatcatattattgtgttatatgtacatgcatattcacgtatctttattgaatacaagtatgactatatattacgtttcgttatgttgaaagttcggtcagattaataatatatattctttgtttcaatttgttgggtctaattaagttttacataatttaatggtattttcataatatgaacagagagtaatgtatatattaattgaatttgaaagtattaaatatatttcagttgaccaaaacccgtttcaatatttaatactttcaaaaaataaattgttattattttgaccaaaaaaacaaatgctagaaatttacagtactatttataaaatttataaatactttatatgaaatctacttttgatctaccaacataattttcttgtgttctttaaatgaacaattaaaatatattaatatagactgacctaataactggttatcattattgactaaattaatttatatgaaatgatcgatactggaaacatgactgtataaacacatgctttaatattaatgtatgaaataagtttgggccccaatttattaataatcacgcatacaactttattttagaacaagatgaactttatttactgtaatcttacaagttagataatactcaaattgaactgtataaatcttataaatagattacttaaataaagactaatctcattgatagatcatattaacccatacataggtagaagctagctaaagagtctaatcaatttccccataacaacgaaacacatttaccacatattactaattaataaacaatggtattcaaaccgtttcaactgcaaaacaccaaggtgtacaaaaccaagaatgttttgagcaagaaaatgatttgaccaaactaaaatggaaagagtcacaattttttatgagggacaacagggtgcgaattattaaaataaaaaccaaacaacaataataaagctaaaacgaaagtaaatgcagacccacataaaggcgagaaaaggcaatcgtaagtccttgaaaaagataaggaaaaatgtatatgttttaattattataatatatattcttttgcccgcgtttcttttcttttttttttttttttccatggagaagaaaaagagaatggtttgaaagtcagtttatagattgcttg

SEQ ID NO: 56715 - DNA, 712 bp, Cannabis sativa
caaggtctctccatctcccaaataaacatacttcaagtgactaggcaaggtcttcaactccaactcgggttgttcttgaatagacgacttaggaggtttgaaattgttctctgatagctccaaagattcaaatggcctcctaaacttagtgaaaggctgctttgactctacccaagtaactttggattcttcatattaacttaaaccttcaagatcttcaagagaacttatcatcttttcatctttcaacgcttgtttatgaaatttttcagccacaattgaatcaattacacttaagcaagagcattcctcaatctcatccgaaaacctcatgggattgaacacattacaagtcacttgttgatcattcaccctcatagtaagctcccctttttgcacatcaatcaaggtcccgaggaatggccttcccaaaataataggaacttcttcatccgcctaataattacgaatgatgaaatcatccaaaaaaatgaacttatcaacttgtactaaaacaacttcaatttttccttccagatgagctatggaacgatcggctaattgcaaagtgacggtggttggccttacttctcaaatccccaacttcttaaaaatagacaagggcattaaattaatactagctcccaaggcacataaagctctgcccacatctcttttgccaatggtacatgggattgtaaaacttccggga

SEQ ID NO: 56716 - DNA, 949 bp, Cannabis sativa
  modified_base (758)..(758): a, c, t, g, unknown or other
aactaaaagtgagatactcatagagaagatggtgcaaattagaattagagtttagagttcacgtattctctcaaatgcagagcaatttacattgatcacttcagttctcatcgccagtcatgcttattgggccaaaatcatggtcttgtccaagaaagtgcttcacaaagtgaatgtggtgtgtcttacttttctatgggaggggattgctcaatatgatggtccaggattggtctcttgggaaaaggattgcaaatcgaaaagagaaggtagcttgggttttagaagaactagtcagtagaatactattacaatattgaaaatatatttggtcaatttctaccaagcaagataatttgtgggtaaagtggatttatattgtgtacttaggtgacaaagatcggtggagctatgaagctccgagcaatagtaataataaaaatatatattactaatatatatgtatagtatactaaccaagttatataggtgtttcttacttttttatggaagaggattgctgaatatgatggtcgaggattggtctcttgggaaaaggattgcaaatcgaaaagagaaggtggcttgggttttagaagaactattcactagaatattgttacaatagaaaatatatttggtcaattgctaccaagcaagataatttgtgggtaaagtgggtctatattgtgtacttaggtgacaaagatcggtggagctatgaagctccgaccaatagtaataataaaaatatatantactaatatatatgtatactatactaaccaaattatataccataattaaaatatatacaccatgacaacaaaattatataccactatttcatataatagaatagttactaattaaatattattttaaataaataatatatcatacaattaaaatatataaaaaataattattaaatatatgtagcatgcca

SEQ ID NO: 56717 - DNA, 1192 bp, Cannabis sativa
ggtttagggccaaactttgattcagttgtatctgggatcacttcaagaagtaataatctcaccactgaagaagttcaagctctttttttgtcctatgaaagtaagctagaacatcatcaccaaatgaatgatctgtcaatgagacagaagaagtccaagctcttcttctcttccttcatatagttaccaaacataaacaaaatatacaataacaaacgtaacatatgatacgcaacattatcaataatacaacacaaacgattttaaaaaaataaaataaaaaatatatattggtaaataccattgttgtattttttatttatttttcataggtaagaaaatgagattatcctatttatagttaaaaatgaaaaaacgttgggatattttcataaacatctaaaaggttaattaagatttttgtctcttgaactttgatatgtgtcaaattatgccttctaaacttttcaggccagtaaaaattcccccgaacttttgagattgttatatttaaggacttttgtcaacctccatttaatattactaacaagacgaaagggacgaccctaaaatataatgggtcataggaaaaaaatattcggacccttatttagaaaaaaatatggtatttttcaaaatctgtaaaaaaatatataattttaaaagataatttttttgggcccctggactaggtgggccctaggaacagacctagcccgcctatgcccagggtcgggcatgcacgacaattgtctatgtactaaattgtgccctccaaaatttgatatctattaaatcatgtcccctgaactttaacatgaacaaaattatgtcccatgaacttttgataaaaaaaaaaaacacttttttttttcttgaacttattcatctacgtcaggcttctattattaaaattaaacataagtttttaaatctcacaatttcaatagttcgcacgggggagttcagagggcgagatttgttatatgtcaaagtttgaggaacaaaaatcctaattagctatcctaaaataataaagtttacaaaaatacaaatttacagttttattaatatttttatgatttttttttacaaaaataggaacgatttttttcaaaacaacatttttttcatgctattgctacatgaaaacaacgtgaaaaaatatttttaggaacaagaaaatacaagt

SEQ ID NO: 56718 - DNA, 1477 bp, Cannabis sativa
ttaacgattcgttgagatatttactggagttcgacgttgagaactgcaacgacttgaaagagcttgaggcactgaagaagaaactagaagaaacgagaaagaggactgccgtggccttggatttgtcagtcgccgaatatcttctttctgactagtaccgatgatgagaaagaacttcagtattcttatcaacttctggtattattattctctgttaattgctatgatcaagattagagtttctttttttgaggaagggtttatttgtttgtaattagttatatagctatggtgatttttcatatacatataattaggtcattgtaattaaatattccttggtcaattgtaatggctgatcattaattccaatatataaggagtagaaatccaaatgcagactagttctgattttaatttcagtattttgttcaattatatatactagttgtttttcagatatgttttttacttaaaaattggacaaaggggaacggaatactatatacctaatatattaacagttttctctttaaggtatatgtgtagaaacggaagggtttatttgtttttggtgattttataaatatatatatatataaaattaggtcattgtaattaaattcgtttggtcaatatatcgtaatgttgatcacaggttctctcagtcaaggtcatcactatatagtgtctttttaataattagcagcagatttaattattttaaagaggccttataagctgtattgattaatatttaattccatgctcttattattattagaaacaattttataatcattaatttaagaataattatatctaaaaatttcgttcaattaatactttaaaggctataattgaaatggctgaaaaagaggagagagatgaaatttatcaaaattacatattttgaatctttgatatgatgcaggttagaagttgattctcacttccatactaaaaagaagaaaagaagaagttgattctcacttctatgagcctatttgtttctcagcaaatgtttatatattttgtgtttagtgtgtgtataaatatatattttatgtgtgcatgtagttagtttaatttgcctatattgtctattgattgataaacattttcttgaggtttcttacttttaagacttggaattaatttataaaaatattgtgagctagctaggattatttgagacaacgacaaaattttactattatttattttaattcatgaaaaagtcatatatgtgcatatatagttatatacaatatgcattaattgtggagctgcatatatatatatatatatatataaatatttatggacaaaatatttaacggaatggttgtgactgcgtacgtatatcacatataaatcagcagaaaagattcttttatttgattttgcagagttttacctaattagtaatatcttttattttctcaaaaaattattaactaccatattaattggt

SEQ ID NO: 56719 - DNA, 1557 bp, Cannabis sativa
  modified_base (201)..(212): a, c, t, g, unknown or other
tggttatgccttgaacacataaccttaactctcaatatattcatatatgtaacatggcatagcatttacacaacatatatcactcgggtaataaccctaggctattaaaccgctcatgttagggtaataaccctaatcccagtttctaattactcatatatatcatttccaatataagcgccaccgcgcataactctacgnnnnnnnnnnnntcttacctgatgtcccacaatagtagagattccaaatccctgtgtgctcctgacctggtgccggtaatcctagtcacaattgcgggattttcacaaatagggttaacccctaatttcacattcataaaatattcacatgtcatttaaaattcagataatcatatagatctcggaacgggctttccaacgatatacagaacttccaaaacggagttcggatcacaaagttatgcattttcaaaatttgcacttgaatctgcccaaaaattgaggacgggtcgcggcatgcaaaagccatgctgcggcacctgggaccaattcccaggttccacaaaaggggcgggttgcgacatgctaaagaccatgatgcgtcacctgggttccaaacccagaaaccagcaacttgaaactcgaatttcagcaagaaaacacaccccaattcactctaaaacttaaccaaaacttccaaattacaaaatagagctggtagcaaacattagggagttaaaacatatattcatgcactaaaatccaacataaaacctccaatttcatattgcacaaacaacacaaaatcatgctttaaactaacaaagctcaagctcatgaacttgagcttcaaaaccattcatctcaattaatttccaacagcaaataacaccaataacacataaattcagacctaaaaaatactcaacaatctcatccattaaccaacaataaactcacaacaacaacttgcaattaacactcaaactttctcaaaattcacactcatgcaaccaagaacactcaaagcttagaagaacatggtttttccataataaactcagcaagaatttcaaataaactcagtagaaaaactacctcaattccaagctcaaagatccacaatctcaaagctccaaccaagccaaattcaagcaacttttaagaaattcctcaatttttaaaaataggttaaagagagagagagaggggtttgggtttggggtcaaagaagccagaaaatcccttttcaattctcaaaattcaactcttttattatttgtgaaataagggtcaaatgactattttgcccctagggctataaagcatgcacacacatacacaaggctatttaggtcatttcacacacacataactccaattaaattttcagattattcatcaataattaaaatgccaataattctattccaaattgcatttcgagcccatacccaattcggcccgcaatacgcagttgtgactataccgcgccagcttgtcagaacacacctaaaaaagacaacacaggcataccatatagtaatatggttccataaccacgtaaataaattaa

SEQ ID NO: 56720 - DNA, 882 bp, Cannabis sativa
  modified_base (28)..(41): a, c, t, g, unknown or other
atacgtgttgtgactaaaactaaattannnnnnnnnnnnnnctaaatactatattttagtcagaattaatattttgttatgactaaaagttatcaaagtatcacttttttgtaataattatttaaataaatgagaagaatgtaactgaaatgagatatttgcaacaatttttataatttaggaaaaaaatttgcaatagaaaaaagtttagagactaaaattctacagagtcaaagagaaaaatcttatttcctaaaaggcataataaaggtgcatgcatgtatgtatgtacgtactgaaatgttggcatgtcatcgtagctagcttcaaattggaagaactgagtgaagaaaggaagactttcatcactggttcccatggtggctgcagctgaaagcgcagcaattatggcgccaagccttaagacgaagtcggctatggccattcctttcttcattcctgtggctttgggggctgctactaaaactgtagttgattttccttttgttgatgagttgcttggccctgcaacatcaatggtggttgaatgatctccactcttcattttcttctactttgagaataaataagaatatgttacacttgatttgagtagtaatggatgaagagatgagattgtattatgctttggtgggatgaaattaatggtatggatattgatcttatatatagagatggccttttttgcatagtaatattatattaagtaaatgggagaaaacgagagttgttgttatctactaataattatgaaacttttagtaggaatgacttttgatttaaaacatgaaataaataaatggattaagtcaacctaattatatacaactgctcaacttcataaatatattgatcaaggat

SEQ ID NO: 56721 - DNA, 1667 bp, Cannabis sativa
gttgcgtgtagacttcatccaagctgtccttgcatttggatgggtgacacgtgttaggcgtgtctgttcgcgattcgatgtgaggctcaccaggcatccattcagtttttggctaattaatgctctggcgcaattattgcttcgaaatccagttttctctcaccacgtttgacggttacacttgattatattttattcccaatattttctttttggggggaaccgatgcgtctaagttgaaatgattaccctttttcattcttctacctataaatagggctgagcattattcactaattcacttttaccaacttatccattgagcaaactcaaagcaaaaagagaggtttccacttcaagtctgttaagagatttccacaagaaccatccgagcagcttcatttggactgaactcagacgtcgaacagtgagtaagttctcgattcctccctcttttactttgcatgcttaatttctggatgcgttcttgactttgttgtagaagataggtagaaaatctaggtttaaaactttgcgattttcttcataataatctataaaacttcacaattcatgatgctggtctctgatcatacattgtctgtctttaaccttgcttattcaaagcttcgtgaaattttgccctaaacccaaaaatttcaaacttctgggttttgacttattgttgaatatttccattctttaatcccttgagtactcctggtcagcatatttgcctatttattgtttgatatcccgaacaaactctcatctcgtgtgttgtcttttgtagatgaatccttgtgagttttggggaagtgaacaccaaactgaccaggacctacttcaagttctgtacgaagatcaccctcttctttgtgctagtccgtcctctttaagtgatggattttccaattctgtctttctgtccagccacaggatgatggctcgaacaaagcagacgatgcgtaaggtcaacgcatccgatcctcatgtggcccagcttgccacgttacctagcgccgaacaggatccgcccgtctaggagaagggggaacatgaaggggatgctgaagttcaggagattgaggaacatgacgatgtccgtcctggcagcccttccgagggggaggaagaggaggaggctgcacctccaaattttgggggatacaacgaggctggggagccattagatgcagacggcgatgtcctagttgaaggagtggactacgtcactgaggagcttactgctgtagttcctcacaacaggcaaggtgccttatgtgccagatgggtgagccctccatctaagatcactgtggcacgcctaagggatccggacaagtctagctgtctgggtgacctagagtgttatgtccctgcctcaaatcaccgagcctcaaacccaaagaaggggatgcgtgcttgctcgggtgcccagtctaaacatggggcaatgctgcctttgcacccgtacttcaggaaggtggcagatttcttctgcctttgtccgacccagtttactcccaagggcattaagtatttgtctgccttgttcatcctctacgctgtccaaaagtgggatgtgccttctccggatgaggtcagttggttttttgacctgaagtctacccccaagcaagcaggttggggtatttctacttctc

SEQ ID NO: 56722 - DNA, 688 bp, Cannabis sativa
aaatataattaattatttaataatcaattaaaatattctaatctatttaaaaaaaaattaaaatattctaatgattaaatttaattactaaattttttagttgtctgatttaatttttagaattaattgtaaaaataatttgacaatattaattgtggcaaagattttgatgaaatttttatgtgtcttgattattttgaggttttctttgtgtgtatatgcatatgcatatatataaatatatataactctcatttttagttgtttatggccgctcaaaagaatgttttcttttaaattattttgattcattttgttgttaaaattgttgtattcattcattactaatattttacatgcaattaaaacaattgtttatatatatatacacatatatgcatattcatacgcatatatatatatatactaaattaatgttacgtgcgaggcacgtatatactttattaatttatttgtctaataccaacttaacaaaaatcaaattattgttttaactaattaagtcaattcaaaaccattcatgttaggtcataaagtcaaacattctcttttgttggtattctatcttgaacttactataaataccggaaaaataacaaaaactttgttagaaaagcattttttttttgttaataaacaaaaaaaaaaacctgaaatagctagaaac

SEQ ID NO: 56723 - DNA, 2015 bp, Cannabis sativa
agagcgagttccttcaaccttcaacatgaattccttgcccacgaacttgtcttgaagagctaggacatcgcggactctaacggtgggatcaatcatgagcttcttccccttgtctgaccagcttcttagagaaattagttgcaggagtcaccacgacttcactcttcctcttctgcgggatgatgggagatttcatctcagttccagttttgggtttgcggttgagaacctgagcttgctttaggaaagtcatttctacaaggatatataaaaaaaatgctaagataagtataaatctgtattatgttacactacgaatacatgcgatgaattacctgatgttggttgagaagtttgcttggatagatgcttgtctattttctcctttagcttctcagacggctccttgtacactggttcccgatggagcttggcgtcctcggggattagcttctgttcttgctgctttgcagttgtgcacaacaatcgccaatcgcgatcttgaacagataggctaccgagtacttcagcgacctcttgatgagtgggatctacaacaggttgagtcaatctatctacgatcaatgaaaagccaatgttaagcaacttcctagggtaacacaaaaataaactaagtgttaatatgtgtgacatattaggtcgactattgaaatctgtcctaacccctggtactttgtattcataaaaccacttagatttccaatcccccacattagaaatcgtgccttctaccccattaatttcagaagtagcccacttgctgaaatagtagaagccattgtcatggcccacacgctttatgtcataaaaataactgaaatcctccatcgagggctcccttcgggcatactccatatacatcgcataaaaccctaagactaagctatagttgcttggggttagttgaaagggagaaatgtcgtatcgcctgaggatagcgataataaatggatgaaaaggtatcgacaccctacatcaaagaatgggtattgagacaaccacatcttctgttgggattatcgcaagattggtaaagggaagatgcagcctctgaggagagcaaggacacatggttgcaagtcgcagcagcttcaacctcgtgaacgtattgaggtaggatttggtaactcgcgaaactagatcctcacaggagaaaggttcgtttagctgggtattgtccactgaatctgtccagcttcccttgacatcctcctattcccctgattcgcggttaggaatctcccaatcttccccaatctccttgacttcgacgtcaggggtatgcctggagtggataagatgttctcaggcggacaccgtatattcgctatcgcgaatctcgattgtcccaaagtcagcgagttctcaaaccatcctttcgatatctttagaagaaaaaggacccaaagtcacagctttagcgacagggacttcttcttcagaaaatgaagttggtagaaagctattgcttttatcctattcgtcagagaaagcctcacctctggagtcgagcatttggctgtccgacaggttactcatttgaaagataaaaaatattttcaatgtggtgaaagtgcgagaacaatgtaagtgacctcacccgcacaaaaaaacaaaaccttagaaggttagcttggcctctcaagaaatggttgggtgtctcccagtaacctaatgaccatgtcgccacatgggtattaaggtattgagacagacccaccatttggagaaccgacccaaccctcccaaggtgtaagtagcatgtgtgcgactaacagagtgtctcaaaaatggctggaggtttcccagtgaccaaagggggcatggatctttgagcatgaccatggggttactgagacacacccaccatatcgagaaatctgaccaatcacaacatacgactacatatatatctatatcgcacatatctgactagcagcgtatctccagaaacagttgaagagtctccattgtctaaaggggcattaatttct

SEQ ID NO: 56724 - DNA, 770 bp, Cannabis sativa
  modified_base (526)..(530): a, c, t, g, unknown or other
tcttcttctttttttccttttcaaattacataaataaaagttttgatttcttagagttttagggatgatttttaatggcagtttgtttagtttctttatgtgtttatacagatgatttggttttatgttctatatctatagtatgtgtcttgtttttacattccgatcacaaactggaatgttttcttttggttcttagtccgatcaattttctcccatctaaggtagattttgttcggtccatcctagttgaaaacagtgatacaagacggtcatggctgagtgtggtagcgcgtttcaggcagcaatgcaatagtagtggtggtgtgcgaatttcacgccaaagtttttttgttgcaaaaattttggcataagtatttttatttaatttttatacaatcaaatttatatataaatatatatattatattatataaatatatataaatttatatctattttatataaagtatacctatataaattcttggtttttgagaattttatgggtgacttttaatttttnnnnnataaaataataaaatattatttatttataataaaataataataaatatcctaaattaaatatttgaatttgaactaatattaacaatcacctcaattaaatacccccacaaagggggagggagtcgactgaacatctcagccattggcgggaatttcgcctgattttagtcaattttgggctgaagcacctcttttcatctcaggtgctggatattcaatttggagtttctcaatcaggc

SEQ ID NO: 56725 - DNA, 967 bp, Cannabis sativa
  modified_base (32)..(32): a, c, t, g, unknown or other
  modified_base (721)..(721): a, c, t, g, unknown or other
  modified_base (891)..(893): a, c, t, g, unknown or other
tgattaacataaataactgctaatttccaaantaactaagcgggctttacaaactgacacttagtaattaacgagaaatcatatgttgctgaatgcgaatagcgagatagcaaggacaatatgcataggaagatgaaagccacacatatcaattgcgaaagcccttagtatacaaactaagtgcaacagtcatttcggctcaagaccaagtaagcgaggtgcccgtctcgctatgggaagacttcctatagcttcatccagtgaatgttagcgaggcttacattcctcgcgaatcagaagatagcattcaaataagccttgaagaactctttaagaaccacagtcgtcacaagacatgcatcgacgaccttggaagaaaaaatagccccagctcgctattgaggtcactggaaccaagtttctgtcgagacatctctagatacaacaattaaaaacgtgcttaatacatgattattttgacccagtaaaagcgggaaaatcacagctatatgattttcaaatcataacagtgcttataatacgtgatatgtaatcaaatctcatgattttatgggatgatcattgtaagcaaatgacaatcaactttgtaataaactatccactatgtaattataaatagtgacaaataagatcaaaaaatagggacaaaaaaaaactcataccggagaggccctgaaaaacaattagaaatctgaataanattgactcgtggactatgcaaaattttaactgcaaaaccatgtaaaaaaatctgtgttcatatttttacttctacggcttttattttttctgtgtgaaatcacctttgtgaggctcaaattcggttaataaaaatctgcgtaaacatatatcatgctaacaaaattatannnaccactattaaaatatgaatacatacaaaaaaatttatatataataaaagaaactaaatgtcatcttaaataaa

SEQ ID NO: 56726 - DNA, 822 bp, Cannabis sativa
agaataattaatacataagaattgcttgcaagagtttacacataagtcaaacacaccgctacctatgtatcaaactatcaatgaaggttatcaatataggccaaagttcagattaactgtgataataaatggagtaagttacatttcttcagatactttttctaccaaaaaagttgctgaacaaaatgtttctgaacttgccttaaagtctatagccaaaaaaaacaattgtaaatgaaggacttgtaatgaaataaatggtggatgaaggacttcctcttatacatgaggttcatatattttttaaattctattttcgtttaagattattttcttgatggtaaaagaatgtaattattattttcatttcaaaccaatatcttgacaagttaaccccaccaatatttcagctacccgtcaattacctttctccaaacttccccaagtcttccctatatgaaaatgatcataagcttaataaagaaaaactatgcatgtactcccacttaccaaacatacacattaaagtttaacaaacaagttcactccatgaacaaattcttgccaaagtaaaactagaagtaagttgatgttatcgggatattattcgagctatatcaaatatcaatactattaagtttaaatagcaatgttcatgcaatgccttgattcaaaaatttcgtaaagttgttttcgttggatagatttgacaattaaccaccaaaattttaacttgggagagacaattcaagtcaattaaggtagagttgataaatattttataatttttcattgcttattttgatccaacttttcgtatta

SEQ ID NO: 56727 - DNA, 1075 bp, Cannabis sativa
ccaaacttgcagagggcttgcccaacgtcttgctagttggagagacaactcccaatgattcaagtttactattaaagctgaggagagatccatgcaactcttgctaggttagatatgtttaatgctcaagcagaagcacaatgtagagatactccatgtcaagtccagacaacacatttgctattagatatttttttggatatggatcaccagcaaaagatagtgaattgacccacattctcttcatttttaagtagtcaatcattggttgggctccttttcttgtattttgaagtttggtatgcaaatcatccatgttaacctttgaatgagctccataaatctcctctagagctatccaaagtgcagatgcagatctacaacccattacctcagatgtgatgcttttagacatggatccataaagctagcccattaagagctggtcatgcacaatccatgcctcaaactctggttttggctgatgttcagtgacaacaacctcattctcagctattctctcaactgagataactttgtttggacatggtttttgaccattgagatatccctctaatctgtgacctatgattatggtataaaccattattttccacaaggaaaagttgtttctgtcaagcttgatagtaaacggctagctcagggtattacttaagggagttgctaatgttaatggagtagtagtcatgggagaattggtttgggtaatggagcttccttaagagtttccaccatcgacatttcttggtgtagtttggctctaatttttcgacattggcagaggccaaggagtggctctgagaccaagtgaagttttaaaggaacaatatgttaactggaaatctaagctcaagaaatgagtggatgagtagcatttcattatataataaagtaggatattacaagggaaaaatagacggccaataaaggcattacatgtgttagaggaattacacagaataaaaggcctaacggtaagtttgttagaaaagggtaatgattacataatgattgcaaaactttgggattccctcattcaatattgccactactc

SEQ ID NO: 56728 - DNA, 1350 bp, Cannabis sativa
ctatttagttataacctcccaattagaatataatttacttggtctcaagtgtattcttggatagaggttttactgtatatatagtatcagtactcttttaaatagtacttttagtttacaagggctgaaagaataaaatcaattaataaagtattaaaaattacaaatataattgacttatataaaatttgactcagtctaaactttcctcacaatcttttatcatacactttgctcaatattctagagaatgccaccaaagactctagatttttacaaaaagatcatgcatcactcttctcacacaaaagctagaatataaaattatgaaactagaagataaaagataaatagtatagaaaccctaaagacaaccaacacgtaaaacctccctaaagtaaattatacttggacttaaaactaattaatttacatattcgtagtctgatgtggcaagtgaattaatattgggaatatacttatttagtactttgtgttttaactaaaatcatatttggtactttatgttttcaataatacttaattaatacttcacatttttaaattgtacatatttagtaccctaaaataaaatttaatcaatacagttttattaatttaaccaaacagttctcaattatatgtaatcaaataaataaatttgaatttagaattcataaaattttagaaaattgattgtattgattaaattttatcaaaaaaatttaaatttagggtaccaaatacgtatgattgtaaaatacaaggtaccaaataagcattattaaaaatacagggtaccaaacttatatttagataaaacacaaggtaccaaatgtgtagacaccctactagaaactaacaaaaataattatatataaaaaaaaaaaaaaaggtgaagaacgatttggacggattaacccgaccaaactaacaaaatcattggaccggttgaactttttttaatttttaattgggcgggttacaattaaatatttgcaacccgatatttatattaggttagtaaaaatatgttataccccaaccaaactgaccaacgtacacccctaattccaaccataagaaaaaataaaagagaataatttattttttctaaaaaaaatgatttatattatttaacactaaatattaaaattaaaatataaataaaggacgagaaattttttaaatggaaaaagacgagatattcatgtctattatattagaatatttattttttaatggtataaaaatttactagggaaattacctcatatactatttcttaacatttttttttttaatttacggtttggttgcttcagtggttgctccggtagtttctatgtg

SEQ ID NO: 56729 - DNA, 913 bp, Cannabis sativa
tggtggtggtggccgccgtcgtaagccttctcttgtctcgtaagccttctcttgtcattggtaagccttctcttgtcattgataagccttctcttgtcattgatctaatgggtgttcttatttgttgtgttgatcatttcccaactgtacatagtaattgcagagaaactgagagagagaagaagatgaagagataaacatttgaaaggaaactttcagaaatatcaagagagaattaaattaatgaaaaagtgaaaatggaaaagttgtagagatattaggagagagaattaaatagaatataatattggaaaatagaaacaagtgagctgtgaattttgactcttacactttttcaccttcaaaatcttagtatttaatatattaaaagcattacattaacaatataagaaaaagtggaaatggaaatattggaaaatacaaaggcgtgagctgtcaattttgactattaaactttttgagcttcaaaatcttactatttaagaaaaagtggaaatggaaatattggaaattacaaaaacgtgagctgtcaattttgactactaccctttttcaccttcaaaatcttactatttaatatattaaaagcatacattaacaatatgaagacagagaattaaatagaggttgaaaaggtaataaatgcactttaatgtaatattggcaaatacaaacacatgagctgttaattttgactattagatggaattacaatacctcagttattgaccggtggaagggcaaaattgttaatactgactttcttaaagggtaaaattgtcttcaaactatcacctcattacaacacttttataatagtaagataacctctctttttctctcagctctcactctccttctttgtcagccatcgacaaacccccatccccta

SEQ ID NO: 56730 - DNA, 1213 bp, Cannabis sativa
ttaatccaattccctgtgggatcgacctcacctgtgtgagatttactacttgattgcgtatacttgcgtagcgtttataatttatagcaacaacagagaacaactcaaaatcttgacaagatcaagattctggacaacaatggctttagcacgttttgaggtagacaagttttcaggcactaatgattatgggctatggacgattaaaatgaaagcactactagctagttcatcaaggcattcattaggccatagacaaagaagaattgaaagaattgggtgaagacaaaaagaagatcaatgagatcaagattaaatcacacagtgccatacttctgtgcttgggagatgaagtgcttagagaagttttagatgaagagacaacaatagggttatggagaaacttgtttcaatctatttgaagaagtctttggcaaataaactctactttaagaagaagatgtgtaccttgaagatggatgatacaaagaaccttagaaaccatcttgatgaattcaacaaaatcattcttgatctcaccaacttaggtgtcaagatcgaggatgaggatcaagggattctgttattgagctcgctgcaaaaatgttatgaacattttgtggataccatagtatatgggaaagaaaccttgacaatgtcagaggttaaagcttccctgaattcaaaggaaattcagaagaaagattggacatcaatggtgtaagattgtttgcaagaagcaaatcagagtccagggataccaagaatggtaatcacaagtcaaataataagggtaaccattccaagggaagtagcaatggtcaaagaccaaaatcaatgtgagagttcgggtactagtggagaagaaacctgtagatcgtccaaggtagagcaatgtgagaagaagataaagcttcatgcaattcttgagtttgagcattattttagtattttcattgtttttcttagtattatagtcttatgaactgatttttaaattgtttgtattagttcttaactatttggacctactctaacgacatttagcgatgtgtgtggacaacgctatagatatgattgagatagaatgccaatctcttacaattttgttgcctagccctataaatgacatttctcgacatgatgacgactttgttgtcgacattggattgttttattgccaggatatgaattcatgacatttggcgacatt

SEQ ID NO: 56731 - DNA, 769 bp, Cannabis sativa
accctgagcaagaaatcattaatagtgtcctttctagcctcaccaattgcctctctaaagccgaatttaattctctcagtcttccttatactgattctgaaattaagagagcagctttccaacttgccagtgacaaagcccctgggtctgatggctacaatggctctttctttcaaaaaaattggcatattgtgggaactgatgtccttgaagctgccaaagggtttttaaatggtgatgctaacattgaggccattaaccacacggtcatagtgctcattcccaaactctcccaccctcaactggtgactgattatcgacccatcagcctctgttcgactctctacaaaattatctctagagtccttgtcaaccgtcttaaacctatccttagccgcataatttcccccgcccaaagtgctttcctccctcaccgcttaatctcagataacattatcatcgggcaggaaatcttccatgctttatctcatcggacatctgggcgacatggttggatggccatcaagttggatatggttaaagccttcgatcgcgttgaatggaatttcatcaagcagatcatgaccaagttaaactttcctcatcgcttcatcaatttggtaatggcttgcatttcaacagtttctttctcattttctattaatcagcaggtcctaggcagagtaactccttctagaggcatccgtcaaggcgatcctctttcaccctatctcttccttctctgctcagaaggtctttcgtctctcat

SEQ ID NO: 56732 - DNA, 534 bp, Cannabis sativa
ttttttttatttacttattaaaattttatttatatttgattaaaatagtaagtttccagacgaaaaataaaattaagaaagcaagtaacaatacagtacgagtgtcttttcaatttttttatttactaaaaatacctatagtgacatgctaggcaggtcgggacatgctttcccagtccgttttggcggactctataggttggtatttttaatataaagaaattaaaaattatgggtattactctttagtgacacttcatatttttgtgacccacattacaggacactaacactaaaatttagagtctaagtatgaaggtcactaaaaatcactcctaacactttaatgacccacagtttttgtgggggtcactaaatagtgtcactaaaagtccaaattgtagtagtaattgctagccgaccttggtagcaccatagaggggttggctggctagtgttgccttctggcactaatcttgaccttgttttgtttttaggcctttatgaagcttagtttctcgcatgggaactcca

SEQ ID NO: 56733 - DNA, 1944 bp, Cannabis sativa
tttcgaaccatgtacaagtaagctagaagatttagaaaaatgaattcagataaacctctaagaaagttgtttgcaatcttttttcctttccaagctttccagtatgttatcgacatgtgattgttttgcataattgtcattatttctttaggtttcggtgtctctttctgaccgtcaaaacttgacctcacgacatttgcagctaactttcacacttgcttggcaatattttctctttcgactgataagggagcaagtgtgagtgttacaataagttcgtattgaaaaacactctgaattggtaacttttactacacgtacgcccatttgcatgacttgtcaatgtattttgtcagatagattgaattggtatattttataattttcatctcaaagcaagccttcatggaaatatctttcaacataaacttcatctcatctttattcttgaattcttgaccaattgtcaaatccaacccatctatgaaactaagtgtatcttcacttatgagttgattttattggtctgagtgctccaacagatcgtagtagtcaagtgagtcgatgtgattttcagtcatcaattcttcttatgaacggtttggagttggagatgatcttgttgtacttctgttaagatgatctacatattcacaacaaagattaacaccactttcacctagtacagaagcaatatcacaaacatcttttttaaagtagaattcacgatcaaagtagttatctactaaggaatactaaggattgctcaatttcttttgtgcaactttcaatctcatttttacctatgtctttctttataagctccacatgtagtgcaattccgtgattgttctctccacagtccaaaagataagctgcaagacattcatccccttgtaaaataagtggcgacatgttttcttcaagtgttaggagtaacttatttttaattcgatgtcatttttattgtctccaatcttcttacacaatttatccaataacatctcaaaatgtagtgctcgaattattgattatagatataacttgtttatttttggcgaccacttatataactcatgttcatccttccactccccatcgtactaaacatagattactattcaagtcattcctgtatgaaaaatagatagttgaaaaaaaaaatacaatttttactaattttttacatttaaaataaaaatttaataaattagagtttttttcacttactttgaatgtaatcactctcttgacaacaatgttgatcttatctatatgtaagtgtattataaattttttcacagatttaaagagattttataagattttgagagatttttaaaaaagtaagaaaaaaacccaatgtgaaggtggattagtgttttttctaattatatgatttttaatttttaattaaaaataagtataaaataattaaaaaatatattcttttgatataaaagtttcattaaagaaaaatgttaatgtaactaaatttttaaaaataaaattacctacataatagagagactttttaaggtcggcttaatatcccttaatttattttattatataaaatgatcaaattaagaaaaaaagaaaccaataatcagttagaaaaatattttcttaatatatctttatatataaaatatggctatataataatttttattggtttaataaaatattttaagaatataaaaatattctattaaatttaacagtgttaatagtagagtggtttcgctatttgcaacaaaaatttttgtacaattttttgttgcaatttaggttgcagcgctagttgcaataagggtttctatatagaattccctaaaaatgcaaaaaaaaaaaaaaaaaaaaaatactattttaaagtataaaaatgaaaaaacctcttctctttaaatgtcaccatttttttaatcaatacactgctca

SEQ ID NO: 56734 - DNA, 1724 bp, Cannabis sativa
  modified_base (133)..(134): a, c, t, g, unknown or other
  modified_base (252)..(270): a, c, t, g, unknown or other
  modified_base (390)..(392): a, c, t, g, unknown or other
  modified_base (784)..(789): a, c, t, g, unknown or other
tgtagtattctctctgtaatagggtctgacaagttgtatactatacaacctttcctccaccattatatttccttaatcaccattatatctgcatatctgagaccacccactattgatcctaaggaattctttnnttggcctttatcttttctaaaataattgaaacttttccttagataaataaaatctataattagaagtcaagaagcttctatagatttccaagaaaaatgctccagcatcttactaaannnnnnnnnnnnnnnnnnngtaagtaaattaccaggcatagcatgagccataggtttagataatctaaaacctataacactaggatcaggatgttttgttaagtccattgaatggacttattttcaaaatttcctttcnnntccttgtaatagaaaactttttggttactccatatgaatggttttaaccatagttctcttggctatacttcttagttccttattttgactatccattacttatttaaactaacaatggattttgtcactgatgtcttccaattcataacagggtgagttccttgaaaccttcccactacgaaaatgtaccgtgactatctatccaagaatttaaatggttgtatccgtttcggttgtatcaagacaatagaggcagtgggaccatcttatatagaataaaatgatacaacactttggaatcaagaaaaaaatatctcctctactttgctactttatttcagatttagtcatattctttgagaagtaatatttgttgaaacaaacactttctnnnnnnaatgaccataggatggtccacccttaatcacttagaatagctatcaaacatgcaaaccgtagttaaaagttctagcttttcttaagttcatgatcaggacatccatgattctagtaatggtttacactaagtacacaaccattccatcattctaaaattatcctatggctatggtatatccctagaggacttaggcaactgctagtaactaatcataaccttttaatataatcaatacgcaatccaaatttttggggaggtaagtttgaactgcatatccaccaaatatttctcctcccctattaattttcaagatctttaaccacttaccttaatatttttttcaccattgttagaaattcatgaaatttctcatacattttaaatttctttgcataaggtaaaatctagagtgattgtcttaagaattcaatgataacgcatatgcacccctaaatgtacacccatattttcgaatatagatgatcttacattcaagtggataaaggcatattttctctttgtagagaatgatcttgtcaaaacgactatgaacaacatataaatgccatagatatattaaagtgtggttgtggtcttttgataaattaggtctagttacatcaaagagttcttagaattgtccaagtgggttctggtcacagaatgctaaactaacattccatacataaacatacagtggaatccattgacagaaaatggatattaataacttgtgaaagtcatactgtattctccaatgtattctggaaactgaaataaaattttttatttggaatctaaaatttaaagtcaaagagttaaatttataccaaatataaaatgagtgataattctctcttggatcaccactactaatctaactctaagtttaagttgctataagtaagcatatacaagtagaagatttataa

SEQ ID NO: 56735 - DNA, 750 bp, Cannabis sativa
atagtttggacgtcggatttattcttgagtaaataagtccatgtaaaccttgatttgtcatcaactatagtaaggaaatatttatatccttctatgctaataacatgaaacggaccccaaatgtgcatatggaccaaatcaaatatttttttagaaaaattatgatttgaaataaagggtaaacgtttttgtttagctaaatgacaaatatggcaatgtgaatgacaattcttatgtggaatcttgtttcctttattgaagaaatttgaaatacacattgatggatgtccaaggcgattatgccattggtttacacttgttttattggaaaaaaaagatgaaacattggcagctgcagtagggaaagatacttgttgaatcaagtacaagtttccatgtttttcagctgtcccaatcaccacattccgagtaggatcctgaattagacaagaatcatcatgaaaccaaatggaattaggtgtttcggccatatatgcagaaacggaaaaaagatttattttgaaattaggtaagtagagaacattatggagagtaatataggaattgatatgaacggttccaatgttctgaacttgaacttgttgtccatttggtaacagtacatgcttagggaatggaatatttgagaatgtagaaaagcatgccaaattcgagcacatgttgtgtgtagcaccactatcaactatccaagatatagtattagaatgagatgtattacctgcaagattc

SEQ ID NO: 56736 - DNA, 584 bp, Cannabis sativa
tgaggtaccttgaaaccaataagctagggacatgtggcatgtgactaggatgagttaaaactaacatgtgtgataaaaataaatattctatatgatcagatttcaattcaccgaataattcatttcttgatttgattttttgaattaattatcaaaaaattatgacaattaatgtgacacagatattgatggaatatcgcacctataaatatagagtctcagttagtaaaattcatctaagagagtaaaaggtgcttggaagtccgaatacccatattaactagtttttttttcttttgtagatccaaaactcttgtaaaattaaaactcaaaaatatcaataactgaaagtatttcaatcttttctgcaaatatgttcgataaaacttaaatcatttttatataattattcatattttcctttaagcttacataccaaacaacgggaccaaaagtaatttataaaatagaaatttgcatgttacatctcccctaattagtagttttttatttttgttatcataatacttttggtcaagcaaatgaataatttagttggaatgaagctttgaaatcacaagaga

SEQ ID NO: 56737 - DNA, 1454 bp, Cannabis sativa
gatcaggtgaacagcaatcagttggttgaagagattaaatggagtctaaggactcgggtaaaggctttcttaccaaagaaaataacaaatgtaaataaagagtgattttttactttatagataaacaaagaatacagagaaagaattggagaattgtatagtttgaggcccttgattatgggtgctcttagtttgtaaattcgtttgtgcaatacagctcattgatttatcaaaaagaaaaaaaacataatttgtttttttttagtaccaaatttagcacaatatttgccacttgcattgcaaatgggctaagacaaactattattaaaagacaagggaaatggattatggacaaggaaagacaaccttttctaacaaatgttgtttaagacgggtcaactcattgtatggctttatcccttttcacgtcatgcttccttcatctctccatccaattttcgaagaaatagctccatttcttcaatcccagtaaaacttaaacttgctgatgcctctaccttctgtcaaaatgaaagattactaggtaagtggttgacttttacatgatcacatgatgttcgtaataagaaaatgaaaatttttaaccggtaatttttcgtcaatgggcttcctactgatttccgtggtggccttaagttcattcttcaactacaaaatgagacattattgtaatgtattcccgagcccatggcagtaaagcagtgataccaacctctcccatactcaattaacgaaaggtaatacaactaactttaaggctagcattttccttttcgacggttgcaatgtcatcagcatcttcagcttcctttctcatcagctcatcttgtactttgattgattcaagggaggactggttaatgaagaaaacatttcatcgcagaaaaggcacgttcagagaacaaaatagactgaaataacttggacgttaaaaaatgacaaaaatagagtggaataacaaagacattcaactatcctgtgtgtagcattcaaactcaccttttctttttccatttttagtaatttgatcaccttccgaaaagattcattcagctttctttcctctgaaattaatggtgaaaagttaaacacaagacatcagatgacactattatatacttgccaatcatgtatactgaaaggttagatttgtaccttctaattctaatttctgttgtaaataagaatgatgattgcgttccctttcaagttccaattgcaattgtctaatctcaacagcggtctgtgctgcagcagctcagctgacgactatacatctgttgtcaagtttattcatcattgaaaaaagagttatttgcgttcttaagtggtcaagtatttacaactaacccccaattctaaaattttggtggtaaaacctcctaaatccagcttctgttagcagatagtcctttccgtccatttttgggtgt

SEQ ID NO: 56738 - DNA, 820 bp, Cannabis sativa
aatcaactatcaaggcattctattttttttttcccttttgtggggatgatgatatgaaaatgagactacaattcacagagaaatagatagattgatagacttagcttcctctaacatatgtccctcactacctagtatacaaaaaagatacaaagttcaataacaagtgggtatgataaataaactatacttaatttctttttattatattatccccataccccttttttctccttcaataatataattctttttttctatggatattggaattcatttataaaaaaaaaattctatggatattggaattcatttataaaaaaaaaaggtctccgaatcagaatcacaggagtaagagatccctcttgataagacataagttggttaaaaataaagtgcaattacaaaaccatcactggttgttttttttttttaattcaacccaacattattggggactatacttcaaacccaagtaatgcagtatattgtttcaactgtactgctgaaacatcttacttttgggaaaataagcaataaccaatgaaaaacttattcttcaatactccaaaaaaaaaatccatactaattataaaataatagaaattttcactggtgatttagaagttgtttggaaatagtctgattcaaaagactgaaacatgttcattaatcaaaacttgtcttttccacaattcaattttcaagaggtgaatctaaaacaacgtgtcataatccatacttttcaagaatttaagaaaagccacatcatatacccaaaatatgttagtaacagaactttaagcgtatatcctttgtg

SEQ ID NO: 56739 - DNA, 1158 bp, Cannabis sativa
tttctctcttagatcactgttttctctctagaatctctctccgaggcaattcttttgatccctttcatagagaggctaagtcactatttataggggcttaatacataagggatggtttcctttttgcttacaatgcacaaaataggaaattacaatgtttctataattacaatgtatgaaataggaaacaagaacagcttaccatttgtctgtctcaatcccacgataatagggatcatcttcgtgtctggacacaatgagattattctctgaagttgctatctcttgtaagttactctgtgcaaatagtcttctacatggtcggatgtcttcaccacaaccctgctagaataaccgacaattataactagtcaaatgcaggctactatgcatatttcccttcgcccaggtattagattagaatccgcatgtgcaaaagtacgtcaaggatgattagaatcaacaggccgctcaagcagacaacaaccaagacctactaatgccaccaccagtggatggacttttagaagtcatcaataggggcccacatattactggagatttgggcaaagctcgggagaggtatgcccaaactttatagcacgaacaaaaggaagtagttttggtcgtagaagaaaggaaggcaaaaattccacgactaggggaacccactataaccttaactaaagaagatgctatccatgttcgcttcccgcacaacgatcccttactcatggaagtatagatagcaaataaaatagtggcccatactatgatagacaatggagcttctacaaatattctgttcaaaaccccataagaaaagattggactccaactcaaagatctgatcccctgtatcaaactggtgtatggtttctccggccagagtgttgcacctttggggcaaatttgcttacccctcactgttggacaagctccaaagagcatatctgtgatggcacaattcttgataattgatgttccatcatcttttaatgttatgttaggtcgaccatcctcagatgacctaaaggctgtcaaatcaattttccattcgtgcatcaaatgtatgtatcgatttcactgaccttaacaaggtgtgtcccaaagactgttttctacttccaagaatagatccgctcgtggatgcaacag

SEQ ID NO: 56740 - DNA, 1775 bp, Cannabis sativa
tgggcaagccctctgcaagtttggctcagtgacccaacaatcctaacaattaaggaaatcaaccaggaagaggaaatggatacaataataatcagggtcgtggaagtcaatatcaaggcaatacctctagagggaacaacaactatagtagaaaaaattatggataggggaagatacaacagggacaactcgagaccaacctgtcaactctgtggaaagttcggtcacttagcagctatgtgctactataggtataatgataattacatgggccaaccaccacaagatgacaattagcaataccaggataaaaattcgcaaatgacagcactgatttttactcctcagaccctaaacgatgatgcgtggtatgctgatagtggagctacaaaccatctcactccaaaatttgagaaaatgaccaactaaattgagtatcatggtaaggatcaaatgataataggtgatggcaacaagcttacaatttctcatgtttgtactggttcgttaaataccataaactctaattctcttgttctaaatgatctgcttcatgttccctctattgtgaaaaatttcattagtgtttcatactaaccagtgacaacaatgtatctattgagtttttccctaatctttgttgtgtgaaggatctaacaataggaaggaggtgctgcaaggaacacttgaagatgcccactaccaacttagctccacttcatccagttctcgcacttccacgacctatgccgattacctatctagtgtctttactctatctacagtgtctagttttaatttcctaaaagatacatggcatagacgcctagtcatccatctagttagtattgaatcaagttttaaatttgtctcatgtacattttaatgctaatgaaacacacagattatgtgatgcttgccaatttggcaaagcttactctctacctttccttacatcaatgagtcatgcttctcaagttttacaactaagacacactaaattgtggggtcctagcccgattgcctcactcaccaactacaaatactatattcattttctagatgactatagtagatatacttggctatttccactcaaacaaaaatctgatgcactatcagcttttattcactttaaaagactagtaaaaaatcaaattgaaaagaaattaaacaattgagaactgactggggtggtgaattccaagcattctcagatttagtaagtgaacatggtatctattttcatcataattgtccacacacctcagaacaaaatggtaggctgaacgtaaacacagacacatagtaaaaacttgactaactcttcttgctcaggccaaaatgccccttaaatattggtttggtgcatttcaaacagtagtgtatctgatcaatagacttcctactattgctctcaagggtaagtcaccctttgaaaaacattattctctaaagtttttgattgcaagtttctaaaagttttttgtgtttcttgcttccattgtatttgatcttatcaaagtcacaagtttgagtttcactttgtaaaatgtcttaatttgggttatagtgaggttcataaaggctttaaatgccttagtctacatggtcgaatctatatcacaaggcatgtgattttcaatgaaaatgaatttcccttttcttctagttttctcaacactagacaacctgaacaatttgtcattatgaccactccatagtcatggtttacactgcttattgtttctttgtcttcttcttcccttactcct

SEQ ID NO: 56741 - DNA, 2073 bp, Cannabis sativa
ttaggttgttaagaagctaacaaactcaattagagaaattggtgatgtggcagtcccaaaatccataacgtgtcttaattataacacacacatattagaataacacatatatatatataaatatagaaatatttataccttgtactgatctaatattgaggtaatttttaattttatgagctgtaaataattaaggaaaaaggtgagataaaagaaaagaaaaaaaaaattaactaatccttactatacatatatacctgaacaatgatgaagatgagtccgatgaaagcggtgagaatgtcgacaacggtggaggtggtggacttatcgttgtgtggtcggaatggtgggctagtccacgatgaacaagaggaggtgagtaaaagttttgatattgaggaggaagagggagagatattgaatgtttgtggtcaaaaatattagggatgaagtgggagacaaagagagagataaagaagagttctgatatatataaatataaaattattagaggcaaaggttcgccgataataattaaaagtataatattttaaatattatttaacgttattagcggcggacttccgctggtaatattccgctactaataaatttaaaatataatactgggaaaattcctgcaaaaagcaattccttcaatattattacttttgtttttgaaaaaatcctactattatcggcaaatgtatatgcccctaatagttccgccagtaatagaatatttcttgtagtggtaatcacgatatgtggcgtttctctgagtaggatgttgcatatttacactaagatggctctagaaactctaggcgcctaggttgactttcgaggtattgtttcgtgtgttttcagttctcgggccttggacttggatgcttcatattttcatggtatagaatactgaaagatggtgagttgaaaataacttaggggatccaagcacccattccagagttcccgaagtcaacttagtgtagggctagggactcttcctaggtcgactctttgactcaggacttctcaactcaagattttttttttctttccatgtgtcaaatgttgatgtccacgtcatcgggttcagtttttaggttaagactcatgattttccataccatagcagtacactgctaatttagactcatttgagaagagacgagtggtttgcaaaaaaagctttaacctttgaagcatgtagtatatggatctaaagttcccttaacaaaatagcaaaacatcatccgcgaaactcgaatgattcaatgcaaagctagtgcatctatcatgaaacttaaaattcaattttcgcctaacttttttcatcacacgggctaagtactctatccccaaaacaaaaagaagagacgataatggaacagcttatcttaaacatcttttagcctcaaaataatcatgcattgaaccattaaacattaaggtataaagcgcggggttaagatacaaaatattataagtcgaataattgcttctggcaattggagcctcttaacatttcctcaatgaaagttcactaaacggtatcataagccttcctcaagtccaatttaattatgcagtttgcacgagtatttttcttagtcctggcatatcatgatatgacgatcttggataaatccgccttgattttgaacaataagagtaggaagtaccaccctcaatcttgaacaaagcaatttttgtggccgccttgtagaggaaaatcggctgaaagtcactaaccgaatctaaacatttggttttaggcacaagagtgagcattgttgtattaatgtccttcaaaagatgccctgtgtggagaaaattaagaacatccttactcacctcttcccccacaatttcaaaaattattttcttcacatcctgctctgtatacgctgtcaaaataattctgcaatgctcctcagaaactacagggccttggttaatgacaccctgcaaaataaacctcctctactccattttattagcctataaaatttttataaaaacaaaataaagcttcagtaacaacctcttcttttttttttttttttt

SEQ ID NO: 56742 - DNA, 1623 bp, Cannabis sativa
acgagcatatcgtcaacatacacttccattgtctcacctattagatctgcgaacatcatgttaaccagcttctgatatgttgctcctttgtttattaaaccaaaaggcattaccttataacaatacaaacctcgatctgtaatgaaagaagtttgctcctagtctggctcatgcatcaatatctggttgtatcctgagtatgcatccatgaaactaagaagctcatgacctccagtagcatcaacatgattgtcaatgcttggtaaagggaaactgtccttaggacatgctttatttaaaaacttgaaaacaacgcatgtgcgccatgagccattaggctttggcacaaggacgagatttgctaaatagtttgggtagaatgactcctttatgaagccacatgcaaaaaggcgatcaacttattccttaagcgcttggtacctagcggggtccatattgcggtgcttctgtcagacacctcacacctctaggccaatgttcaatcgatggcgaatgacctacggtgatattccgaacatgtctgattgtttccacgcgaaaacatctagatttggtttgagaaaagcgacaagcttttctcactattgaaaggttaatttagaaccaatttcttaatactttattatgatcaaaaggaacgattggtaccttaattgtttatagtgcagcttgtgcagtattcgtgtaatcgaggatcctcagatccaaatcgggttcttcaacatgcagtatctcctcaattcttaaaatttcttctcaaggaggtggtgcttcaagtaaatatatcacatttaccaacttcttcttttctgcgagattcaatgccgtattatagcactctcttgaattcgattggactcctcgcacgaattctacacccgcggggtagggaaatttattgtaagatgatagattgaggttactatcgtaatatctttccagatggggcaacctaccatagtgttgtacgcggaatactggtcgattattgcaaaatcagccatttacatggcactgacaggggcggttcccagagtaatttgcaccttgatcattcctatcaatgctattgtatctccagtgaacccatagatgctcaaggttacaggtcacaaggctttctcctgcagccccatttgcttaaaagcttggaaatggagaaaattaactgaactcacattgtccactaaaattcggtggacattatctcctccaatatttgcgactatcacgagcgtgtcagcgtgtggatgatgaatccacctggtgtcactcttcatgaaggttatgtcatcacattccttcttgaaaaatttctcagctcgctcatttagattgtttatattggtcactagttcttcttttgctttgtcatatcgctcttgaaattttttggaatctccaccaatatggggtcctccgataatggttaagatattgcgaggagtttgtgaaccagttgcattgtttgtgtcgtcattctcatccgtctggggatgagtttccccattcttcttgtacttaccgaattttccttgtctaatcaattcttcgatttcatcttacaggaaccagcactctagagtggtatggtcgatgtcc

SEQ ID NO: 56743 - DNA, 935 bp, Cannabis sativa
aaatgcaaccggttaatgataatagtttgtacatgataaaaagtgtactgagttaattgcaacaattagtgacagttagttgttagctcaagtttgctactgtatcacttgtattacttatcctatttttctgttattcttttcttcttgttcgaagctctgtaactaactctgtaaacatcgcactatgaatacaaacctccattcaagacttgcttaacttttgcaagtcttgtgattcaatctctttttgtgtccttttagacttgcagagataagttcctctaattttatatggtattaggaagttcttgaccaacgtcgatcatggatgctcgtcaccttaaacctactgctcacaccactgctgatgcaactctgactactctgccaattcagcaacggttgctgtttcagaattctttgaattcatctctcactgttcgattagatcgaacaaactttcttgtgtggaaatcacaagtaatccccactgtcatcggtcatggcctcaatgacattcttctcacttgtgtggccccaatttgaactcttatcaatggaactgttaatccagaattcacctcctggaaacgaaaagatcaactcctactgagctggctaagatcttcaatttaacgtcctcactttaagtctctattaggcccttacacctactgaatgatggctcttatacacgagtacgtcacttcggatgcttcagggaatgacgactaaccatacaaactaacacgagtatttccagcatgctttgtcctcactcgcacgcttcctgagaatactttccaggaggtcacccatcctgagtttaccccaggttaagcacacttaaccgtggagttcttttgtgatgggctaccaaaaaacaagatacaccttgttgatataggtagtaccaatccatccatttaagc

SEQ ID NO: 56744 - DNA, 783 bp, Cannabis sativa
catagtagcaatagctacacccgcggcatccttaatagtaggaaaattacacatggcaacctgcaatacattgagattaaaatcagatgcatcttatatgagacagtataaatataaatacatagcaagaactaacgaaaagaatacaataacctcttctgctaagcgtgcacccatcacatccacaccatctagagtcagggtggagacattttttacactacctgcaattaattttctttttttaaaaacaaattatgaccacataacagtaaaagatttgagttaaatttaacccaatgttgtattatatcaaaaaccaagatgtggaaccttttaactaaaacatccgtatcaaacctactcaaaatatatcctacccccactgaatcaaattataaggtgtgaacttgattgagtttttacatttactttggacagtatttgcataagaagatactttggctcaagccaaaccaaaatctatattctcttcaataaaccatgggatttgacattgctcagatatcaactttccagaattcccacatatggaagaagaatttttttaattcaatgagttgccaaaaaaaatcttaataataatataacatgtatttttgaaggctattttattcatttgcaactactttcttactctaaatgcagatctatataagtaaggtgtgtaacactctcaaacaaagacagagtggtacagtggtagataacagagaattagcttcctcttcatgaattgtataatatcgaatggaaaaaaaa

SEQ ID NO: 56745 - DNA, 895 bp, Cannabis sativa
atcttgtttgttgttgttatatttagtttataatgttgtttttatgcttgatctgtggcttgttgctgttattttgctgtttgttctgtttaaatgttttctgcatgtgtgaaaactggatttttgctggttttctgcattttttttcgtcaggcccgatggggtccgatgctggcccgatgggggcccgatatagggtgaaaaatttggtttcagggatgaaggtccgatggtccgtctagtgggtccgatggttggactcccatcggacccgatgctattttttattttttttttaaatttttttgtcctgggtccgatggtcggacccccatcgaaccatatggctattttttattttttttaatctttttttatttttttgaacatgggtccgacggtcccccttgtgggtccaatggtcggaccaatcgaaccccatcggacctgacggttttgtttttatttttttttgtattttttgtttattattatctattatttattattttatgattaatttattttgtattgaattattaatatttgtgcgactaattattcttttattaataatttttaattattaattattaattattattttagttaatgttttcataattattttatttattattgagttataaatttaatcaattattgttttattaattgttaatttttttattttttatatcaacaaatattttattaattgttaatttttttattttttatatcaataaatgttttattaattattgttttatttttttatgaataattaaatatgattaattattaattatgaattattattattaattatgaaatattattattaattattaatcattattaattattaatcattattaattattaattatta

SEQ ID NO: 56746 - DNA, 1228 bp, Cannabis sativa
cgactcaagatttctcagaacgagcacatggataggacagacagaggagcactgcttcaagtgactactacgcccccacaccacatgaccatcgcacattgacttgcaacaaaagctttatacatattgacaatacatgttctaatgtggttggttgtaataaagactataaaatgagaactaatgacaggatcctcgttataaagaaaacgacatggaaaacgtgtggtttctgcattatataatacttcaaaatcagccttacttaaaggcttgcaacagcttgcacacaggtcatgtaagataatggagtttaaaaaaatgacaatattttggaatgtatgcttacaactatacaatatgtacatattttggaatgtgtgagagagagagagcgactagcatgcgtaattataaattacatacccagaagaattatacataaaaaatggtgttaaattggatccattcgagagatatccaagaattaaactacttatccacacgttcatataaatgttggaacatcaagccacttaacaactaaaacatagaaagagaactaatttgagggaccaaacgcagctcggaattacgaatagagccaaaaaagcaatgcagtcagaaactcaccaccatgaagtagattaatcaattttagatatctcctcaattatgcgagaactatataaaacttttccttggatacttagaatcattctaacttgagagactgaaacaagctagctaagattgttttctaagatgctgccggtcatattattacttcaaaagaaaaaaaaaatcttctatagcatcataaaaacaaataaaaagaatttagatttcaaaacctcatcaggatttctaccacactgccaataaccttaatatttcacagagagcataccaacaaaacaaaataattaacagaacttgattacctcaaaaccatttgcaagttcatacaaagagttgacaaattttgatactagaagtacaaacaagatgatgattattaacgaggggcctttttctttccagcaatggctactttcttacccttcaaagttctacaattgttcttggtgcgctgacctctgcaaggcaagccttgaatgtggcgtactcctctatagcactgaatttccttgagtctccttatagccaaagcattgaaacgtctctgaatcaataaacccacaaaaccaagagaacccattaatga

SEQ ID NO: 56747 - DNA, 1325 bp, Cannabis sativa
tctcgaccggttcgctggtcaatctggagagagcggttcagcccacgagccgaatgggagggcattttgttcaggggcacgtggatggaacaggagaaatcgtgagtatggagcctgagggagattctttgtggatcaaggtgaaagcttccaaagagattttgaagtatgtggtgccaaaagggtttattactgtggatggaactagtttgactgtggtggatgtgtttgatgatgagagttgtttcaatttcatgttggtttcatatacccaacaaaaggtggtgattcctctcaaaaaagtagggctgaaggtgaatttggaggtcgacatacttggcaagtatgtagagaggcttctcagtagtggatttgttgaatccattaaatcttcataacacaatgaggtatgtttcgtagaattatgtttttatttttttttatttttgtacgactccatttatggatttcatgtgttgtagtgtttttttctcccctacttggctaaaatttcaaataagaagctaaataagattgaatgtatgaatatataaacattcttttggttattgattgtcattattttttgtcaagtttctttgataagtttagaactgttgacattagtgaattgatttagtacaaggattggttaagttcttcttaatttgccttactatatgttaaagaatttgttatgtgttaagctagttgatcctatcacatacattttcttgtgagagcgatttctagaaggcacgttagacttaccatagttaaggaaggactagactgcatagatttatagacaccttaaataaaagtagaggtagattttgaagatatttcacagggcattatatggattattgtgcttatcttgaacgagttctcataaccaaaattgaaattaatttataatatatatcttaatttcacctattatataaggctatctaattgtgcttttaacatattcctattttaaggtcactttatcagaagttttaacagttgcatcctcccgcagaaagaaacaaacatttacaatccattcacactaataagtcttaagatttttaacagaatttgtttgtattttaatagtacaaaagtattaaattttaatagctatcagtggcacatatatgatcaaaattattattagctaaattttgatagttttgcagtgaatcgaggtccacttattaaagattccttctcccaaatttattagggagcctcacttagcggagggaaaccatggtaacattataacatgaaaaattaaaagcataaaatacaaagggaaatttgatttttta

SEQ ID NO: 56748 - DNA, 1054 bp, Cannabis sativa
ctcttgcttcaaacgtgtgcttgatttgtattgccttaaaaaattactgagttttggtttttcttctagagttttctttctaggtctgaaacaaaataatttgggccttttttttcttgaacgatttaaggctttaattgatactaggaaaggaggtatttattaaaagaaggaaacgacattttttttaaaaaaataaaagcaaaaaacgacatatataatttatttttttttgagagaacggcacatattatttgattgagggaacacttagtctcataattttattaggccctttgtatatatatgacaatatatatgagagtgtacagttgagtctcaatcatggttctattaactctagagtggctggtcctttgtatatatgttgtcatatatgagtgtacagttgagtctcaatcatgctaacatatatcagagtgaatagttgagtctcaatcatggtcatgttagcatctctataccttacacttgtcaacctcacatgtttgttgtactattaactcatcactagctagctatttttatacattaatttattttcttcattaattcattttcatcgtcatcctcagttatattaggttatatcatatatatttaattatttattttagatgctttcaaattaatgtagtgtttcctccacacacacgattgcactattgaaagtgtatatggagtttgttatatacactttgttataaatgtaatttcttttattaattaaatttattataaatttgatatatatttgtgtattgcacaaaattatttcaataatgttttattagagaagattattttttttaatatattaatttgaaaaaattctttcacagttatggataagagttggatgtatcattctagattaagtgattcctaccaagaaggagttaatttaaatcttgattttgcatttaaaaatgctagtcttgaagaaaaaaattatatgtccttgtgtgaagtgtggcctaattacacctgctattcgcacaactgcatttgaacatctcatatgtaatggatt

SEQ ID NO: 56749 - DNA, 1192 bp, Cannabis sativa
  modified_base (1160)..(1163): a, c, t, g, unknown or other
tataatgatatgtatatgtgattacatgtttaacgtgcatgtttattaagcttgttagattacattgatagcagtatcaatatgcgtagagttttattggataccgacaaatgtatgtttggctcaagtactatttgaccctatcacgttgatatggctagagtaccgagtataagctgatattatggtcaatagtactgttgtaggaacgttctagactcagtattgcctagggcacatggatagggttacaattgggtgtatgggcgcttaattgtaatcagggttatatttatgattatgattatgcttttcttactgagtgtcgactcacaattattgcttgcatgtgtaggtaagggcaaagctaaggctgaacaacagtgagtgcgagcagatgaagattgtacatgtcggggcagttaggcttggagcatacgatctttggaatagcaggttgtattttgtacagtcgcttgacgacaacttttgttttaaatattttgtaactaagttgtaaatatttaaaacacgagatcccaattatatatatgttatttattttgatatttaaaagtattctagaaagtttaaataaatcacatttttcgataaactcgttgattaacaacggatggcacaattaatataaaatcacgataacacgcctaatctagtagggtgttacaatttggtatcagagctgccaggttgttttttgaagatcgtcacgacatgtaaactaataattagagctaagttcgactcacggttcagtaagcctttattgctttagtagtttgatttattagtatgatataagaaaatcctaatagaaatcatgttactagcctaatagctgaataggcgcatgttttaatttcttaagtaagcggtaattggtaatttattcttgaccgcgatctgaccaggcaagtttgttgtttcgcgggttgttctattataatgaacgacaggcaaaacacgagaacccagggttattcggtcggatcaagggccggtcagggagtttagttttcccccgaatattcatggccgaggtagaggcccaagaggcagggcacccgtccagggagatgttaatgttaggtttcatgacctaaataaaactcatttaaatataatcagatttacttatnnnnatagattagaaataacatttaatgttgca

SEQ ID NO: 56750 - DNA, 768 bp, Cannabis sativa
taaaggatagttcacttcactgcacaattcgtgtgcaaaatgagaaaaaatgacgattaatataaaacctcatataagtaaataatcataaagataatatgaaaagcacaagaaaaagtctgataaataaaccaaagaagtacaataaaataaaaattaaaaaattacctttattgaacaaaaacaaaaaatgtgccataaatttgaggagagcactctcaaatcaaattgatcatgaataatgttgatgccgaaatctttaaataatatattaataataacaaacatataagagatagagaaaggggttttggagatttttgaaaaattgcttgatatcaatggtggtttggggagagaaatagtgggtagtttttatatttttcttggtagctcacatttatctttataaatgatagaagttacaccccactaaaataatataacaaattttatttttattttttttctatttttattaaaaacgtacacttttttaaaagtgttggtattgattttaaattgcatttttaaaatattaaagttttaaatttataagctttttagcaacactttatttttaagtgtgtctaataaaaaaaataaattaattagcaacacttatttatcaagtgttattgaataaatattgctagatattaaagtttttaacatataaattatttagcaacactttatatttaagtgtgtctaataacaaaaataaatgaattagtgacactcatttaccaagtgttattgaataag

SEQ ID NO: 56751 - DNA, 2668 bp, Cannabis sativa
actctaagtgggtccacattcacaagtgtctttgatgccttggactttttcttcattttagtgtactcatcgaactacgtaggccactttctctttcttcggttctccactagttctagagttgtctctaacacttgtatctcagaatcctgcgtatctccgatgctggtaatcttcgtgttgtcaggtgtacaaaacataccatcatcatccgatctataatcatttgggagaattatttcattttctagtgattgaggctcttcttgtggttgtggctgtgtatctggtgtcgacctttcaggatctaacaggagtctcattatggtcttcaaatgacccataatctatgtttgtctttttaacatagcggtctgaccttcccaaaaagaaatttgctccctctccacagtctctaaccttgccaaaatggcagggtatactggttcacgagcctttgaggtgcgggaatagatgctggcgggccaagaggaggatcctctgatggtggagatggtgtaggtggttactgtctctaaatattcgagcttcatgtgcctgcccttctaatgttgaggaaagcttctaggcttggctatgtagagcatcttgagttggttgcccatcgtcgcccaacactaattcctccaagtcaacaaatatcggcccctcaccgtcgatgatagtcctcataaactcttcctcatttttctggggacataacatagagtacattgtcaactgaaaataaaaaccaatgtcttattagatggaaattaaaataaaatatatatgactgcaaagcgtaaaaaaacttacatttttcgaaaacaatcttataacttcatccttgccgagtgtggtcttctccttactctcccagttaaccattcttggaaagcgatgcaatttcctcactccatattcattgcctaactccaaaatggcctcataggcccaatactgcaatgctgcaatatagttgtatgatgagtatttcacatctttatgagaaactcccttctcaatcttcttgtgcatccgattcttaacctctacaaattccatcaactagttgaaggagatctttccccacagatacttatagaagaattctaggttatcaaccattcctagcacaaatggaggaacaacagtctcctcctccttaccagtgaggacgcccataacaaacaaggccatccccaacttgtacacatcatcagtttctgtgcaactctcgaaagctttgtgcagttggccaaagctgatggatgaatcaccgttgaagtacttaacaatcaaccattctgaatttcctttctcttcaatatcttgttccgtaggctggggtaacaagttcaaccccgtcaccaatgcaaactcgacctgactgaatgtgcatgaataactgatgggtcaatgccccaaaaaaaattatcaaattcctcttaaagaattgtttaaatggggattccttcaccttatcccataattggaactcgtcaaattttgtcttaatctttggataataataacttccaccacgccaagtgacacgaccggtgtaatgctctgagattagaattataaggcgtggtggtcttgaattctgtaaaaaaaaaattcaagtaagagattatgctgcacactatcgggccttatattggcctttatcagaccaatatcgaacaaaaaatgaaaaatgcatgaaaaaaattaaaaaatgaaaaatgaaaaaaaaaaaaacaatatccatcgggcctacttcggactgggtatcagaccaatatcggacaaacacaaaaatgcatgaaaaatgaaaaattaaaaaatattcatgaaaccattgggcaatatcgagtgtggtatcgggccatcgtcccatcgggcccatcgggcagggtatcggaccacatcgagcccattcacccagcacagggccaaaatggggtaaatcgggccctatatcggcctatatcggacctaggggtaaaaaagggtgtatcgggcctatatcagcctatatcgggccactatggggtaaattatcttcaacctccagcccatacccatcgggcaccccatcgaacgggcatcagacctgcatcggtctccatgcctgtaacccatacacctgataaacccaaatcacacagatttcaccctaaatttaaccctaactaacagatttcataagagatttcacaagacattgtaacaaaacaatcgatttctaccataaatcaataaatccatcaatttaagaccgaaaatttcatgaaaaagttgaaaaaaaactcaccttagacattgctgtcggtgatggagtaatcgttggtgggtgggtcctctcctttattcgtcgatccccttgtttgtcagtcggtcctctcacttgttggggcaatttcgtgtgggcagttagggtgtgggcggttagggtgtgggcgaccgagagaaagagagaaagagagatgcgatagggaaagagagagggctaattttgaatgaggagggtaatttggggatattggatttattgatatatgttagcaatattaagtattttgggtttaggggaaaagttttcccctaatacatgtataaaaaatcaaaatttccttatttaattgggttggattttttttttcgttaaataacaaaa

SEQ ID NO: 56752 - DNA, 3430 bp, Cannabis sativa
agtggagtaccgagctataggagtactcttgatacactcatctatatgaatgtagaagtggggccgcttcttatggaatttggggcaagacttctagagtgttcactatactgggatagatgtgcatggccattaatgcacgagcttgtttgaatacacccttgaaagattggtgcgtggtacaatgttagagatagagttcaagacttcgagtcactctagtaaaatctaaatcgtattcactacacaagattcaaatcgaaagatatctttgctgaagcacttcttatagttgattgatattactcgagaaagtgtttttaaaaaattttaagtgggggattgttagaagttttatgaaattatataaaaattgaaaagtgaagtgtgtgaaagatttgagtcccacatgggatacgaacacttcattagaagtgtataaatagtgcctgttcgagaattgggtatgagccccaatgggtacctagtctttcgcgcatgggtgaggactcacgcactggaccaccacacacgcacgagcgtgctgccgctgctgtgcgtctaactgactgattcgagccaggtgggcctgggctggcaggcgggtgaggtgtcactaaattttttaaagaatataaagatttattttttatttattaattaattaattttaacgttattagaagtagtaaaacgcgatcagtcaatgatgcgctttttaccgccatgaaccaactcctcctccacgataatattactattttcttagttattattcttagatccactttcgtatataagtcatatcagaacaacagaagaacacattttttttaacataaaaagaattttctttcttccttataatttttctcagagcaaaatttaggaagtaatagagcgatatagttcggtgtagaatatattgtatgtacactaaggctattttatcgtggggatgttgtggttgcttgacatccatgcatacttcaggcagagccacaaaacgtcttaaaggaagtgatattgtctgcgactcagccagaattttctattggtaattcgttctattttcattgtttttaatttcagtataacattaactaagtaacaaaatctagaaaatgaaattgttgcatgctgataaccaacaacagctattcagttagttaattagagcttgttagtactgttagttgttaacttgtcttattttggcaaaagcttcggtaacaatttttatatcaatactttttctatatgtgaaatctaataaagaaaatagtaagtttttatagcattcaagcaaagaaattctctgcttttctttctcctctatttaatttcattacggtatcgaagacacttgactaacattaatggcttcttttggtgaccactcgtctcaaagtggagctactgatctaatgtctatgtcggctcaattcacaactggggaatcttttttccaactctctcactacttctcttatcttaactcttgattaaataaattttctttctagaaaatctcaagtcataactattgttataggtcatgatcttgttgaacttttgtttagtgatattgctccttcttcaaagctcattaatggcagagataaacctctattcttcatgtggtgtcacaaggatcaattgttgcatgctttcttggctctaatctttgatgactaaatgaatcttggtgactgtagcttgttattcaacattgcattttgtttggaaagccttggaatagaaatttcccatccaatcgaaagctaaacttctgcaacttaaaagtcagtggagaaatgtctaaaaaggtacattgtcaatctttggctatattgataaaataaaatatgtgtgtgattcattggccattgttgggcatcgtgtgaatgatatcgatattgttctgcatgtacttgatggatttgatccagaattcgattctgctatgtctagtatcaatctacaagtgaggttcttcttgtggaagaagtttgggctcttttaatgtctcgtgaatcaaggctcaaaagacatacaactatgatggatacctctactaagatggccaccaattttactgcgggatcaagaaatggactatatagaccttataatggctcaggtaaaggtaatggcttagagaatttatcaagattctacaatagtggtaatggctcttgacgttttattaataagagaactatatatcaaatttgtatgtgttttgggcatactgttgctacatgcaattacagatttgatagaaattaggtgactccaaatgcttcatcagctcagcctcaagttaatctcactaagtaggttcttgattatgatgcccatgctttttgttgctcaatcagtctatgattttggtgatgatgtagggtggtatgtcgacactggggctaccaatcatattgcatattttatggaaaatcttgacacaactgctccttattctggccatgaactattgttgtttctaatggtaagaaaattgtcatttctaacattggtatgactaccattccctctaattactcatctcttttgaatttaaattctatcttgcaagttccctcaattactaaaaactttgttattgtttctaaacttactaattacattgatgccttttttaaatttcataaatcttgttattttgttaaagatagggaaataaaggtagtcttactcaaagggaaaattaaagatggtctataccatctaggaaatgatagctctagtcttccaacactgctctgcaagttcatcttgacaccttagaaggtcagtgcaagccttcattttgtagttcccaatcttgtaataattattgtactcaaactgttaatttagcttccccttgtactgaagatattagaaataaaaattctctgttggattatttagatgtctctagtcctattatctattttcccaattcagcatctgatattaatgtgtggcataacaaacttggtcatcctgcacctaatattctttgtaaaattttaactaaagcaaatgtatctcattctcttaaaaacctacacattttgtaagccaaaaatcccatgggcaggagaacccaccataaccttcaacgacgaagatggtgtcaaaatcaaattttcacacaacgacttgttggtagtactggtccagatggccaacaagatgaaggccagaactatgattgataatggagcctctttaaacatcttattcaagacaacataagaaaatacggggctccaactcaaagatctacccccctgtcttcagcctgtatatggtttctccagccaagagtcgaacctttagggcaaattcgcctacccctcactgttggacaagcttcgacgcgcataactataatggcacaatttttggtattggatgt

SEQ ID NO: 56753 - DNA, 704 bp, Cannabis sativa
gtccaccactaagaccacaccgagagacttcaaaagcattatcaaaagatagtctaattctaaagctgtcacagtgaccagctaacagtttagactcctaaaatgggtcttgatttagactatagtaataattttttttttgagggatatagtaatgattatttaaaacaattatttaatgcgaaatagggaacttaacctaaattggaacttaacctatttaaaacaattaaatagtcaaactgtggtaagcaaggcctctttaaaccaccattataattgatttaaaaaattgaaaaagtagtagcagtattagttaatttaaatgataaatgctaaaaggtaccagtggtgtctagcactctcctatattagtctaagtaagtgtcgggtcctatataatttaatataatagcttttagagaatatcgctaaccaatcgcaacgcgacgtgtcgagaaggtgctaaataacactattgcctaatagcaatgctctttaaattgtataatttctcattaatcaagtacaatgccccttccttttcaccaaaatttaaagcgtcttaatttacttatatcagtagtaattgtcagaatgtaggtgttgaaattacttatatattaattatatgtagccaattgctgcagagattgcgtatttgatggagttttgctaatctcagttgtcattatttttgtttt

SEQ ID NO: 56754 - DNA, 560 bp, Cannabis sativa
gtctcgacacttggggatgtttatatactggcatttaatgccttagttgttggtggacttacccctctattttctttttccttttcagcctatttatacatgtagcccccttcattaatggtatcattcctctaaagtttctaagttttctttttgcgcgtgtatctcctatttctcttcccctagccttaaagatgtcaaaccttcaaggttttcctcttccccaatcttcaagtggagaagaattccactctaatgttggggatcgatctccccctagccctgcgattttctctcgttactatcgacctagtggttaggctattgttgggagaatgatgcgggcctaccgtgctaggcgtgatgatgcgtcttcttcttctgacaaggagtggctccagaatttttttgagaatgagggatttaatgtttcagctacaaccagagtccctgctgaattccatgctctttgtttgcgcactgaacgtcgtcgcgactatcgtcgcatgcaagcccgaaagcgttgggcctgggacgcggacctagagagggaacgttta

SEQ ID NO: 56755 - DNA, 850 bp, Cannabis sativa
  modified_base (28)..(34): a, c, t, g, unknown or other
acatcaatactatagttaaatgtttatnnnnnnncattttcattgttttttagatttctaatggtgaatttgtttatattaaattacgaataaatatgtagatagagttgcgtacgtgaaaacaatgttttaatttttaatgtttcataacagttgcattacagttgcataaacattttgctaacagttgtttctccacatattactattaaggtacaactaattatcgatcaatgacaaaaaaaatactaacaaatagtttcttatagattcacgttcacatttaatatttctatttgcaattaagttgcaaattagttaaataatagttttgctactacaatatcatagtattataaaaagagaactcggaattatcaaatacgcgatctgaatagattaaacacgattgttgtaatattcgtttatattaaatatgtggaattattagttgttttgtggttttatgttagttggctcgcaatagatataattgttgcattacagtttcatcatagttgtcttatagttgacttcttctttcccttatggccgtcgaagttgaaattattttcaggcaaagacaccttcgacttcttcttcactggacgacgaccacctttagccacggggggagcaaaatcgaagtcaccatcgtcgatgactgagcatttccctttagccttgttagcaactaatttatgacctattttttttagctttttttggtaatggagatggagaagcagaatcacaagtaatagccattataaattaaaatgaaagatatatataaaaaaaaaaaaattgataaagggggcagttaggaaaataagatggtgaaggttat

SEQ ID NO: 56756 - DNA, 1266 bp, Cannabis sativa
aaatgtttaaataaccgaataaagacaaaaatgtaaaaaaaaatgacaaaaaaagataccaagtgtaaaaatccctccgatttaatagataaccaaaccgaacagatccaataattatccaattatatttatatatttttaaaatacatttataatttgatatatttaatatattttattttaaaacatatattaattgatttaatatatatttgacacatgagattaaagaaaaaaaaattatatctaaaatattaattctcatcttcctaaatgttaataaaattgtcaatgcgtattgaatatattttatcttttgatcatcttattattagatgatgagaattaggttggactaaactaatgtttattatgtatgttgaattattagtttttaaattatatttttttatatacatatttttctttttaatgaaatcaacttaaatggtagctaaaatagatgggatgaatctaatccaatccaatagaaattcagttaatgcatccaatggttggaaccgatccaatccaatacaatacatctattggatcggatcggatggataacaaaatccaatatccaataaataattagattagatcggttgggtccaaatccattggacgtgatccaatgaatacccccagcttctacaatgcatcttataaaaaagatgcactgatgcaccttttatctattttgacatccagaagaatattttttctattttttttatattcgtgtgttatagttttctaaacatcttgtaaaattttaagaaattcggaatgatttacattatagaatgtagtgttcaaataatttatttcacacacgtataaaaataaaatagtcacgcgtgcaaccgactgtttgaaccatatttttagcctgttaaatttctcaaaattttgtaagatatcttaaataactacaatttatatgaccataaaaaaatgagctattttttttttttaaataatgaaacaaataggaatacatagtgcatcacttttagtaggttgattgtagaattttctagtattatatatgaggcaaaagatttttgagattatagaaaaaagaagaaacaaaacattgtcctttttttttcagaaaaatatatttctaattactttaaatttaataaatcatattttatcattttcttaattcttgtttgtttataaaaaaagttcttctagatggttgaataaaaaaattaattttattttcttacaagacttttttttttttttttt

SEQ ID NO: 56757 - DNA, 1945 bp, Cannabis sativa
aaagataaaccacaatcatactcagaccaagttaatttttacattgtaaacattaaggaaatcttttttttcctttttttctcccagttctttcaaaaagaagaaccttttctcctatattggtctggaataggagaacaaatctgactgctccttccacgacttcgacaaccttgaccatagatcttccgacagtttcgacgccaaattcgatgttgccaattggaaaatgtctagacgagatataagcattcaccggagctaatagcggttgggcgagaatctatcgatcactggagctatcttcaactaccggagctaacaacaatcggagcaagaatcagccaccagagaaagagaagaaaagagagaggcaacacctgagagataaacaactttaaaaaaattaaggtttgacttagaaaaaatacaaaagcattaaatatagtcttcaaaactaataataacataaatataacataatatataccatatataagtttgaaaataaaaaaaaatgccatacaaaatagccaaacttaaaattgctatatttatgtaaaaatatttcaaaattttatattaggtgtaattttcactaaaaataataccaaacttgctctaaaataataatgattttaattcagtacctcaaaagccaagaaagaacattatggggtatcgttgaattaagtatccaccataggttcgttgaattcaaattaaatgtgacaatacgtgcgcaattaaaattaaatgcaaattagggagagtaattaatgtgaagagggattgaatctgcagtattgggggaatcatcagaagagaaaaatgagagaaaaagagtaagtggaattaatgaagggaaatgggattaataaataggaaaagataaatgttatggggcaccagtgacaagtctgtctggtggcagaaactgaagactaattttagatttccgaggtaattatgtaagtacgccacctaaatctgtaggtagatatttattaagcaataaaagagtcgaacctcgaacggtctatataaaatgttcatccaaatcaatcatgttcctatttatgtagtacgattttggacgtaatagccagatccaataacagaaatggattctcagctgtttgaccttgatcaacactacatcgtcgtgtttcccttcatggctcacggccatctcattcctttcttagccttggccaaccaaattcaccgaaggacaggcttcacactcatcatcgctacaactaagctcaccctccatcatctccggcgatctacctccagcgaagatgatcacgaacactcaaactccggaatccatttcgccgagctacccttctccagttccgaccacggcttgcccgacaacactggaaccactgagaacttgtctcgtgcccaactaatcgacttcttacacgcttcaacatctatggaaactcctttccgtaacttcatccacgaatgtatcggtaaacatggacgccctccactttgtattatctccgacatgttttttgggtgggccgtcgacgtggcacgtagctacgacaccgtcaatgtcactttccttacttctggcgcttacggctctgcagccttcatttctatctggaacgaactccctcaccggaaaacagagtctgaagaattcgaggtcactgggttccctaaacggtgtcggttccaccgttctcagttacattatttcttgagagcagccgacggttcagattcatggtcaaaattcttccaaacccagttgaggcttagtctcaaatcgcacgccctgttgtgtaacaccgtcgaagaaatcgaaccgctcggactgcaaatcctccgggattacagtaaacgccccgtttggtgtgtctgtccgcttctccccaaagctgtgttaaacgacaagtcgttttcaccttcttct

SEQ ID NO: 56758 - DNA, 1432 bp, Cannabis sativa
aaattctctatttatatttacttagagggaataggaatcaattgtttaatatttattctcatacaattgtctactaaattttagaaaaaaataaagtagtggagcccgcacaaattaagaagaaaataaagggaaatgttctccccccatttttatagaaaatacctttctctttcctaatttaatttattttaattttattaattaaaattgaaaaagacaaatatgccttttaaaaatctataaacaaaaaattattacatattttaacaattacaattttgtcaaattaaaatattctgattaccttttctagttatgtaaataaaataatataattttgattttttttttttgtacagtttgggaaacaacatagtaaaatattattttcgattattttctattttaaaccgattcatttcttccattaattattatgatttcagttatagtttggtaaagtgccattaattttatttattatagtcaattgtaaagaatatggtgacaaaaatacataattaatgaattttattacagttaactacttatgtaaatcagttgtaattctagtctggcgagctgttaattaaatactatcattcaagtttctgacttttgctgcagctgtactgaagcgactcaagtatgcttttaagggactctcctggttgctgctcgatgttagtcaaagatgaagcctctggttgatgatctcttgcagcttgaaatcgctttttgaaatccttcgataattttttccaggatgttatggaatagttggtgaatttgtcaaaccaactactcgcagcccctgtcaaggaagttggaagcaatatgcaacgcaagctgtttgaaacattgcttgctcgcattatagtgtgaaaattgtttaagtgggcgattggatcagtggttctatcatattgcgagacatgtgggtttttaaatccctaagaaaattgtgatttcaagatgtcaaggtggaatggctcagtttctttatctgagtcgtatcctggcagtttgccatattccccatcttgatatttcttaaatttttcctccaattgtattacttttagttaaatgggatccacatgctattgatttgcattttgattaagttgattatgcaaatcaagtgcatttcgattcaagtgcttgtgaaggtctagttgccttcaatttaatcgctcgccgagattaggcttgcgatgcctttgctcacaattactcacggacctagtcctaagtaacttttagactagtaactatgcgagttacttatactttcttggtcagtaaaataacatcgagatctgctcccatcttacgtttatccatttgttccagtcaacctactatgcctgtaggactgtgattctcctgtactcaaaattgcttcacgcatctcatctcgcattgg

SEQ ID NO: 56759 - DNA, 930 bp, Cannabis sativa
aactcaaattaatctttcaccaactgataagtacccaaataggcattaaaatacataattctcatgctctaattccagcaaacacatatcaacaatttcaaatcaacaacagaaagattaagctgcaacattaagttcaattccacacaatcccatcttcaaacatttacacattcaagccaagaactcatacctcaagcaactaatttcagagctaaataatagaataaaaacactaataaaatctctaaatttctatctaaacttaatgcaaaacaaaacacaaaagctctaaacacaaaacatgctcacaacaacaagaacatcccaacatgcatctcaagatcataaacacataagaacatgcttaaatcactacaatttcagcaacaattgaaaggcaaaaagagataaaaactacctcaagatctcaaatcactctagctccaaagattatcacaattcaagcttgaaaccaagcaatttccaacaaaatccaagaacaagaaagaagagttttgagagagtgagggggtcaatttaaagggctgagaacaaatgcatgaattgcttttcatttttgcaactaattctcttttgttacaaataatccactttgccaatttaccaaagtgcccctagggctatataacactcataaaagcatttaagggtaaaatagtcattctcatcacaaatatactaaaattaatttctatttattcacatataaataaaataccaataattcatcccataagtatattttggccccgaacccggttcagcctaaaatacccggttgtgactataccgcgccaacttgtcagaacacacataaaaaaggacaaaaaaggcatactatataataatatagttcataagcacatcataacataaatttctcagttttacccttctcgggtcaaa

SEQ ID NO: 56760 - DNA, 1139 bp, Cannabis sativa
tgtcttattattgctttatcatatatctgttactatatatcgtttatcgcttataaaatagactcattgtcgttggctaaaagcgaattcaacaaatacatttagattttatgtaagtaatataaatacatctaaattaataacaaaaaaaaatacacaaaaataattatattataattaataacagtaatatagaatatgtgattaaaataatacaagtataatttaaataaaatacaataacagtaaaaaaaatatgactacaacccagaaattggtatgaacaatacaacaacaaaaaacaaataaaattatcaaatttgcctcctcaatctcggctagaacctgaaatcaaaattcattaaacagacaatatactcgtgtttacaatacaatattagaactaaaaaagcctaaaaatattttagattcactccgagcttctaaagtgatcacaacaagaatcagtaccacaaatgagattcaaactacacaagccaattgagcacatatcacgctaataatgattatagaaaaattaagataggcaaagtgcgggtgacccaaaagaatcgtagcacccatctcttcaagtctgaatcttgttgtagccgagccgcatacaattattaaaaacactgaacttgaccacatatttgtttttaaaaaaaatatataattataataattttatataaataattacataacattctacgcagtggcccaatgaagcaaacatgtgaaattatgatttgagttgaaagaaagcacctgtttggccaaggtgcaagctttatcagattgattgagaatctcatagtagaacattgagaaattgagcgctagccccaacctaattggatgtgtagatgcaagatcggcaaccgctatatccttcgatcacaaaaacaacaactgagttattattattagaacacaaaccaacttttcctaatcagtaaccgcaaataaaacaaggcaaaaagaaaaagctcacacaaaatctaaacacaattgtgaaatttctaatcggattgtcgatatcattaagtatgagttgaattttaattcgattcaattcgatttctattcaaaataattaattagttaagaaccctaaaatcaaagagaaatta

SEQ ID NO: 56761 - DNA, 1010 bp, Cannabis sativa
tatttatatatatttatacgtttgcacgcctatatatatttatatatatttatacgtttgcacgcctcaaaatcatgtgaagaatatagctaattaaacacgttgtaatacagaccctataagtattaagtcctttaattaaggggaattaataatataattaactatcgtgccttttaatatttttgttttctaattttttaatcactaaataaaagtaaaatttttgtttttgaaaaaaaaatgcgttctgtaactacttttgtttttcaactttaaaaacagaaaacaaaagtgtgttctgtaaagttcgtttttcattttcattttttgattttatttacgtggggtctaggtccggggtcgaattcgggttcaggtcagagttcgggttcaacgcctaggccgtggggggatatgggtccgagtctgatcgaagtccaaaatattgattaagaaaaagaaaacagtttaaaaaaaatattaaaagtggcttttttcgtttttaaaattttgattctcaattaaaaaattgaaaagtaaaatcagtttaatagaacatatttttaaaaaatattttcactttttcaattttaaaacagaaaatggattaaaaaaatttaccaaacgtcacctatatattttatatttcattgtttggatataaacgcaagatatagatcgtactattaaaatttaataaaaacatttggagattgaaacatgtacatgtctcgttccgacaaatttgtaatatataattgaaattaaaagttacattttcaactttgtagaaaaataatgctaacaagtaaccctttaatttatataacaaagtacatatttaaaattaatagaatgactcctataattatatgtaaaatattagtaactaaaatgaggaccactcatataaaagaaaataataatatctccacaactatgtagtcaccaaatatgtagattaaataaattattaaatgccaaaataaaatctaacatccatcatt

SEQ ID NO: 56762 - DNA, 1405 bp, Cannabis sativa
aaaaaaaaaatggtaccttatgtaattattcctatataatatatcgatagtatttgttaatgctggtaagaatgatttaaaaagtaagtttgattgaaactatctaatagttaacttagaggaaaatctatgcatgtgtgtgtgtttatttttttcatcgtaaaaagaataagatactatatattctcatctttatttgtttcatctaattttaattacagatggtagacgaggcagagaaggaagcagtagcagctgaaacaaataaagatgagaatagtattactattagtagtcatccagaatcatataacatacccacttcaaggctttgaaccgagtttgagtatacatgtatactaattgtatatgcatataaattatgtataatgaatatgattgatgatttatatatataaatatatatagctctaatttcggaataaaaattatcacaaattaatagtagtgtatgtagttaaaacaaaggaaggaaattaaggccttgcatatcatttctgtatatatctataacgaaattaatgataattaaatacaagatattatattaaccaccttcggctgaacatagagatagaaaagattactgatttaatagtgataattaatttgtatcacactaaattgtagatagatgtaggttatctttacacccgcgctctcaagatggaataatgtagatatataagggagtgctgagaatgtcagcgatgtatacaattttttttttttttttgaaataaagcgttagatagatattaaaattagactttacggtcattacaaatgatagtatcatgaattgaggagggttccataaaacctgagatgttttgggcgaacgcccaattagccacattatgggcagcaaaattacaacaacgcgaaataaacgaaaaattacaagatacaacgtttttagagagttgattatttaaagaaacataattagcaatattccaaatagagtgaaggcctttaagcgctttgataacaatttcagaatcactctccaccaaaacatagttatgattcttgagtctagccgagtctaaggaaagtctacaagtcgccgcttccccaatcaggggatctctgaagttgagcatgttaacagccgcccacacaacagtaccagagtgatccctagccagggccgccacacacatggagtctccaccaaccctaacatcacagttaattttgatccaatcttcaagcggaggggtccaagccggggaggccaccgtaaccataggagggaaaagacaggaaacataatctgtataacaatgagaaatagagtcaatggtcatagcaatgttactcggatgagaattatgtaccttgtcattacgggtcttccaaattgtgtctacgacga

SEQ ID NO: 56763 - DNA, 765 bp, Cannabis sativa
ctgagtcatcttttcaaccaaactggagcattcttttggtgataatcttttaggactgataggaatttctaaataggtgaaaggaactccacctctttggaaacctgaagcatcaagaattcgttgaatctctaaatgagtcataccatgacaatagatagccgatttggagggattaagttgcgaacccgatgtctgagaaaacagtttaagaccctgtagcaagtaaatgatgctattgaaatcaccattgcaaaatagtagaacatcattcgcaaacacgagatgattcaaagtcagctccttgcatctatgatggaaagtgaaatcggttttctgcccaagtttcctcatgatccttgttaaatattccatacccagaacaaagagcagaagggacataggatggccttgtcttagtccactttttgactcaaagtagccatgtagggatccattaatcatcaatgaaaacctgggtgttcgaatgcataacattacaagttgaatgtttttctttttattaattaaaatttttgtactttatttttttaagcttaatttgtacttttgatttttaatttttaattttatttagttttagtatgagctttgaaattatattaattgttgttacttaattataagagaatttgatttaaaaattaatatctttgttctttgaacttacaatattactagatcgtgttttttaaaatatacaatttgttaaaaatttcctgatatttttacatcgctccttct

SEQ ID NO: 56764 - DNA, 1389 bp, Cannabis sativa
cagagcaatgacctggatcaggagaagctgaatgactatgtcgagtggaacaaacatgcaggttaagttggactgattactcgggtaccatcgctaggatgtttagctatcttggcttttttgttatcttattttttagtctactgttttagtttctttcattggttgttattttcagtctgttattatgtcttttagagtctgttattttcctttgttttaaactctgtattagattggttttcccttttaatgcaatgacttgggtgtgctaacaccccgtttccattaaaaaaaaaaattaagcacaacaacatttctcaatttataattatttacacactattctagaataaaacgagataaataggaactagaatatcctaaatataacttattttttaattttttgtatctaaaaatatatatattaaaatatttttttaatttttttcttatttattatagttataatatttttaagaaaaacttaaataatttacagtgtcattttgaagtttcttttacacatagtaaattatcatatcaagaactctattgttaatacaataatgaatatcactaataaaaagttataattatcatttttatccactaaacaaatgtaccaataatgactattattgactatagtgaatatagaaacatggtctataaaaacataaccaacttcaagtgatcataagtagtgttggcgcactatattttcattattaagatcatgtgtggttgaggttgtggcatgtggttattatgtaataattgaaaaagaaaatcaaaatgtgaggcacaaaaatccaaatgcttttatcttctaatatgttttgtgtgtacatgtgaaacatgctacctatatatatagtgtagtaataattgagagtgaaaaaatctttagagtatgctgttgtggtagacatattatgtgataaaatattgatatgttatattattagagtgaaaataatactatttttgaaatttgtatagatgctatattgtagcattgatgctattcatttttttaaaataaaaaattgaagtgaaaaagttattgtatctacaaattaggatatatattaaataataatgtgtaagatcataattatagtatttttaaaaaatattattcgtttgagtgtttttaaaagtaagagtgtcaaatatgatgtggaagagagataaaataaaatattatatttttaaatgatgtataaatttttaacatcctttaaaaatactattattggagatgctattagtaaaaaaaagacaatataaataaaaaagaatatgtgctatatatatggtcttttctttttgacatgcatgtttataaatatcaacattcatacatacatatataattca

SEQ ID NO: 56765 - DNA, 1334 bp, Cannabis sativa
  modified_base (428)..(435): a, c, t, g, unknown or other
aaactaaggaaaagaggaatgttgattacaattaatgacaataaataaaagatttggacatccacataattaataatatttataacaaatcctaatatatattttaaagtagaacaacgccaagcaatcatcatcatcctcatcaagtaaaaacctcaaatactagttaagatacctctgccgaatgttacggtcattaattctttctgaatttcatgttggttgtcaattttatttgcctatatatagtcacactacaagaaatatcactttttgaaattgcgctcgtaaaatataatttatttgtgatgtgttggcaaaagggggttagcaaatcaatattggtattagaactttttccagcataaaataaaaagcactggcaaaaatgactttttccagcgcgtaaatgcgttggtaaaagttannnnnnnnccactgcaaatgtacgctggtaaaactttaatctctttgccagtgcagtttgtgaaatgcgttggtaaaaatgggatgaaacaattttccatgctttgattggttgctcttatgctcttatgcttttaaattaaaattattgtgagaagagtagtaagaatgtgtgtgtttgcttaattttaattagttttagttttatttttaatttagtaagctaacctttaagtcttgtaaaaattgttattttagttgtgtttttttaattaaatgttgcttgtttgctgtgggaaaaaagaattaacttgctaggaaaaagaaaatgatgcaaaggcaaagtggaaataaaagctgaaatctgggagaaaatgctgccagaatgctatagcgttctgcgcagtttgggcagtgacgtggaaaaaatttaaaaaataaatttcacttatccacatcaacaattatgtaccagttactcaaagtacgctagctggctgctgtggaaggaagaagactaaacctagtgggtcaagattggaaaggattgggcttctatttttggggtattattttgtaccctatttacccaacaaccgaaaaaagagaactaagtaccaccttcttctacacatgagctaagctgccatttttggagagaattaattgcaaaaaacaaagtacagaagaaaaggaaagagaaggggaaccaaagtgcaaagagagaaggacacgcgctttgtgtttgattttcttttaccttccctttatgtttttctttcttcttttcttttcttgtttcttttctttagatattaaaaacttgttgaatattgtaaaaaatgggcatcaaccatggaagacaaacttttagtttgaattttattttttgatttgaatatgagcta

SEQ ID NO: 56766 - DNA, 1000 bp, Cannabis sativa
gtaactgaaaatgcagaaaatggcaagtagaacaatgagcataagaaaataaagtaaaaataaaaattgcaaacagaactaatatatattccaaaaagttaagagaggaatgttatctttgagaattatcagcataaacaatgaacataaccgcaaatacaatattgttaaaggggccttgtgactcttatcaccacagtttatatatacctgttgttctattctatcgtctgcccggtttgaaggccttcagttcctttacacataaccaagctgtatcttctgaaagaccaataatgcagacaactcttcggcaagcataacatgatattcaggaaatccaagtataaaacagtcacaaaacggtaattaatagagtacgcatcttaactgaaacttactgaaagtcaaaccaggatcgaaattgtcacctgcactgggaacaatattctgccaagtgctgctacaagtaatttgacattgtaggcatgccaaataattttggaatgtctaatatagcaacatagaaagattgtaaggctaagcagaagctgtttagtacgattgagttgtctacgccaaatatcttagaataagtagatcattatacacaaataaatacatgttagaccaaacaatgaaagctagtagtacgtttaatactgtctatcacataccctctcaagtgaaaacaaatgacataagtattgcaaacatctaaatacatgacaacttaggtacttaaaacattagaagagaaggaactagaaattgcaacaagacttaaaaaagatttacatttatgtcagacctgataatgcaaaaaaacagactcgcagtagactgttagaagcctacaacaggccatgacttctcatttacgcaggcaaaggcgtctcgttattatttcctctcacattcctcaatgagcatctgcagatctatgatgtatggcaaaaagacgtaattaagagtagaaactttgtatccataagtaaag

SEQ ID NO: 56767 - DNA, 1183 bp, Cannabis sativa
gatctcgacccctacccctgtcctggaccccgaacccggacccaaacttggccccgaacccaaactccaaaccccgatcccaagtccatcttaaataaaatcaaaaaataaaaataaaaataaaatttacggagcacacttttattttctatttttaaaattaaaaaacaaaattggttatggaacacattttttacttttcaaaaataaaattttaaaaacaaaattggttacagtgacagaactggtgggaaattgttggggaattaaaagatgctaaccaattgttggctcttggtttagctgatgaaatgaagagaagtggatctcaattcacgtggactagtaatcaagacaaaggagagagaatttactcgaagattgattgggtctttaaaaatgaggaatggctagatctccatcctaacacgaaagctttttcccagtaggaggatgtctcagatcattgtttttgtgtgattaagcatttaaaattgagaaacttgggatatatgctatttaaatttttcaacatgtggtccaccatagtgaatttaaagagaaggttcttgaatcatggaggaaagatgctaagggaggaaacttggcaaccttaagttacaagttaagaaggttacaaccactattgagaaactttaactctttctattttgaaaatgtcaagatggattttgagttggcttgggaaacatacaacaaggctcaccttgctcttcaacttgaccctcattctcttattttacagatggaactaaatcaagctagagagaaaaagctgaaatgtagcaatctttatggcagcctacttaaacaaaagagcaaggttgactggatcaagtttggggactagaattctacttacttcaatgtacgcattaagaatagaagagatactaacaggattgcttctttcgtcaatgaacagggacaagtagttgaggattactcaaaagttgttcaccactttttgtctcatttcaagagcttcatgggaaaatcaagttctacaatagagaccattcttccccaatgtattgaagaaggcaagtaagaagtcgttgggaatacttcgttgggaaaaaccattatcaacaatgactttttaagtcgttgggaataaaaattatcaacaacgacaaagtcgttgggaataatatttatt

SEQ ID NO: 56768 - DNA, 769 bp, Cannabis sativa
  modified_base (66)..(66): a, c, t, g, unknown or other
aaaaattgtaaaaatatttaacattttgcacaaccgtatttttgtaatttttttattgtttttgtntatttgtaaaataatccctttattaagttcatttgacgcacatagtagcaccctaatgactataggttagtccattaaattatagtctactagaaataaagtagaggcccaatagctcaattctacttcttagagtagaatatatatttatgtatattgaatggtgagtgaaaaataggtgaggatagtagtctgttaagggttattctccataaaattcttttgcgtattttttacttgttttgtggttattgtagagatttgcaattgctaaaagatagtcattggagaaacaatgtcaagtttaagaagtatttttattaccaaagtaatactctaaataaaatatttgatcttgaacaatatgggcatgattttgtattgattcttgttgataattgtatgctcattatgtagtaattataacacagccgacttagttcgagtttgaactccattacacaccatggatgaactgaagtaaagctaaagaagaaaaagacaaaataaatggcgatgagatattcaaggcactaatatcatattagaaaatagagaagagaaaattatggcaaaagaattctcctattgattattgaaataatttatacaagttttctttttatactatgtaaatcaagaatgataacagattaattaccacttgtcgagctactaaataactctatttacaataataaca

SEQ ID NO: 56769 - DNA, 1882 bp, Cannabis sativa
cgtttgcgtatatgatgcgaggcatttctcgcattctgccaagtgcaggggggcccaacataccccaaatcgattccacccgaacccaacataaactccttcagcatattgccctcatttacttgaaaaggccgaccacccatcttctcctttgcttcgagaatgagattcaagtcccccatgagagcccaaggtagtggactaccttgcaccttagagagcattcgatcccagtaaggttgttttaagtcaccataaggtggaccatagatgcagaagagaacccaagatgcgcaacccggcatatctagcacattaactttgaaacccgaatctaaagtctccaaaacatttatttgaattcttctccaagcgatgcacattcctccagccaagcccacagcaggaatgcaacaaatattgagaaagccaagtctgttaattaaattagtcatagagtccgtgctgaccttagtttccgagaggaagatgaaatccgcatccatttctcggattagactcctaagagtcctttctgcagacggccgacggagccccctgcagttccaagataagcacctcattggggaggtgggggcatgctttcggccgcctcctcgccttgcccaaaattctgcacataagtgactggtatctcaacacagttttccagaatttctcccaaattcctttgattaatctcgtatatctccaaagccgccttcctcttgctgcgcgttttaactcccgagctctgttttttcctgctagcagagttatactttcgacgcaccttactcttcgaagactccccatgttcaaaacttcccatggagaaacttgcttcaatatccactggtaattgcttctcaatctcagtcggcggaggagtttcattctcgatcaggatttcactttcgccaatggaacagtgaggacgggacgggactgggatataccaagtttgagctttccttttgtgtgttcctagcaaatggtttattaattctgaaagatcaggggggttagcaataagagtctgttgggcttggaatttatttgttacctccctcccatataaagccaagaaggccttttgcatctctaggtcgttagtgggccacttaataggtacttcatcaggatagttatggggcctttgagaagcacaaacccaagaatggggtatctcaagagattgggctaaggtaggcccgatatcaggtatcttgccttctcctacatttgcaaagtccggattgggtaggtccaagtagttgggcccaataggaatagggtctctcacatagccaaagtttcccacattctgtcaaacaccaccttctgtgaaatcgtactactatcagaggcacgatctctgtccttctcagaggaggaggcctcaacacccttcgacattgcactgacagcttcagagtccttcttgcaggccagtgtactatcgtcctctccaaccgatttcctgctttgtcttctcctccaagtcccttttttttccgttttccggtcaatcagagcattctccgatggctctatcagagtacgtgtgaccccttttcccaccatagagaaacaggtgcttctgcccgattccgacttgacccacggcccatacatctgaaccgcttcgccattcttaggaaataccatcgccgtgggaacatggcaaaccctgtccaaatgcgctagtttaccacagttaaaacataaaaatggcaatttttcatatttgaactgtatccatgtctcctcctttccttcagctttgagaaagaatcccactacaaacggatgggcaatccaaacatcgagccagcatctcaggtagcctctacgaaccagttccactttggatttatca

SEQ ID NO: 56770 - DNA, 1903 bp, Cannabis sativa
ttaaactaagcgggctttacaccagcaccttgaaccagtctacagatcagcctattgtttccaatgtttctggtaatgatttttgtgttcctaaatctacttggataatagatacaggggccactcatcatgtatgttgtgatcctaccttgtttcacagcgtgcaaaataatatcaaaattagtaatgttggattgcccgatggtagaaatgttgttgtctcttttgttggaactatacatctatctaatcttgttcttaaaaattttcttcgtgtccccaagtttcattgcaatttgctttctgtcacttctctttccaacacatctaactattctttccttttccttccaaataaatgtgtgattcaggatatttccaagaatcaagtgattgggatgggtgagcgtgttggacaactctacctcctgagacacaatgattctcctactgcattgaccatttctcctaccattttgtccatttctaattcaaaaattagtagtgatactatatggcattatagacttggccatgcttcttgtgtaaagaatcattctttgaataaagaacggaattttcattactctggctgttctgattttcattgtgctatttgtcattttgctaagcaaaagaagttgcattttgtgtctaatcataatattgccaacaagtgttttgatttgattcatatagatatttgaggcccctatcatgtctctactattgaaggatttagatactttatcactatagtggatgattgctctaggtatacacatctcatcaaaaataaattggatgcccaacatgtcatacaagcttttatcaagcttgtcaacacccaatataatgccaaaattaaagggataaatctgataatgccaaggaacttcagttccctaaattgttcacctctcttggtcttattcatcaacattcttgtgtccaaacccctcaacaaaactcagttgttgagagaaaacatcaacacttgttgaatgttgctagggcactcctttttcaatctcccatccctttgccttgttggggagaatgtgtcaacacttccacctatataataaatagaacacccactcctaatcttaaacacaggtccccttttgaaattctaaattctaaagcccctaattataatcatcttagagcttttggttgcttagcctatgcctcaactttaggggctgctagaactaagtttgctcctcgagccattgcttgtgttttcataggctatcctataggaatgaaagcctacaagttattggatttaaacacaaatagaattttctgctctagagatgttattttccatgagcagatttctccatttgtgactgctggaaccatgtcccatgaatcaattgatttctttcccagttctacatctcataccaacaatcttgacctgtcacagcctgccataccacctaacattacaccaaacgaacttgatattacaccagatttccatgacagcagagaacacaaaaaaccagttgatgttactaccaacagacccattagaaactctaaaaggccatcatattttaatgattaccatgtttttttgtctactaacagtgtttcatatcagggcaattcttctatcactgaacatcctttatctaaggtgatcaactacagtaggctgtcccccagatttcgtgcaagcatacttgctatctccaacctatatgaacctgaattttatcaccaagctaaaggaattccagtttgggacaatgctatggcatctgaaatccttgctcttgagacaaatgggacttggattattgtcactttacctccccatcatcatgcaatcgggtgtaaatgggtgtacaaaataaaatataatgctgatggaagtgttgaa

SEQ ID NO: 56771 - DNA, 740 bp, Cannabis sativa
  modified_base (466)..(479): a, c, t, g, unknown or other
tggtacgtgatgtagagggtgttgtgtggatggcttggtcaattggttatgctggtgagttttaagtggtgatggcggagttgttggctcttcatataagtctcctatgggcttttaatttgggtttcaaaatggggaggatggagacggatgctttaactatttgtaattggattcataatcctgattctaatgttgagttcaaacttgttactgaggagattatttctcttttaaatgcagttggtggtggttcttgttgtgccatttcacgtgttgcgaatggtgtagcccacacactagctaaaatgttactagttcgttaggagttcatgtatagacttatacttgtcctagatttttaagtactcgtataacaattgattaggtttaatatattaccactgtgaaagctctgttttcacagagctgaacaatgaagaactcgagagagagagagagagannnnnnnnnnnnnngagagagagagagagatggaaagatttgctcaatctaactagattggccaaaagctttatttgtactgctcagatacaagaagagaaagataaagaattataacagaaagttgttacaaaaacagctgagctaaaacgaactaaagtaattgaattaactaactgtggtcttcttgtattccagcatcccccctcaagttgcacatgtcaagactgttggaagttatattttaccaggatcttagatctacttacaagtat

SEQ ID NO: 56772 - DNA, 851 bp, Cannabis sativa
ttctttcatagacgttatctttccaaatcattgttgttcggaatgccaggctcgggtgagaggataagcaaccgaaggattcgttatcgaatcttacggggaggagattaccgaatctggatggagagaaaagaaggaagaagcaacttctgattaaaggatttaccggaaatgttgttttgtttaaagatcgatccgacatggaaatgggatttttcagaaaccctccatccatcaaagcaacaaatccctgaacctccatcccattcctctatccaaaacctccacctgcctagttgttcttcgtcaccggattcccttctcttgttggattcgagaaaagagaaggacacatttgggatggttcaccgaaccgcgaaggaaaaaaaggtctctcgagcctcttctacctctgtgacagaaataaggagagacgacaaacaaaggaaggttcaaaccctttttttccatctcggatctactctcggttagtcgaggggcctaccagaggttgaatagcctacacctccctcttttaataaggtcttctccgggcccgacttcttttcgggctaaggaaagatctcttgagcctcgaggtgacgaacaactttgatgaagattatcccaaaccaacacctgcgatctcatttgaaaatctcctcttttccggtgggtggatggattcctttgatagggaaacaaactactttgagagagacagcctatttattctcaatcgatcgcaggtggatgcactaattcagtttctgaggccgctaaaggttctataaaatgcagagagttttcttcccacccccggtcaaagctggagggaggccctcgcctac

SEQ ID NO: 56773 - DNA, 2020 bp, Cannabis sativa
attgatacaaaagagaaaagggttttgtttgctgaagctggaaaggatttcactgattttctcttctctcttctgtctatgcctgttggtaccatcataaggctcttgtctactaagggcatggttggtaccttgggaaaactctatcaaagcttagagaacctaagtgagacttacatccaaactaatgtggataaggatatccttcttaagccaaagtcttctgccctaggacaatcttcaactcatctcttgttgactaatgaagataccacttctcatgtgaaagtgttttactcttgtggtaaaacttttggtagtaattattactcatctagtacatgtccttgtcataacaagtatgtatctgatgatccgacaaccatttgccctagttgtggaagtttggtcaataaggttctcacttttgtgccacccccaaaatatgccaaagtgggaggatcatcatcttctggggctgaggtggaaggtgggtttgtgaaaggagtggttacttatatgattatggacgatcttgaagtgaagccaatgtctactatctctagcattgctatgcttaacactttcaatgtgaaagaggttggtgctcttcaggagaagaccgtttctgttggcatcaatgaggtttgtgtgcctatatatgtttagaagtgttattatatttatatatatgtatattttggtggggtttgtttattattgttattgttcttgttttgattgaacagggtttgaagttgttgaaggcttctcttcagactaaaatggttcttactgatgtgttcttgaagaaatgatcatcaaatatttaatatgctcaactcttgaattaatgggaaacattatggatgatcatcttttgtgttttaggggtggggtttgttacataattagttttatatatggaatgttttggtgaaatgtttcacatgtacatattatatgttctcttatatgtattttgtatctctctcaagatattttgtataaggacttagggttcaaagtagtatactaaattatgatatatatatatataatgtcatttaatttcagaattaacattgcgcgcgctttctgttttcttaatattttttcaaatatccagttatctgcaattacaattatatgaaaatttgtacataggagtcacagataattggattttaaaaaggttacctttaacttagacattattcaatttcaatttttttttttttgaagggatgggtaacagtcaattgaacccaatcgagaacagttccaattaatttagtttaaatgtatcgtttatttattttcgtgatattttattttattatatctgtttctttggtatatataatataattaaccattaatacaagtgaaaattatttttaagaagcatataatcttacccggccccaaaattttctatcacacactagtagtacactaaatccaagaaaaatgaagtaaaactatgaaaataataataatttgcaaattacatgtgaaagaaaagttcttaattaattgaaaattccactttcaactctcaagtactaacatagtctcttaacaaaacacataccttaaccgataagaagaaccaaaaagagaagatgcagggaacaataataattataaataaaaattaaataatatctagaaacatgagcaagaagacttgatatgatcatctttttcttcttattcccaagaagacaaaaagatatcttttctccaacatgactttataacaagcgacgcaataggtaaaaaaaaagtactttcgtaattgatatggtatttttgaaccgatataataaattttttgtgacatagttttaaaatcccatgaaatatttagcgtcattttttaaccgacgcataaaataaaataaaaagtaagtatttagcgtcgttttgaaaatgacgctaataaaaaactatttgcgactacggtatatacgtcggttttatagaccgacgtaaattctttaagtgacactta

SEQ ID NO: 56774 - DNA, 1012 bp, Cannabis sativa
tgtacactaactcaaaaatatatgtacccataaaaatttaaacatatactaatttttatcttggttaaacaactaaataataacaaacaaaaaactgaataataacaatacaaaaataatattgatatatgtacctataaaaatagaatagtaacaacaaaaataatattaactgttaacaaatatttaacaacaacataaaaagatgaaaataactgtatttaaaatttaaagaatctataaattttaaccactaaagttcaaaatacaaataacatgaaaacaacgtgtttaaaaaagcaacgaaatcaaacaacgtgtttacaacttcaaaacaactctaaaacaacaaataatgtttctaaaaaatattaactttcaattgcatgtaaaatatgaaacttctgtcatacttgatttccaatagtgaagagaatgttttaactagatatatatagttgtatatgtgttgttgcatttttataagttgtatatatcgtttgaattatgtagttattgtattggtttactgctattttgcaaaaaaaaaaaaaaaacaaaatcaattaaatatgcaacaaaaatacaactacaaaacaacactagttaaatatgtaaatcaagtggacataaaaaatattgtcgacaacttttaaaaaacatacacaacacccaaacaactttaatacatgtttgaacaactatataacaacaaacaagtaactgtaaaactactctactttaatatgcaaattaaataataggcataaaaaaaacaagacatcaataatcttacaaaataaaagaaacttaaaatcaattataatacacttgctcactaaaaaattaaaaatacaagtttctcatctaaattaacaataatatatttattgataaaaaatacagtttagataaaaaaaaattaaataaaaaatatgaaaaattatttaattctaatttttttttaagaggaggcatgttttagaagtagattgtaaagaccgcttagttt

SEQ ID NO: 56775 - DNA, 1006 bp, Cannabis sativa
tgtcagtaataacatattccttataaatgtttttctttattttgatagatatttatagattaatatacagtcttaaagaggaaataaatagacttaattcaatattaaaagttcggattctttttttcacctaataaaaataggaaataataaatatcacattcttcttcctattcaaggaacatacaaatatcacgcttttgaatattaaattactgaaataaccctgacgaccacgacgggacttgttgatgttgaaaatagctgtgcatgggcttataattgaaagggttaaataggtaactagtggagaacactggaaatgatttttattatataaaataaagtgaattttcttaaaaagaaaaaagtcaaaaaggaatcgaaacctctccactttatccggatggatggaaacatgtcactaggaaatgacgaaaatacccttgtttattctcaagttgagactgggtttaggcaagtgaaagctgattatgaggtcatttgggtaaacacgctagtgatgcgaaccggtgggggagggctaatagtacggcacttttactacgaaagtggatttaatataacgttatgctaacagaaattcgattggaacggatcaaagttatgccacgtggatcaatattaaactgccaccaatatttttttctttttattttaattttatggaaagaacaagaaaaaatatttgaaagtgtaagaacttttctcttattgaaagaaccgttttatagttacaattcagaaatgagaaatgtaataataaaataatccttgttaataaagttgaagtgtgcacagctgttactgctctgtttgttcatcatttttttcccagttgagtaaatctttttgcttactttttatgttacactttctaattgcagcttttccatatgatatcaagtctttgtatctctctcattttaattatgcgtagtacttttaaatttttcttctcattcaactcaagttagctagttag

SEQ ID NO: 56776 - DNA, 1351 bp, Cannabis sativa
  modified_base (960)..(966): a, c, t, g, unknown or other
tagtttttcaaattttcctatttttttgagtgcattttatcttgtaaaaaaaataaatgatatgaatatatgaaattaatttttaattaaaataggaatgactaatattcaaacttctatggctggagaaccatacaccaaatggaaggaaagtgaagatgaacattttattatttttactaaaccagttaattatgaaagacacaacaagggggcttaaccactgagggatggcaagggtagaaaaagaaatgaatttattgtatagagataaattagataagactaaaataaaaaataggatgagaactttgaaaaaaaaaaaacttatgctaccatgaagagaatgctactaaatagtggctttgggtgggatgaagaaaatcgaaaagtcactattgaggatgacgtatgggtgcaatatcttatggtgattgtagaggccaaaattgggctcaggctcaatgtcacatgcgatgtttctaaagaatactcaaacaagattgggttggactatttgactagttatgacggtacaatcagcatactaagcccaacaagcccaaaatgatacagccaagtcaaacattaacattaaccatgacctaacattgagctcacgatgatctgacccgtatacgagattgagtcttatcactcatctaacgatctctaaagtgatcagtcaaactggccacgcaaataacgatctccctgatcaagtgggagcggagcgcttcacaagggggtgagcgatcatgagtaatgtctttctatggacgcctataagagccactctcagtcactgagagaggcacatgaatccgagtcatcccaattctcacttattgttcactctctaattctctctaaaactacaaacttattttcacagtcaagatatgtggtaacttagttcagtcatttattatcatcttttttattacattgttaacaatnnnnnnnacttgaccgtcggagtcccttcggtcggtaccatctcggtgtcaaggtttcccgttactctcttatttgttctacaagttgttggtgcccacgtacgatcatcttcgattaattgtggattttaacatctagagtaactatttttcttgtttaatgataaaggagaataggtacatgttcctaattattactattatttttgtgataggctcatccaaaagatgctcaatataggattaagggctagtctattcgtgcttacgtgtcatgctttttgtgcttctcgtggcatgttctgcttaaggatatacttttcgtgtcgtgtcgtgccaatttgtagtatcatgtcgtgtcgtgctcatggccgtctttttttatgtttagt

SEQ ID NO: 56777 - DNA, 1072 bp, Cannabis sativa
aaggatattgggcatacgatcgactaatgtcgtcaattgaaagacaagatagaaagtctcatcgctcgaggccattttaaacagtacgtgaaagggcaaggccatggatacaaccagcccagtctgcccaataacccaaacagtcaggggttacaacctctccctgttgaaggagaggacatcctagttatttcgggagggtcacatatcgcgagttaaagtaataacaccaagaaaagaatgtgaaagagataaagaacaagtagtcggcattcacccctgaacctttcaagaaggtgaaaaccgaagaacctcccatgatattcacaggggaagatgagaaaaacatgagatatcctcacttcgacccattggtaattaccattcaactcgccaataaagggtcaagagagtgttaatagacgatgggagctcggtaaatatcctttataaggaaacactaaggaagatggggctcgaggaagccaaattaaggccttgtatggtgcatcattgtggattcgccggagatagcattcccagtcttggcataatcgagcttgcattaacattgggcgaggcacccctatctacaactgctatgcaagatttcttggatgtcaacctgccatcggcttacaacatattgttgggtcgtcctacattgatcggactaggggcagtcaattcgatcaagaacctatccttgaaattccaaccaccagaaggagtggaggtggtgcggggtgaccagatgttggctcacgattgctctcacatagagctagagcataggaaagttggtcatcagttgatggcgatcttggtagaagaaaatgaaaagaaaaatgaagatctcgacccccgagttcaagatgagagaaagctattgaaaccaattgaggaatgggaagaggttattctcgacccaggaagtcgcacaaagtgtgcatacattgggaagaacctggatgagcatctcaaatagcaactaataagttttctgaacgcataccaagatcagttcgcctggagtcatggggatatgatagggatcgaccctaatattatc

SEQ ID NO: 56778 - DNA, 1408 bp, Cannabis sativa
ggatgtgtgagtgttatggaagatggaaggcataggtgcatgatgacacatatgatgaggtccggtccgggaaagctaattccttacctttttccatttggaatgattatcccataatttgtttcctttttgtttttcctatttataaaattccaactacatcatttaataatatatatgtatagacatttctcttcatcaagaaccccacccaacaaaatttttatgagagaaagcctagctagatatggctaggttatcctgtatgtttacatagataagttcaaaagcaatattagagtatagtagtagtggctatagacattgaactttcttgggtttcaccgtctgtttgtagcttccttggctgattttatatttaaaattaaaaaaaatatagaaatagaaatttacttcagagtaatatatatgatatttttggctttctattaataagattaattttgattttctctttctcaatatcaaaacatctatacttgtaaatatatggagtcaatgagacaaggttacaattttaagtttttttttttttcctttcttgaactttaagccattagttttctgagtgatcacatttagctactatttacttctgccacttttactgttgacctgtgtgacacatgaaaaggttacagtatctagtgcaatcaattatttgatcatcattataagtgtaaaagttatatttataaaccacttgctgttcttataattatatacatgtcttttaatttatatatgttgaaatgtcttagataatattttgtttctttattattaagtactagctagtatgcctatacatggctgcaaaaaaatatttttgtcataatttagtgttttagacatgaaaaggggaaaacaaaaaaaaaaaaaatcattataagttgttgaaataataaaccccctcattcctgtacactgtaaaaaccagattattataaaaagagttacaagacagtaaaaaattaattcctaggtggccttcttactctcatgtttctctgcattccactacaacagatataaaaagccaaataatctcaatcacagagcagaacagaaaaaatcatcaatagaccagaaatcacacagattcagatcgagaaacttaccctagggttagggttcggatgttcaacaccaaaccagggggatcgattcatgcaaaacaaggagaagaagatgattagagattaaactcaaagggaaaaatagagagtttgttttgcagatatttaatgtccaagctgctatctagccctagggctttttctttccaattataaagaaacaaaaggttaaatatatactaaaagagatcaggggtttctcaatggatatgcatataagagtggtctttttcaaaagatagctggta

SEQ ID NO: 56779 - DNA, 980 bp, Cannabis sativa
  modified_base (285)..(290): a, c, t, g, unknown or other
ttttgaaattcgaattaaagtaaaaatgtttattgattcgagtttagagctacaaatctggaaaatgtacaattatttacatgtttaatgagcatctcagatcatagtattctctctttaattgcaaaatatattttaggaatgatcaaaaataaatatgataatattccattattaccttaagctataataaaacaaaattatagtatgttttattcctttatcttattatatatatagctctatcaagtattgaatatgaatccattattattattattattnnnnnnattattattattatttatttgtttctataaacgaccataccttattctaattactctcataaatttattgtcttatccttgagataagatactgacatctgagtcatctatattattattgtgtatgttgttggtgagtaaatgggttaacttgggtgtgttcaatgaaaattattagtctagtgatttcatatatataacatatattagtaattgtttgtatatacattaaaatgacagtactattttttttttgtttgattgttataattttgtttttcttactgtgttaatattaagttcttttaccttgtcttgttgttttattctgttttgttttggtttaatttgtaataatgatgttgaccactctattatttcttaggactttagtttatgcttgtttatctaatttttatatataatttgattaatattaatttgtttatttatttaatttattaatcttaataaatatataaatttgaattttaaattacattatttattggtgttaatgtaataatgatcagcggcggattcaggatttaagttgaggaaagatgacatttttttcgtaagaccatttttaatgggagatgtaaaaattgtgttatatttagcacaaaaagtaattttgtagtaaatttacaccaaattttagttttgtgctctaatgtacaattgtaa

SEQ ID NO: 56780 - DNA, 920 bp, Cannabis sativa
  modified_base (151)..(152): a, c, t, g, unknown or other
  modified_base (178)..(179): a, c, t, g, unknown or other
aataatattcaaacaatataaaaaaagtcacaaataacaaaattaacaaacaattaacaagagtacaacataaaaatacatcaaaagaccgcttaaaaaaaatttaaaatagtacaaatatttaaaatttcatacaactgtatttttgtanntgtaatttttttttgttatttttgtnnatttgtgaaataattcctaaaaaaccgttaaatttgtgattttctcattttattaagttatgaacaaaatttgtgggccggacataattgccatccatcgttgtaactgtttgggccttttgcatgtaactggttgttaagtccataattctttccttttttttttcttttgaataaaaagtctatatataaattaattgtaatgattttgggcaaatgcaaatgctattgcctggccactaccgttaaagagccaaatcttgtaagaagaaaataataagaaaagaaaaacgcccacattgtttggtaatggattttactcgatcaaagacatgcatttttgttccacattgttctttttttaagcagtgtaacactaatgtggtgttaatataacactgatttgagagttccacataaatacctaaaagtcacaattctacggatctatagttttttctattttttttttttccattttatgggttttaacatttttttatattaaaatacggatttttttttttttttttttttcatgttgctataaaagaaaaatgaggaaaaacctgtaaaaaaaatcttcagtaagaaaaatccgattaaaatatgtatttatagttttagacttaagtttagcaccaatataaatttaattttcacacttaagtttagctccaatacaaatttaagtttagcttcaatatgtaaaagaaaaaaaaaaagctagttttaattagt

SEQ ID NO: 56781 - DNA, 5355 bp, Cannabis sativa
  modified_base (5291)..(5297): a, c, t, g, unknown or other
taggctgaattgatataaaaaaaggaaaaataaaattcatagggcgggagttcttggctctttgtacgggtcaaatgtgtcatcagcggctggggcgtcactttcttggttgatcggaggattggtgttggctgcctcagcctcttccttggctttttaggcttcacagaaactaatatattcctctttattttcattgaggtaatcaaagtttacctctgggttagccttccaaaattcatagaagatttccaaggaagttgtctccacgttttccacctccttttgaagcacctcccgctcggcaccaaaatctgtccgcttagagtcaagagtctcttgcagaacctttttctcctcggtcagacaggatagcaggatgcaaaggttttccctctcgtccttaagagagttgacatccttactcaatgtctcattatcctcctcaagctgaccagtcgacgacatatcattcatctcttttctcaagtcttcaacgagcttgttggcatccaaaagctattttttaacctcacccagtggaatgcttttctgctcagcctacttcttagcttcctccacctcctttttcaggttgttagtggtggttgtagttttaaaggtcgcagacttaactcgggagtatgtgtcttccatcttcagattgagctacacaataaattaaaattaaagcatgcacagttaaaagcatgtgaaagaaaaccaaaggaaaattacttactcgggtggattccttcaacaagctgcctatgaggagctctactgacatgtcctcccctctggccaactgatcgttcactttgggaagcactcgatcttagtagaactgaagcatctccctaccgttctttgttttcggattaagcacgagaggagttgctagaggcttgggaagtccgtgtccgtcagtgtttccccccttagaacccttggacgaggaaaccatggaatgagatttagagttcttcttggtcggtaggattatgtctgatactgccttaaaaacctcggaggcagggatagccaagctcttctctacagttagctgagggtttggtgcttggagcaatgattttaggtggcatatcgtccaccttggagcacttcgtatgggatttcttattggaggcatcacccgactttttcttcagtgcacgtagcattgtttgagacataactagacctgaataaaatagagatgttagaacaagcataaatcaaacaagtgcagataaagttaagaataaaataaagtagcatgcacgtggacaggggaaacctcctgaataagcgaggaaggagcatcctcatcagaagagtcttcttcttgcttgaccataatggattttccctttccttccacctagagggaaggacgagcaacttcctcgagaccatctctaatcctgataggctactcgacgggtgctggcttgccttggtgagcctttttttattcttcttctttggagccttttgttcaggcaccacttctcgtcttggccagacgcaacctctctagccacctactcgaccccttgattaccatcgaatggatagatttaatacttaccaaaattgacctcagtagccaagagagaaatattctgagcatccaagggaagtttaagtatttcttgagccctcttggtttaaggtgaagggaggctggcagtatgaaggaatgtgttggaaactcgtgtgattggtgtgcatgcacttgacaacgtagtagtcctctacataactgccaatttttgacacctcgggatccatagtgctgctcaaccacatctctttgatctgggagaagtagaagtacccagagctattttacttggggctggacttcaagtcaaacaaccaattagtgtcgtgggcagacggctgaccccattcttgggaagcatacaacacaaatagggaagataagtacttaatgcccttaggagtgagttgggtcgacctaatatggtagtaactggcgatctccttgaagtacagatgtaataacatcgtaccttgcttggtgtgaggacccaaccacgcagagtaaccctttccagggtctattgcaagctgccagggggcgggaaggaaacatttaacttgcccaaggaggccttcatcgaagagattggtcaaccttttaaaagttaggacagatggtggagaaacccatcgagctcccctcgagccacttttgtttatgggggaagcctccgtgtacacctcctctacgtagtcctgaccagcttccaagacttctcctatctcagagacaggttctcccttctcattgaagactctaaaggcagcccccgtacaactttctctccctcctttccttcttctcccttggctacggaggagtagcaggttggacctcaccctggtcctcaacttcccagatttcgacgtccctatcaacaatatcttcttcttagacttctggttgggcctattcccctctagctgcaacagccaaccgagcaatatggggatcaaaggatgaatgctttctagtagtctcctcagtttgcgccatcattttacgtctagatggaactcttttagaagtgtgcctcacaacggtcacaacaaacttgataacagagtatcccttagtagtgggagttggataaccttcgggtaaggtatcgactataccagatcagaccctgtacgtccagttagtaggaagataatgcctccaacctttcttcagttcccagattaaatgcccatatccctcaccacatatttggtcgggataccagtgatgttgcacctcgggctttgaggaaggtgtgtgctcacagctcacttcccagttttcaaagttagagtttgaaagatttatcactagatgaagataagttggcacagagacgggagtgatctttgtataaaatttgaagctagtcctggtcaatatgatgcttgcctccctagaaatcacatgggttcatccacaaaaggtgagagacaagagaataatagttggtcggggtaacgagtgaaaaaaggattttatatgctagccacaccagattaagaatgaaaggataaggttcatttggagtgggaatttcaaatctttgaagttcaaaacttcgattggtacctggtatttttcaaaaatctcatgaacgagtggaaatgaataattttaagccagaactaatatgtagtcaaagaattagacgtcacagttaaacgttgggtaaagttccaaatctaagagttatctattcaataattagctaagaacaggcagggtttatggtaaaaaaattctagaaataatgcatatatttattttcaatcatttaaaagaaagggataaatgacttattgattcgaaaatttcttgatctacttgaatggtatcgtcagagattttctagcaagttcttcgaagaatcagagggaaaacttagatagaaatttttgctctagttctttgaggatgaaaatggctaaaaggattaccaaaaggtttaatatccttttataggcaaccaaaaaagaaaaataaatcacttttaaattgaaataattgggtttctccccaaaagtgaatgttagtattcattacaaggagtacaaccatcacacatgcattgtcactcagctgtcaatgtgtaatttgaggtatatcttttaagaggtatttaatgctcagagacaaaagagatccctagtcaaagtcatgtcggatcaacctcagccatcaaagacatgccacccatccggacaagaatcctgatcgagtgaagtccacgtgcgaccaagaaggtcccacacaaacttagggggtaaatgctatcctattttttacacaatgatgtgacattgagctagatgacacgtgtcttatattttcctacatgggcggaaggaagtactcctagcagctcccgaaggttgatataaagatttgtgtcgtcaacatgtagtaggattttcgagcaaactaatcaagggacatctgaccaaagtacgattgcgtgatcaactcgcatgcaccgagcaggatatgtgagttagtgaatttagaggcaagcattgttgcttccaagacatgaagataatccttatattcatgggattaggtcagagaataaaggcaatacatcttggtttcctattctttacattgtaattatgaaattaatgtagtttcctattttatttattatagattaaggaaacccattcttcatgtaataagctcctataaatagtggtataaattcactattaagggagacaaaatttagttcagaagaacactcaagagtgaaaaagagcaatctaagatagaactactcagagatcaattgtaagagctttagagagaaaaaatacttcattcatgttctcaagtcaatacaacaaaaagggcagtaatttgttaccattctcacgggatcgaacctctaaaaattctggtgttctttttacttattgtttttgctttctattatttattttttctaatcgttttatcttgactcattgtcgttggctagaagtgaggtcaacacatatctaaaaaaataactttctattattaattttttacacctaatccataaatctaaaaaaatatatatttttctattatttttttcttttcaaacaataaaataaaaaaaaaaagtttttatgtcttatataaagaatcattattttgatgtcattacctattccagttatctatttatataaaatgtggctatataaccgaaagtgttgtttttattttttaaaacattataatttaaatttaaactcaccacacatttatcttttacgttttatcttatattaaatgtgactatacaaaatatctttatattattataaaatatcgttacctattgcagttaccaaaaaaatctttatattattattttaaaaaaataaaaaaaaaattggtagaatgactattctattttgaaatgagaagaatgactattctaatgtaacatgagaaaattttaaaacttttgctatatatattttatgtgattccattccatttttattcatattctcattctcattcctatttatattttaatgttttcatttctcccaaccaaacgctacattggtgaccatgggcagtgctacccaattttcttaggaggcaagtcaaatattataaaaaataataaataacagcataaagtatagattcaatagttttgagataacaggtgaaatacaatactgactgtaaagtccttttttggcannnnnnntgacaaaataatttttccatttatggtaagattgttatgcattcatattcgatttctt

SEQ ID NO: 56782 - DNA, 1005 bp, Cannabis sativa
tcaaagcaccttgtttctagcatgtcaaatgaataaattgtggttgtaatgacactcaaaagaaccttttcttttacctctagaaattaacttttgcctttcgaatcactttaggacatcatggggctctttttaccaactagaaataccaatccaaagccaaacttgatgaaccactaaactgttgtaaatacaatcaaaaaagaggtgagaatggctctccactccacttccacacaacaaacacaaggaaaagttgatatgattaaatcgacaaagtttgtccgagatagacaaatagctcttcaaggctagccaacgaacctgtgtttaggagtgaaaaatctatcccaaatgccatcataacgccatctaagagcacttccatgaggcatcttggcgtacatattagctatggaaaactaataattgctaaagactttttgggaaaagacttgttttatccttttcttggtttgaactattcttttccaataccaactagcctccaaagggacttggtagcctccattgaatcaatttcctaaaacctaaacctccctcattcttgggtttacaaaaattagcccaagacacatagcccaaccctccatatttagacacataaaaatatattttaattaattttattttaaaacaataattatacttatagaaaattataacatgttcaacatataataattaatataagcattttttaaaacaatcaaaacgtcatgagttcaatcctttagaagtaatatttttttttctttttctttatttatatttaatttaagatttcaattaatttaataatttcaaaattttatcatattttattaattaatttactttttaaaattataaagttcaatgtatttaaaaaatttagatataaaattaattatttactttaattacattatttatataatcatgcatgaaatagtaaataatttatattcataataaaattattcttcaacttagttcaatgta

SEQ ID NO: 56783 - DNA, 1460 bp, Cannabis sativa
  modified_base (345)..(356): a, c, t, g, unknown or other
tatatatatatatatatttgtatgggcttttttatataatatttttgtaaaaaaagtcgaaatttcatatttgtaaaataataataaatttagcctaaaagttatgaatgccgaaaaagtcactgaaaaagttagttaccggaaaagtcaccagaaaattcatcttcgtcagaaatgtcattggaaaaatcactagaaaagttactggaaaagtcattacttactagaagtagatgtctcagatataactaaaaatagaagcggatctataacatgatgaataaaaataaataactcaaaccatttataattaaaatataactggttttgtaacataatgaatannnnnnnnnnnnacaaaataactcaaactagttataaataaaatagaaccggttctataacagtgttatagtggataaaaacaaataacacaaaataactcaaaccagttataactaaaatacaaccagttatataacataataaatacaaacaagaaatacgcaataactcaaaccgattacagttaaaaaaaaaaacagaggaaatcaattcctaaaacactgaaacataaattaaaaacaaaactagttccacaacaaaatacatcataacacataatactcattaattatgttatataatcgattctattttaattaaaccagtttgagttatttcgtattttttatttttattcattataatattgttatagaaccagttctattttaattataaatggtctgagttattttgtgttatttttttttatttattatgttatagatacggttatatttcaattataactggtttaggttattttgtattatttgtttttattaattatattataaaaccagttctatttttgtttatatctgagacatctacttctggtgactttttcagtgacttttttcggtgatggtgacttttctggtgacgataacttttctagcgacttttccggtgacttttctagtgacagttatttttccggtgacttttctagcgacactaacttttctggtaactttttcggcactagcgacttttctggcgaaacttatttttattttacaaatatgaaattttcatattttttttttacaaaaatataacataaaaacacgtataaatataaaaaaataaaaaaaatccaaaacccactaatattatttatttataccatagaaaaggtaaactcttagggggcgtttggtatgaggtgtttaaaatagtttgattatagggaatattatgaaggagaatatgattatagagaaatgtgtaaactgcttttggttgtgtagggtaatatgtaatcatattcccgttaattgaattttactgtttggttgagtacaagaatcttatatattattttaaaaaattaaaattaaaatatttttttattgtatttatagaatgttagttatacataaaaataa

SEQ ID NO: 56784 - DNA, 1020 bp, Cannabis sativa
caattattctaagataacataagtgatcttgtttttgtctataactctatatacacatgtattcacacatgcaaagacaaatttatccttttgtttctgtccagtattggttaggccagagcgtatcaagtagtttcaacattatgtggccagtcatagatataagagaaggctgtcaatatagttggaaggaagtcaatcatagacatatgaccttagtctcttgaagaaaaaaaaaagatattagagatattatcagttaagttagtcaacattgtcagcccaacaaagttggtagttttatcatgattctcacttcttatattcatgtgccgtcttgatctgcaagagtaaatttaatttcaatttttacaatgatcacacataagtgaaggcactttaagtgttgcatctataactgttaagacttttttttttaatcaaagtactatacgtaataagaactttcaaactcaaggcacttgcacgtactccattcgtggacagaggattaacatggtttactgtcaaatttaaatttgagtctcaaggcaaggtaacaagataaattttatcatgctctctttaagttgatacaaatgattatttttcacttctcatttttctttaaacatttttccaggcttccatggtgattatttcattttgtttaggacttgaactcttattatttttctctgtcacattagtttgggcttgaagctgtatgcatttttttttctttggggtctaagcaaaggggagataacaataaaggaattcatatgtaacgttggcatcattggatttatttcagatgctgtcattgtctaactcattggtgcttactacaggtcctgtagataaaattgtagacaaaaattggtgtctacttggttacttggttacctctatatgttaattatttcatgtattcctcatgtttcaaggaaaaaaacttcaaatttacacataatgatatcatttcatccacaattgaaatactgttgtcactttgac

SEQ ID NO: 56785 - DNA, 849 bp, Cannabis sativa
tgtcctcacaggagaagaagacggtggacaacaccctgtatactatattagtaaaaggctaatcaacgctaaaagttggtacccagtcatagagaagctggcgtacagtctggtcttagcttctagaaagctaaggccctacttcaaggcataccttataaaggtgtacagcgaccaaccattgcaacaggttttgtaaaaacctgaagcatcatagctattactctaatgggccattgaacttggcaagttagagatcacataccaaccatgaacagccataaaggctcaagcccttgcatactttgtggctgagtgtacaagcttctctcttgaaatatctcaagaatcaggagaaaacaaacagccaaagaagaagcgagagcaaccatagcagtaaaatcctgaagaactaccatggaaactccatgttaacggaagcagcactgaccaattgtttggtgcaggcgtttccctcataacacctgggggaaacaactgcacggatcaatgaaatttggattcaaaggcttgaacaatgaggctgaatatgaaaccttaaaagtcaacctcaaactggcgcatgaagtacgggttgaccacctagatatattcagcgattctcaactagttgtgaatgaagtcctaggtgaatacactgctcgaggtgaaaaaatggtggcctacttgagcaaaaacaaagacatgctaagtcaggtcaaaggctacaacaaatgcacttacccatctggcgagtagcaccattgccaacaacgcaaatttggtgcccataaagttcttagaggaacccaacattaccatcccataagaagtcaacatgttggatga

SEQ ID NO: 56786 - DNA, 1578 bp, Cannabis sativa
aattttgtttctttgccttctgcagggctcaagtcctgcaacatttccacacaattctagatttccatcataaaaacattttgaagcattttggaaaatggctccagttgggatcgaacccgtcaagttgttgaaagaaaaatccatgtaacgtacgcttattaggttggaaaatgattgtggaatactacctgagaggtggttatgagagatgtttagaatttccagcattgtaagcttggacaagcttgagggtatctctccatcaagtaaattgctactaagatccaatacataacgtatagaaaccaaatttccaagctctggtggtattttactagatagcatattgtgactaaggtttaagctcaacaatccttcataattacctaaccaatttggtatatcaccaactaaattgtttgtcgaaaaatcaagatctactagcctactcaagtctgatagactcggagggattatcccagtcaaatgattattgcttagattgagttggtacagaagggtgagatttcctaattgagttggaattggcccaatcaatttgttagattcgaggctcaaaactttcaactttgtcaaactccctagttcttgagggatcttaccagagattttattttgacccaactgtaatctggtgagattctgacattgtccccacgtacttgatacatggccaaaattgttgttgtttaagaaaatggaatcgagatgtgggtgaacaccaaaaacattggtaatgttgcctgtaaatttgttctcatcaagcctcactctttctaatttggtgcaatttctcatacactcaggcaatgtccctgtaaagctattgttgcttacactcaaatattctagattgaacccactacacaaaccttgtggaatctttccaaagaatttgttgtttccaaatgaaacgaaggtcaaattaggattgtttttcccaaagtctctagggattgtgccagtgaaattattgccaaaaacatcgaacacctccaagttactaagcctggaaatattaactggcaactctcctgatagttgatttgcgccaacaacaaaatttgtgaggaattctagatttccaatctcagttgggatagttccaatcagattgtttctagaaaggaccacaaagatgatgtttttaaggttccacagagaagttggaatcgaaccagtgagatagttcaaagaaagatacaattttttaagtttctttaagtttccaatgtttaaaggaatcgaaccaatgaaactattgttgaaaatagagaaggcctccaagttactaagattagtaatattaacaggtaactctcctgataattggttggtgcctacacgaaattttgacaggagttttaggtttccaatctgtggtgggatggttccaatcagattgtttctgaaaagttgtagaatggtgagattttttaggctccataaagaagttggaatgggacctgtgagatggttattagaaagatccaataatgtaagttttttcaagcttccaatctctgaaggaattgaaccagtgaaattattggt

SEQ ID NO: 56787 - DNA, 662 bp, Cannabis sativa
tgctaattcattctactaaacccatgatattacaattatccctcccttatagaaatttcgtcctaaaatttacatgaacaactcaggatatctttgtctcatgtcagactctaattcccaaatcgcctcttcgaccttgctattcctccataacacttttactaacacctatgttttgctccttagaactttctcttttctatcgagtatctgcactagttgttcttcatatgatagattgggctgaagttctaaagtttcgtaactcaaaatatgagatgagtctaacacatattccgaagcattgaaatgtagaatacattgtgtacagctgctagcgctaggggcatagccaacctgtacgctacttgtcctatcctctctaagatttcaaaaggtccaataaatctcgggctaagttttcctatcttgccaaagcgttttactcctttcatgggtaaaatatggagaaataccatatgtccaacctgaaagtcaatatcacgtcgctttggatcagcataagtcttttgcctactctgagcagtgagcattcgagccctaatcttgtaaattacctcacttgttttctaaatagctttgggacctagaagctttgtctcacctaattcattccaatgaataggtgatctacactttct

SEQ ID NO: 56788 - DNA, 1052 bp, Cannabis sativa
tttacccagggctttccagatgaaatggttacttatttctccaaaaacggtaaatcatttcgctacagttctaaaactcgaacttttctttctcaattctaacctaaacttgctcaaactttctaaaacatctcaaaaacatgttttaaatataattcaacaaataaaagcaccaaaaaatctctgtagcaaaaatcaccattgttgagcaagctttgagttctaaaactcaagctcactcaactcaaccacataatcataattcaatccccaaaatcaattataacatccccaaactcgaacaaagccaaactcataaaaccatgcatcaaaaccaactcttttcttaaaaattcaaagagaagagatgagcatagggttactttactcttcctttcaaaaccttgtaaagttcttgctgaaatccttgaaaaagtggtgaataatctctgaaattggtttggtttttcttagaactgagagagaaagagagggagtgtgtgttgatttatttaagtgatgcttatctttgtttctcttgactattctaattaaaaatcagtatataccttataacttactaaaaattccactaagaattacttgaataaacttaggtggtaacaatactacccttgcttgattattaactttcataattaagggtaagatggtcataatcaaataccatgtataaccctgatattttaattgttcatatatcttgctctattaaatttaagatactaaaccgcatcaaagtgatactattggccaaccgtcgaactcctactgttaccgagcataaaatataaaaatgccaaatttcataaataacatacataacacatttagaattcaataaattttttataattgagaaattatatcactaatacctatttctgacaacagagcttattttatactaataaacataaaatcataaataataattacattattaataatctgttaatttttatgtctaactatccagtcattgtagtctgtgttgtgatcagattatttgatattttacacaagtgtct

SEQ ID NO: 56789 - DNA, 745 bp, Cannabis sativa
ccatggtgtggaggttcttgataagtttcttgggaaggcggaagcagctcatagcataacttggaattgcttggaccacgactttgattagaatttcctgacccgcttgggagaacattgaggccttccacccctttagtttattccacactttatctttaataatctcaaatacctcttttttccttcttcccacgaaactaggcagccccagatatttagcatgatgagaaacaaggcgcaccccaagtctagcagcaagagcatggccctgagtaatgggaactctctttcccatacacacctctgatttgtcaaggttaatttgttgccctgacagcctggcataccgttgcaatattaatttcatattgtcacattcattctcccttgcttctaggaatataaagctatcatcgactaaaaataagtgtgagaccttgactctattactcccaaattgaactccattgatcgttccagccctctcggcttcatgtatgaggcaggaaagaccctctaaacaaatcaaaaaaagatatggggatagtgagtcaccttgtctaagacctcgggtaggttggaatcttccaattttctctccattaattagaactgaaaaggatacacttgtcacacatttcattatcttctcaacccatttttcctcataacccaggcctctcatcattgtaatcaagaaactctactccactctatcgtaggcctttgacatatcaagctt

SEQ ID NO: 56790 - DNA, 757 bp, Cannabis sativa
acgaattagaagcgagaagcggggctctctaaagactttcaacatttatttttcgaagagttctttttttttttgactatttttttttatattcttatttagttgttatcggatgtttacaatgattatgggtagctagacttttattagtgtgttaatagtgtcaccattatttgtaagtaattttgcttacattataatttcaatagtttataggcaaggacgaacccaccagtaattgggggcatagctagctctcactaatgtaattttttaatttaataattatagaacaaaatagtaaaagctcacacaaaattaaataaatttaaataaatttattagaatgattataatatatgtataaatctttttttaataataataagcctccacaaaaattctgagttcgttattgtttatcaatcagctgttcatcgattcatggttttgtgttctaagttcatcgattggggtatcattcatatctcaaggaaatgcaatttcatggcgcacaacgttgctagatgggcggctagacttcagatgtttggaaacatttgcactgatatgctaccttcggctgtgcttgatgattttgtggaatgggatcctggctctgcttctccttagttttttattgtctgtttgagtattgactctttcttttttagttttctgttggtgttgtttcgttgtttctgtttgtttgtttgggtgctgtttgcaccccccccttatcaaaaaaaaaaaaaaa

SEQ ID NO: 56791 - DNA, 728 bp, Cannabis sativa
ttggagtttttgggttttcaacctagatgccacgtcatgacttgtgagtttcgcggcccgcctaggattttctgggcaaattgggtgtaaaacttactttatgtataactcttgaatccaaactccgtttgggatgttttgtatattgtgggaaagcttgttccgagctctatatgtttatgtgtaattgaaaagccaagtatatgataatgtgaaggttaatttggggatgaatcttatttgtgaaatcttaagaattgtgactaagattatcgacacttgttcaggagcacccggggatttggaatctccacatacttaggacaccaagtaagaaaatagttagcatgcagagttaagtgctgtagcactcatatatgatattatgcttatgattaaatgaggaatcaggattaggattattaccctaaagtgagcggttatatagttgagggttattaccgtaataatctaatagtctttaatataatgccatgctttatatgttgaaataaagaattatgcattcaaggcataattaggttagactcgttaatcagaactgagaaaaaccattctagggacttattataaatagacgtgtgagcgcaacacgtttatgctacatagacatatataaataggtgtatgagcgtaagacgcaggtctatgtcaaataaaaaataagtgcagtggcatcaataattatgtgagttattgtgtatatt

SEQ ID NO: 56792 - DNA, 1247 bp, Cannabis sativa
agtcaatcttattcagatttttaattgtttttcagggcctcctttgtatgagtttttttgtgtcctttttcatcttgcttgccactattgataataatatagtgagcagttaattacaaagttgaatgtaatctttaaagcaattattccctcaaatcatgggatttaattacatatcgcgtagtgtaaatgcagttacaaattgaaaattatatagccgtgattttcccgcttttactgggtaaaaaatgatcgtgttttaaacacctctttaattaatgtttacggagatgtcttgacagaagcttgattctagtgatctcgatagcggctggggcaatttttccttcagtggtcgacaatgcatgtctcgtgatgatcgtaattcttattttcaaagagtttttcgaagctcatttgaattttagcttttgactcacattttagtgctttcattgagagcaacaatatcaacttgctctttacttaaaatttgatcataaacacgatggtggtacaaactcgaagagacgtggtcgatcaggtggacccactggcagtagatcccgcaatgcagactccagggaatgtaaagatcccaccagccactaatcctaaacacccaatcacgcaaccacctaccgcgggtcaaggtgtgacatctcctttggctggaatcacacccaatgtacaagagactggaaacaccagatcaacagctgatctgagtactcccatcactgggattccttcaccaacaaatgtccagacaaccattggagatgatacagagatctagaacctccgtaatgctcttgggctcaagaaaggtcatactaatactttacatcacgatcaagaagagcttcgtgttgcagtgaaccttgcgttcgaagagcaaaggcgtcagttcgctgaatggagggatagcgagatcgaaatgttgaaggctcagcaagcagccatcaatgaccgaacaagataggctacgatactcatatgaagagcctaccaagttgttaatcagtaacctgcgtctagtatctcgctgggcagcttggaaaaaaatcaagctaggaatactagacaaactcggaacggtcagtcgtccaatccccggtcacaggttcaacctgtgggccaagtggtaggcggtcagaccttagttggtaattcgtcaggtggggttatacccaataactccacctggactaacggttctggccaagtgctcggccaaaccaacc

SEQ ID NO: 56793 - DNA, 1102 bp, Cannabis sativa
ttcatttattctgttacatttcttcattaatttatttcgattctgaatactggatagtaaatgtgtcataatttccattgcttattagtaaacatgtcattagtataattaaatcttatcaagttcagtctaatataactcaatctttttcagtccaatcctgagttccaaaccaacctttagagtattaatttttcttaaatgtgttaaaatataatacaccacatttttagcactaaaaagaaaacctaatagacaactataaatgtggtgcattgctattttttaaaatattttgctaaagcttaactccaatagtgatataaaatgtgtgccaaatttagcccaagctaaaaattgtgttaaatttagcacaaaaaatagtataagataaattttagcccacaataaatactacattttttaattatttttttatcactcattaatattattcattaatgaatataatttttatatttacaagatattccaataatataaatgaaactaattatcttttatattttcaatagtagtattgagtttatgattaatttgcacattgcttattagagtacaaatacaaaatttagatgaaatataattttatggtatattttaaggtaattttaacttaaagtatacatcatccattggagatgttactataattaattttttaaacatatgacatagtgcaaacaaatttagattgaggcaccactactatttcatttttatttttaccactattaattttttttattgagtattgatattagacacttgatactatgatgtaacatgttgtgttgtgagtgattagatatttcttatattatttattaaataagcaagtgtaggtagaacatggtattaaattgcacaaataacaatttgtcatttttgtagtatttagggcttctccaaaaaagtggcatccctttatgggggctattatagtagggattgagtattttttccatcaatagagatagtaatttacagcccttgagttaatccaatggctcaaattaattcttgaaaactacaccataattaatatatttttttatttatatttaatcttgaatattat

SEQ ID NO: 56794 - DNA, 951 bp, Cannabis sativa
  modified_base (909)..(925): a, c, t, g, unknown or other
tcttgtccagtccagtccaatccttttcagtccaatccagtccaatcctgcgtaccaaacgggccctaagtggataaataagcgtaatttatttattaattacggataattatatagcatgtgtgaatgtaatatgagttatctgtggaataaaaatattttcaggtttggcaaccttggagactcgatcaagggctaaaaatgtcataacatgtttaattatagatttgaggagaatattatgataagttgatagtgtaagtattgggataattaagagtatgcggaatttgacctggtgtcctagaaatagagatttcgcggttaagaaatgataagataactattaataataaagtttttattattattattattgttaatattattattattattattataatattatcaatattaatttttttaaaattgataagttaatatatattaagtttataacagtacgaataaagaacgaaaatgaaactcttctctgttctccgtgcgatgaaactctccttcccttcattttctttgattttcaatctaaaatctactaattcaagctctaatagtagcgggacaataaatcattgaagagaaaaaacttgaggtaaggattaatttcgttttaaattaaaattgattggttttatatagtgactttgtgatttagaatagttatagagattctgacctcataatattattcttgggtagctatgggactagttttgatagttacttgttaaaattgaggtgattttgcgttaaaaattgagtttgaaacctttacaacttatgtctgaacattagtggcgttttccatttaaggacttgatttttaattttattacgttaggatggtggtatttatggtatatgtgttgttggaaattattttannnnnnnnnnnnnnnnntaacaagtatgtttgattaacaacct

SEQ ID NO: 56795 - DNA, 789 bp, Cannabis sativa
gtcttgtgcaatagcccaagttgctcaatggttgggctatagccctgccatcaacacgagatgtctttcgaatgattagcaatatttcataaaagttattatattaaaaatcatataggattcgatacttaaatgtagaattttagcattttaaaaagagaaatactaaaatgcactattggtgccttacaacctttcttaggtgtcatatcgctaagtattaggtccatataaattaatgtaataatttttaaaaaatattactaactaattgtatgacgtcactctaaaagatgctcgacactattgatgtactcttttaaaatgtatcaatggtgctttaacacccttcaaaatatcatattgatcactattggtacagttaattaaatatcaagatgtatataatttaatttaatgactattataaaatatcactaactaagcactggccataactaataagagtactcttttgtttaatatatttgatatagttgactttggggaatagtagtagggaatgtatgttgaaaaatcatcccacacaaaagcacttttcacttataataattgaatttttttttttatttttatgtgggggatagctagctaggtagctatagagagagtgatgatgatgatgataagttgttttggctctattctcttaccactcacaataaaaggagacctaactcacatcactccaatatctacatatctactatacattcaatctcaatattcttcatcaccaaaaaaaaaaaaaaaaaagcagagtacaga

SEQ ID NO: 56796 - DNA, 1053 bp, Cannabis sativa
ttgggtctgggttcaaggtcaaggtctgggtcttgggtctgggtccggagctggggtcggggttgatttcaaactttgtaaatattataatacaagctaatacgagtcatttattatgtataatataatacgactcacattatattaaaaattatggtcataataattaaaacaatataatgttttattcaaatatagtattatttattatttaatacaatccgacttttatacggcctaccaaacaagcccttaaacttcactttcatttttcacaaaattaattttttagcaatggttatataatttctttttattattcaatctaatcttgtttaatataattttttatttattgttttatcaaaatttaagtattaacaaatatatattataaaataataattgtaaaaaaaaaaaaaaaaaaaaactattattcataacatggttatttgacaccttaataaaacaaaatctgacatgtatatactagaggtgggtatcttaaatattatttctattcaatttatatgtgatttctaaggatttgttttaccaatttctaataattaagtgtaatagtgtttatcaaaaattaataaacaacaaataaaaataaaatttaaatattttttttattatatatgaataaatataatatgtttttaatatatattagatgtaactagattaaatcgatttttatttgaattttaaaattttttttaataattaatttaatccaattgaaatacaactattcacatccaatttaatctaactgtaattagatgtccaatcttttgtaattagattgtatttgactggtttagtgtaatttgatcaatccaattgaaatacaactactcacaaacaagtatttcatctttatttcataactttaaactattaaattcatagggaaaatatgatggaaatgagaatcataacttgtccaaatttgaaagctgcttcagtccaaggatggtttccaatcaagtgtttctccagcatacattgggactagttcgccaaaagaatatgagtaagaat

SEQ ID NO: 56797 - DNA, 1281 bp, Cannabis sativa
gggaagatttggttctggatgcaggagtatacatttggttctataaaaggaaaatccagcagttagcccctaaaccaaaccctaatgctaaaagagggaatgggggtcctctaagcgctagcaagaggccccctccggatgtttgccaaagatggaaatcctaaggatctcctaggcaaacatcgggtgcaaatatctcaaaagcagcgaaagtagaggaaaaatgaaagacacagaacgtgggaacaaaaactatcccctatcctaagtactctttcaacaaaggggtcgattgcaaaaatagaagaaagagaagtaacaaaacacaaataagagagggtacatacaccatgcgaccgttttcgccaaacctatttcccagaaatcaagcactttaatcaaaagttctaccctagcatgcaaatgaacaacaaaaacatatagtacccagaagacttacatgaaggttgaaaactgggcgttggtgttgatcgacggtagaacgtggactgacagcgacggagaaatagcattaaaaaatctatggtttctgaatttttttctcgaaagtattctggaggtgaaatggcaaagtggtgaaagtaaccaagtgaaggaagaaggctggcttttatagaccaagagaggtgcaaggaagctgtgatcaggcgccatcatacggtgggaatcgtaatcgattcgtattctgcaaatccaacggttgggacaaatgctcaccagggcggttaaaaacgcttgagtaccttttctgacaccgattaaatgcgtcggatcattaatggacgggaagtgaatagttgcctgcaaaaggaaataaaggttaatgatgactgtcataaatgcagcccacgcacttgaagcacgtgccactaaaccgacgagccaaccagaggcgccaaacaagcctcgtttattctccaccaaacaaagcttggggcgtaaatgttgcccttgattttgcccaaaatacgtggacctagataaggatgacacgtggagctgagaggaccagctcttaaagaaatcaactaagtcttaggcaaaagaagagtgtctctgggaaggtatctcccggaggagacataagaaggatctttatgctcccggaggccatggacatactaaggcggttccaggaggtactggaatctattatgtaatcacctcgcatttaatgccgcatgggggaagacgtattgaaatcaccataaacgacatgacggatggcgtaaccctcctttttcagttatcgcgctatga

SEQ ID NO: 56798 - DNA, 1081 bp, Cannabis sativa
gctagttagggtgttacaattagatctatacaattttctacttcttttttttttcatttttttcgttggcatgttttatgcttgtttgctatatttcccatgtaatataactctaatttttaaggaatttgtaaatagagtatgtcgatgttatttcattcactaattctcacgtagatatattatcgatgatctctcattcactaattctcacatagatatattcttctcttttatcaataattgggttaattttataatagtattttgcagttgtgcttgtcaaagtggaaaatatatgtccattaatattaacacgatcatgttaatcaaattgcagaattaagaaagtaaatatctttacctcagcgtttctacatatttaatcgaaagtacatgagattaacaagaaagaggtaattgtatatttcgtaaaattttgaatctaaagtacatgtaacatttgttaggaatttagtttattgttattgtgtttgagatttaaggccatttcggtttggtgtatgtacaatgtgattgttcttgttccaattagttataatattaaatttatttttgaggtcgagtgatagaatcaagtgtgtatagagctattttccttttgtaatctttgcttccttggggtatttcttctccaaatagagatcatcaacacaatgtcttctaattcatttcatggtcttctatttcaattttttatgagaactttgtaatattttactattggcttttttatatagatgtattttaatatgattttggttttcataaattataagaaattgctgcttcagtccttaagctaacaaggaagtgattcaagtgatcagtattattgtaaattttatttgtgtacatgaatttaaagaagtgttcagtttattcattactgtttcataacataattgatatggcttcaagaattgattaattacaaagagaaatggtattgcaaatttcaagttgtagccaagattctacacttataagagattctattagattctatttcttatatgtagttctctgctgtcgagtgaatttcgcaacaccaaaatat

SEQ ID NO: 56799 - DNA, 1215 bp, Cannabis sativa
tctctctctctctctctaatatgtgtaggtggacgacattttgaaactatcgttcgtggttatgggtaggcggtaaccaatagctctaggttcgtccaagattatggttctgggttagcgatggaagacaacttttggtttgtggatggagcttcggggttcattgtgtgaacattaatttttatctgatttgtattttttatgtttaggtttctaatatttttagacatgtttatggccattttttatttttattttcatttgagtgtacatacccactcttactgcattataaatactttagttaaaatttgtgtatggtattttttgttgaaattttagttaaattttggtttaatgttgtaattaagatttttaatttcctttccttagaaaagaatgtaatactaattatgggttcattttatttgttttttatatatctatatattcttaatttattttaatttctaaattatatatattaaaaaaataaaatcgagcatggtgctaaatcgcacaaggaacttcgacaagccgaagggatgcacgcacagattaggacaatccctgtctaaagacacggtgctcactccgttcagacacgatggggccctgctactcgcccactcgaatgctgcatccgcccatgtgtgtcgcatatccccttgtatcctccttcctctgcgcgcgtaggaggctggatggagcctcctcgtgggcaacaggtgttcatgcaccgaaattcaaattttctaatttttttcaacaaattttgagtttttcaattttcaaacactaattttaaaattaaataatatttttaatatatttaaacttaaatatcaattttgtaaattaataatatttattttttaatagttattattaattttatgatattttgaggtttaaatttaaaaattgattattttgttttaaattatggtcatattttaaaaatttattaatttttttaatttatatattatttaattataagatccgatatttaattattagccatgttatcctaaattttgcactctgacctggcatcacgggaatggtgacacgtggagtccacttggaacatatgctcgggaagacacgtcgagcaagatgccccgctggcatgcccagagcaagatatccagcgatccgcgcagagcaatcagcacttagcgaattcagttttcgcatcatgagtcatca

SEQ ID NO: 56800 - DNA, 5997 bp, Cannabis sativa
atatatatatatgataattatatacataaatataatacgtaccagctggtttggtgaagagctagagaaaatggtgttggaggagaattatttggagttgagagtgatttatttgttgaatttactttgaggatatatatatatatattaagattttattaaaacctaattcaacaaatggatttagaattggttacaaaatgtatagacatacgtaattataagtgatagtccaatactaaacatgattaattaattaatatttattcaaaaatgtgttcattcttatatttgacgccatcaattcctttgtttttattatcacttcaattaattaattgccatttttgaattaatggagaactcaacacaacccattaaaaccaattgatcacatatttagaattgattacaaaattatacattaatttatctaaatatacttaatctcatacctatatatatagctttataaaaaggaaattatataagcttattattttatatatatatatatatatatagatataaaaagaaagaatatcattcccacaagcttagacctagctatattcattaattatatatagtcacgactaacaaattttatttagtgggtgataaatatatattatttgtattggcaaacataaatttctattgtctattcttcacagtttatattttgttaatatttagtataaaaaaaaaagtaacttcattaatttgttgctaattctcaaattaaccaacaaaaaaacaaaattagtaaaagcaaaataatttgtggatgataataggaagaagaagagtaccaaaagctttttaatatttttttataaatattattattagttaaaattataaactatataaagtagaatatatcctttgttatatagataaataaacaaataaatattaaatagataatgagcagctgaaaataatagtaatttatattaagtaataataataattaataatctgatatgaattaagcggcagattttgatggggaacaactattgaaaattctatttttctttagtattgatcatagtcattcgtcatcactgcacaattattgcacatctttaaatttgtgtgtgtttgcgaaattaaaaaacagaaggagcggtttggtccttttagaactcaaatcaatagacaataatcagtcatggtattatttttctcattcccacattaacgtctacttctgcgagggattcaaaaacagtcgtctaagagtatattaccaacagagcagaagagaacagagtaatagaaagagaatgaatctatatcattgactgaacagaacatacaaatgagtgaaccttatatagttcgaactcagtacaagaaacacagctgtaattagttgcagaacaaatagaaacagttagctgacaactaggacaagaaactaaccgaaaacaaactttcctaactactaactaactcttgatactccccctcaagatggggagctaatgctcatcaatcccatcttgcttttaaaatcattaaactgattaggaaagagtgctttagtaaaagcatcagctaactgattcttagaagagacatgacaggtttttattactccttactgcactttctcacgaactaggtggcaatctatctctatgtgcttcgttctttcatggaaaacaggattagcagctatatgttgagctgccttgttgtcacagtagagcatagcaggtccttgatggtcaatgttgagctctttgagaacggacagcaaccaaacaagctcacatgtcgtgttggccatggccctgtactcggcctctgcagaagaccttgaaatggtctgttgcttcttgcttttccaggagattaaagagtctccaatgaaaatgcagaagcctgtggtggattttctggtgtcagggcatgctgcccagtcagcatccgtatatgctttgagtctaacttcagactttgcagggaaaaataacccctgtccaggatagttcttgatgtattgtaatactctttgggaagctttgaggtgtttggcatgaggattggcaagaaattggcttaatttgttgactgagaatgatatctcgagtctagtaatggttaagtattgaagcttaccaactcttcttctgtacagtttgggatcaactggtttgtccttcttgtcctaacataatttcaaatttgcttccatgggtgtattaacaggtttacacccaagatgcccaagatcctcaagtaattgcaaggcataaggcctttaggatatgaagatccctttctcagaccttgcaacttctaattctagaaaatacttcaactttcctagatccttaagctgaaacctcttgttcaacttgatctttaaatcctcaatagcagctatgttgttgctggccattatcacatcatcaacataaataaggagaataataaagctctccttattatgtcttataaacaatgaatgatctgtagctgaatgttgaaaaccttcctcaaacaatgcattagagaatttctcaaaccatggtcttgaggcttatttcaatccatataaggatttgttgagtttacacactgcatttggtggaagctcccccttaggactatacccaggaggtatagtcatatacacttcctcatgtaaatcaccatgcaagaaagcattgttgacatcaagttggtgaagatgccatccattaatggcagcaagggcaagaaccaattttacagtcaccaacttagtaactggggcaaaagtgtcagtatagtcaatcccttcttgctgattgtacccttttgcaacaagcctagccttgaatctttctatagaaccatcagcattgtatttaattttgtaaacccacttgcatccaataacatggtgaccagctggtaaagtaactatgatccatgtatgattttttttcaagagcatcaatttctttatccatggcattatcccacactggtatgccttgagcttggtgaaaaacttcaggttcttgataactggaaatggccaaaactgttgctcgaaagtggggagacagcctgctgtagtcaagtacctgagaaatagaataaggggtggcattatgggagtcttgagacatgttagagccattattaacaagaaaacaatgataatcatgcaggtaggatggctttttgaaagttctaatgggtttggtatgagtaggaacaacatgatttcgagtttctgcattgctggttacagtatgttaagaatcagagggagcttcagtctcttgatcatcaatagtatgctcattttgctgaacaccagatgcaggaacataaggagcaggaaccagatctgcttcaattaaagaatcatggattggggaactaatagggtgattatcttggcaaaaatcagtgtaggcattaggtaaaaaatcagaaacatgaaaaggaaaaatggtttcatgaaattggacatccctagaacaaaaaactctattggaatttaggtctaacaatttataggccttcataccagtaggatatcccaagaaaacacatggggcagcccttggtgaaaacttggttctagaaacatttaaagtggatgcataagcaaggcatccaaaagcccttaaatgttcatacttggggggtttagatttaagaacctcaaagggtgatatgttttgcaaatttggagttggcgttctattgatgagatatgctgcagtagcaacacactcattccaataactcaagggaatgtgggacttaaaaagcaaaactcgagcaacattaagcaaatgttggtgctttctcccaacaacagaattttgttgaggtctatggatgcaagaatggtaatgaacaattccaagagagttgaataaattaacaaattgcaactctttagcattatcagatctaacacccttaatggtcttttgatattgagtttttacgagttgaatgaagttgggaatggcagtttgtgcctcagatttagttttaatgaaatgaacccaagtgtacctagagtgatcatcaacaatggtgataaaatatttgtgtcccccaatagtaagagtattgtatggtccccatgtgtcaatatgtatcaaatcaaaacattctttggcaatattatgattgaaaacaaaaggcaattttctttgtttagcatagtggcaaatagagcaatgaaaattaggacaagcatgattatgaaattgtaaacttttattcaaaggatgaattttgatacaagaaggatggcctaatctatagtgccatatagtatcattatttatctttgaattagaatttaaagaaaaaacaagaggactgatttcctcattttgcaatttcatatagaacaatttcctatgcctctcagccatcccaatcagttgggtcctcgtactgtcctgaatttcacaatggtcagaatagaaagtgaaaacacatgagttggaattaagcatagaggtgacagcgacaagattaacttgaaaatctgggacatataaagcatttttaaggatgaaattaggtgaaagaacaatagtaccaacacaagaaactttagcagacaaaccattaggcaacttaacagaattaatggacaaatctgtccgagtatccttgaacaaagataggttatgacagacatggtgtgtggcaccagtgtccaacacccaagattcagaaaaatttgaaaggtttttaccaaataattgggacacatgatggttgacaattttggcccggattggggggttcattgctcttttgtgtcaacatgttcatcagcttatgacattgagcaaaggcagccataaaatcctgttgaacactctgattttctcctgtaccagcagtattttcttgcacaccagaaaaattggcaatgggattcttagcaggtcctggaggatttttgttgggaaatttcccatgcaatttatgtcctggagggtagccatgtagcttatagcactttgccataatatgatctgcaacaccacagtgatggcagataattttggctttgtttggctggacactaacgacaaattgtcttgaatttgatgaagaatcaggtgggtttttctcttcttgaggggcattagtaatccctctttgcctttcttcttgaacaactgaggcaaagactttgtttatgttgggaaaagggtcttgcatcaatatttgagatctagcattactgtaggattcgtttaacccaatcaaaaactctagaacccgatcctcatcttggtactcctgtatagttttcattgcaccacaactacaaatgggttgtgatctaaattcttgtataagatcccacaaagatttcaaacgagtaaagtaggtagtaacagagttcgaaccctgactcaaagcctgcatggatcgtttagcctcaaacactcttggagcattcttttgataatacctttcttgaagttcagaccaaatcttggtagcattgtccaagtacatgacgctgtctgcaatttccccagaaatggcatgaagaatccaagaaataaccaagctattgcatctgaaccagctgtcgtgatcatcatcatcctcttcgagttcaggcaatctttcatccacgaacttgatattgttcctagcagtgagagcaactatcatctgtcatctccaagagctgtaattttcgcatcctgtcaaaatcttagggactatgttaaccacggattgatctccaccagaaatgaagtatgggctccgagggttatctccaggaagctgatttctaggttccaaaactgagaatttgttggagttatcagctccatcttcttgattatttgtgcttcgagtgcgagctccaccacgagccatgaaccacaaaccagaaacgaaaggaagaagaaaggggccacactagatcggtggctctaataccatattaccaatagagcagaagagaacagagtaata

SEQ ID NO: 56801 - DNA, 1295 bp, Cannabis sativa
ccacctgcgcatactctacgtgttagttcactgtcttacctattgtcctgcaactgacagaaattctgaatccccgggtgctcctgatcaggtgctggtaatcctagtcacataaatctgggattttcacaactagggttaacccctgattccatacttataaaattcaatcatggcatttaaaatttaaataatcatacagagcttggaacgagctttccaacgatataaagaaatcacaaatcggagttcggaatcaaaagatatgaattttcaaaattcaactcaaaactgcccaaaaatatcagggcaggccgcggcatgcccaagtcatgctgcggcacctgggatgaacccccaggttccattagcaggggcgggccgcggcatgctcagagcatgccgcgacatctgggttccaaacccaaaaaccagcaagcttcaaacacgatttcagcaaccaatcttcacccaaatcacctcaaataacattcaaactcccaaaacatgttcacaacttatcaagctcaaaggtagggtattaaaatacacaatccataaatcaatttccaatgataaaccccacaattcagattgcataaaacaacacaaatcttgcctaaacttaacaagattccaagttcaagaacatgaactcaaacccaacacagtcctattaaaattccagcaacataacaccaatttaatatgaaattccaacctagaaacatcataaaatctctgcccaaacccaacaatgaagcatataacaacaacaagctcaatttcaacaagattaacaccaatccacttaacatgcaacaaagaacattcaaaacttaaaagagcatgcttttcaattctaaactcagttacaaattaaaaaaaattgaagagtagggagaagaactacctcaaatttaagccacaatcaagctaaattcccaaatacaaagcttaatccaacaccaatatcaagcaattcacaccaatttagctttgaaaattttgagacggttagggagagaaagagggttcgggtgagagggagaagcaaccagaaaaatcatctatttccctcaaaaatcaatttttattaagtgtaaatcaaatatggtcaaaagaccattttgcccctagggcctaaatacacacatacaccatcacaagggtattttagtcatttcatactcaattacctccaaataaatttcagatttcatattatcaaataaaatgccaacattaaatcccaaattgcatttcggacccgaacccggttcggcccgaaatac

SEQ ID NO: 56802 - DNA, 3924 bp, Cannabis sativa
ttaccctcttttttaaagtctatcatttttacctcttttttaaacactttaccaattttacccctgtcacctcaatatacactccacgtggctcttttatgccagggtattttaggtacagtatatataaaaaaaggtatatttcaattaaatataaaattagagataaatttagttaattgataaataaaagagatatttttcaaaaaaaattctagtctaatttcctcctatatttaaggcctattttgctccaagcccattatgtattttaccccctttcttgggccgcattagctagctcagcccaaaaagcgaattgtacgaaagtaaaggaacaatggaaaccagaaacaaatacacagattggagacaaagacaatggttggtttttttccacggaaatttctggttagactcttggagtctgatgttcttgaattgattgattctcgatgatccccgtttgacaaactcaattgggttctcttgtcagtagaatccaccatgaaccgatttcgagcttcacggacttcggtttcaggctccgccgcagttgcccagttgaggaagaaagcttttaattcatgggcggccattcaggacacatttttttcaaccaaagtactttccttctttcaccaacccctcttataaatatatatattttcatgtacatcgctttctttcactaattttgtttcagcgatttatagggtttttattatgttttattataggatatatttgaaaggcatagggtggtgtttacagttgggacctctatagcatcagtagccacagcatggcttggtatgttttccatctattattaccgtgatatccatttcaattatcatttatatttggtttttaaaggtttatggcataagggtcttactgagtttttagttgtataaggagattttttgaaggggatgggataaatgatgaacatttctcaattttatgtgagttcaaggaaattctagagttgtatttagaaattccaattatgatggaaatatatttactggagtaatgtgcaatatgcatgcattgaggtgtagaaggttattgccttaactgttgtcatcttcacatagtgatacagctgaaattttaaatttggatgcagggtattctttacgccacctacacgattctaaagttgatcaaaggcttgaatcaatcgagaaagctgtaagcaaaatatgaaaataatagacctttctttaattgcttacttcctctgctaattgaaattttggtattgatgtatttttttcttacatttaataccgaaagcgttcaagttaaatgttgaacaattccataacctattaaaaaaaaaggacttctattagttttcttgtgtgtatgttggcttggaatacttttaagtcatgtttgatgaatgtttgttcaataggattggatgatttttattatgtgtaattgttgtaaaattagtgaggatattgcaaaaatggatcttacaatcttatggataaaataatttgaaaaatttgggactattatatcctatacaatccctatctttactcaaatgagaaagagattgcaacttctaatacacattgttttcatctaatttattgttgagttgattgaataataatcaactcattcattcttctatgttgtttctcttatacctttttaatggaaatctattctaacattgtactctatcattttataatatctctaattcatcttttattttatgtaagaaacaagcctgtttctgaacattcttttatgtaattttgttgaaactcatttctttgttctgttggcttatttcttagttgcattttttaataagtttttattgatcccttcttctaatttctgttatatcttgttgtgttgttacatttgtatggcagatgaaaagcaaccatcttagtgaacattcagagattaggaagattgttgattccagaggtttcagcacatcttcttgtgtagccactgctggaaccactttaattattgggtttgatcctgtatcttatttctttggcacatgtttctatttcatattttcctcatagataaagttgaaacacgcatggttttaggatatagttaaccttatcatattgcaacgttaaacaatcgttgctgtcaaaattatttcttatgtaatacggggtttcctaagagggggcatgtagtgttttcgtacttcctttttgccaaacattgtatagattgcctagaatatactctcactgcaggctgtaagtcaaactcattatgcttgtaaataaaacaaccaaggattatgtcatttactttctcacttgcaggtatggcttgggttggcgaggtggaagatggtacgcgaatagacaatttagaaaagagcagatgaaaatgctaggccaactaaaacctaagagatggcagttacttgggcgggtaaatcctagagcattgcagctccagctcccaacattccttaaaagaccatcggccagatcgaaagctgcagaaactgcaaccaaactacctgaaaagatgaaagaggctcctatctcttgcagttctaaaggaaccccttcttcttgttaaattaacgtatagaatgaaaggaattacgtcaaatagattggttatggaaaaatgatggaaaatactatctccagtacagcccatttgagatagtctattaatactgttatttgttttgggaaaggatgatataaatcctcagttttgggctctcttagagttactttttcattaatttacgttttcactcatttgtgtctgtaaaatgtaaatacaattttggggaatagaaattttcccattagacactggatttttattttattgtaaaaatatttgacattatatttatacacattcgatgggtttgtcaggcttgcaacctcttcaataatccattcaattggagactaattttatttaattaattttttttcttttacattagaaatgatacacatttctatctcaactcagtttattgctcgtattctaaaatgttcttataaaaaaaaaacaaaaacaaaaaatgtgaaatgggaactagtcaaaatattttcgttaaaaagagcaccacaggagttatttgacgctttaaaccaattgagtgagtttttttttttttttttttgcttgaaatatggatccatggcagaaacataatctttcattacattatagagaaaaaaagggtcaattttacttggtttgtattgcagtagggacaaggtgtgtcccactagatgcctagtttaaagttaaaccgcttgtctaatctgttgacggagaaaagggtccatgataatcagctcctaagttctcatgtgagcacccatttttgtttttatctgtattttatttatttggtattaaaagacagaaccttgattaaagttgggttgggtgtaccgagacaccaatcctaaaaagccattttaaaacatattatgatggccaatgctttaacctcaatcattctagttttcctgtttgttgtgtcagaagttgcaagaggatccagaacaaagctagctccagtccatggccaccggggtcgccgtttttctgctttgaaaccttctggggatggggatgatggcatttgttcttctatggtggaaaaccatggatatgtttgtcaagaacacacggttctatatctcaacttattgcccttcaatcaactctgcatagtaacagattatgttgacttttttttctttctttcttggtttattccaggtaaccactcaagatgggtacattcttagcattcagagaattccaggggtactgccacagggcaaagcagaaaacaatgtacctgttcttttgcaacatggtgttctgatggttggtagtttttttttttttttt

SEQ ID NO: 56803 - DNA, 1758 bp, Cannabis sativa
cgacaatcaacctagatttgctcaattttttattagaattatggaaacatgttaattttctattttatttcttatagattaagagaattcattccaatgtaattagtccccataaataatggtctcatctcactatttagggacacgaatttaatcaaagagaacacttaagagagaaattgtgatcgaagagataattactcaaagatcttttgtaagagctttcgagaaggaatacttcattcattgtctcataagttaatacaactaaaaggagagtaggctattaccactatcacggggttgatcctctataaatcatggtgttttctttacttattatttttttctttctattgtttatttaatcaaatcgctttaattaagactcactgtagttgattagaagcaaagtcaatatttaggtgctttcattgagagcaaacacacccaagttttttgccttacgtttttgaaaggatacaggatggttgtaaactcgtgggggaattcaaactgatccagtcaatccgatgatgacagatccaagagtgcaaacacatggaaacataagagatccactagggacgacccctagacaagttaatactcaaccaccaacagtaggccgctgagtgacttttcctctggctgggttcactccaggtatacaagaaataggaaataccagaacggcggccgagtaggccactcctggcactaaaatctcatccaccacaaatactaaaaggccagtcaaagatgatactgagcttcagaacttgtgagcagcattagggctaatgcaagaccacaataacatcctgcaccatgactagaaaaatatccgagcagctatcaatcttgcctttgatgaacaaagatgccagttcatagagtggagggatcgagagatggagaaaatgagagcctagcaggaagccattgacaaacgctttaggtaggccaccatactgatcaaaagggcctatcaaatcaccagtcaacaataagtaactgattctagtatccccttgggatcttagaatgggtcagaaaagtatgtaactgatcatgtcgcatagacttacatcgatcaagcatccaatccaaggtcataggttcaaactgtgggccaaacagtagataaataaatcttaccagggagtagtcagctaaacaaccatacccagatagagttattaggccaacctctcaaccaagctggtcagacacaaagacctcttggaacatcggtgtttgaccaaataggcaccttacacgacctcaaaaacaatctgaatcacagaagaggactggatgggaaaaatgttcctcctaccgtccagccaaataatgcgaacaactatgtcctaggtccagttctaagagatcttaatatgacataggtcggccagcaggctagccaagttcatccacttaagcaagcacaaatatatcagcttaaaagcatcgtacaaggcctgatcgacccaaaactcactaatcttgaacttgatcgggcaagaggataacccttctcacaagaaatcaatgctctcgacctaccacccaagttcaaaatgccagtatgggagatgtatacatgcaaagaacatcttttatctcacctgatatactttgagatgcaaatggacttgtaaggggtggatggtaatgtacagtgtagatgttggaaatattttaccaggatctagatttactaccatatatgattcattaacatcctaatatgaa

SEQ ID NO: 56804 - DNA, 721 bp, Cannabis sativa
taagaaattaaatattcaaatacctattaaagttactataataaaggagtaaatcatgcaatgtgatgtaattttaaattaaatcatttaggtatagatataaatagtatatataagtacggtatagtaagtttaatatgagattttgataattattttatatagtgtgtagttatgttaaagaggaattgtaataaatggccttaaatctcacactgattaaagttacatgttcatttaaaaaaaatggtaaatggctttttataaatgtcaatacctaaaatgcccttgattatatagatgaagctcaactctatttttttcgattttgttctactgtttgcttcaacgattcctccattatacagcgattctcaaacaacaacaaaaattattatctcatccatttttttccaactagtttcttcaatcatttctcccgggcaataaaactctcctctatctttttggattcgatttacattgccttgccagatttattcaccggaatcttcaaccacatcctcccacagtcagccattcctccccaaaaaaatttcaacaactgattctcccaaatgaaagcagtagtaatttatgaacactataccttaaactaatatagaaacaatatatctcaaggaaagcgcggtgagaaaaattaatatatcaccagtatagtaaaaaaaaattaaaaaaaaaaacttaatttaatattcca

SEQ ID NO: 56805 - DNA, 1283 bp, Cannabis sativa
tggtaagagattaaaaatttcccacagaaatgttcaagacttgaatatatacttcaaaattccttgaggcttcttcacatggatctgatgggtccaattcagattgaaagtttgaattgtaaaagatatatttttgtgtatgttgatgatttttctcagttttcataggtagatttgttgagaggaaaagatgatatttttaatgcttttacgtctctttgtttgaaattgtgttttcaaatagattataatgttggaaaaattgttcagattaggagtgatcatgaaaaagaatttgaaaatattatttatgatgagttttttaaatctaacggtatttctcatgaattttttgcttctaaattcctcaacaaaattgagtggttaaaagaaagaaccaaacactgacagagattgctagtgtaatgttaaacaacaagacactcacaagtgtctttgagctcaagctaacaacacaaattattttcatatctcaagtctttttgcgtccaggtgctcttaagacccccgatgagatctagaaaggtaagaaactaaatgtaagccacttttatgtgtttattagtacttgatatatcttaagacatcacgatcatactggtaaatttaatgcaaaaagtgatgttagtgtgttcatatgatattttattaacagtagggattattgtgtttataatatgaatacccaatctgtgatggaatctactaatgttgttgttgataatctaaaagatttctctaagtattctatagatgaagagattgaagagttgctgaaaaattccactgcattggcactggcagatgattcagctacaataacagactttgattctaaagttacacgttaagattctgaagctacagctgatgattttccagaaactccaagaaagaaaatgagcaaccaccatacttaatcactgatctagttcagagggaaccatcttccaaatttaaaaagaatcatctaactgatttcattctctgaagcatagatgaaagcatagttactagaagaaagtttgctaatgtgatttaatttttgtgtttttttcttctttagagcgcaaaacagggatagaagccttgatggatgaagcatggctttgtgcaatgctagaagaatttcattaactcactcgaaatatggagtggaccttgatttaaagactgccaattgtaattatgataggaacaaagtggcttttcaaaaacaagagtgatgagttttgcattatcattcaaaacaaggcaagatt

SEQ ID NO: 56806 - DNA, 738 bp, Cannabis sativa
  modified_base (161)..(168): a, c, t, g, unknown or other
atatgggttctatcaaagattggattttgggtagaaacaagtaacattaaacctacaaaaatttatgtaatatattaaaaaaaaaattacataaatacagaaaaaaaaatttactctttaaattttttttatttataaaactaataatttttttttttttnnnnnnnnttttataatttatttataattataattttaatttctcgttttttatttttatttttatttttgtaattttagaattttacaaaaatatttttgtaattaaaaaatttaagcctaagaatatttttaaaaatgctcgtaaaacttatctggtatttctttttgttttgttttaatttcttttcttgctcaaaagattctcttttttgggattcctcaaagatttttttaaatattaaaaaacaagaacagaatttattgaaggtgttcttagaaattcctcaaaatattatttatatgttttcaattaagaagaacccgttttccaaaacaagaaaagaaagaaagaacccaaaagccaacttataaaaggtaaaactgattcaattaaaagaatattggaatcaatcaattaaacccaattgcatgtaagaaagttatatatatatatataattatttattatgagacctttgaaagcacggtaaagctgagcagcatcatcacgaggggtagttagaaccggaggaatagtcactgtggccattaatgttctgtgttttaattaggaaa

SEQ ID NO: 56807 - DNA, 736 bp, Cannabis sativa
acattttaaattgtctagctcccaggcaccatcaacagatccagagaaagagaaaatgagtaaaattctttatgcaagttgtgtaggaagtttgttgctaatccaggaaatgttcactggactgctttgaaatgggtaattaggtacataaaaggcacactgaacactggtttaacctatgatggcagtagaaaatttgaagaattggtaactggatatgttgattcagattatgcaggttgcttagacattagaaagttattcacagggttcgtatttactgtttgtggaggttgtgctagttggaaatctaacctacaaaaggttgtagcactatattttacagaggttgaatacatggctactacaaaggctattaaagaagcaatttggctcaaggaattgacatgtgagctcaacatcaactcagacgatgtgactgtgcactgtgataatgaaagtgcactacatctcatgaaaaatctcatgtttcatgagatgaccaaacatattgacatcaagatgcactttattagagatgtgattcaatccaaaattgtctctgtgaggaagatcaacactcaagaaaactatgctaatgtttttacaaagagtttgactgaagacaagtttagactttgtctagacttgcttaacatcaattcaaacaagagtctcaactgagattcatactcattggactttagatcaattctgttggttactttcatggctt

SEQ ID NO: 56808 - DNA, 983 bp, Cannabis sativa
cttgatttttttataacaaattagaggttattcttaaatagagtattcttaaatagaggttctactgtaattttgttttttttttattaagatatatatatatatatatatatatattgcaaccacaaagaagagatacaaatagagtacatgttacaataaaattagaaaatctttggaacatcgccattccaaaggaccactctctcaagccttatagcacctttagctaaattgtgagacattacattgtgatcccttaattagtacatgaaggatagctgtagaaggaaaaacagagagacatgatagaatttgttccaccatatcagataaaggtgacttatctttccattgattttcactttatgcataagaagcagacaatcactttcaatgcaatctaaaaggaaccttacaactatacaccagcgaaggccacaaagcaaagcttttgcttcagccaataagggggataaattaccatcaaaaggagaggacatagcatccacaatatctcccttactgttggtaactactgctacaattccaaccttatgcatttgatcattcaaagcatcatccacatttaatttaaaataacctggcttaggagttgctggtgtagaactgtcatggctacaacctgaaaacactttaggaagagtgtgagcatgaaaatcctgggcatctgaaaacactttaggaagatatttcttcatgtatattgaagccaacttgttccagagacccaaggccttgtcttcatctaaaacttccctcaaaacctcatcactaagactaaggaggatggcactaagtgccttggcttcaattttaagtttccttcttgtcttcaatcaattccatgacttcaacattaaatgcttcatagatcccttggtgaactagaatagccttcattttgattctccataggctgaaatcattggaaccagttaacttgtccacctcaaaccttg

SEQ ID NO: 56809 - DNA, 723 bp, Cannabis sativa
cttcacgataatttttattattctaaaaattaaaattttaccccaatttttcccataaacctacacatccatctacaaaagaacacaaatttattatgtttgtaattatgttttagttacgtgagtgtgtgaagataatttaggcacaatactcatggaaaaatgtatatttgaattagattttatttagaggtaaatttgattaatgtataaaaaaagttgatattcttcaacttcttccaatttcaacagtgtcctaaattttgatgtaattgatattatatatttgcgtccatacttaatgattaagaatttagattttacatatgtcatgtttaagatattaatactatgtattgacgaaattagacggaaattataattttaataatattaggtacttaaattgctaaaaaaattattagatatattttagttataaaatcaaaattttaagcacttataatgcaatcattccatcaaaaattaaacaatattttttcttggatttgcgactagctaaaggttggcttaccttttgatatttttaccaaaaagaaaaaaatagtaattagtggtaagtaaatataaaaagggtaaatactattttggaccttgtgttttgcaaaagttaaccaattggatcatctcttttgttaaatgacaaaatggatcttatattttccaaaatagtaaaaataggattttgagctcaatttttaa

SEQ ID NO: 56810 - DNA, 823 bp, Cannabis sativa
  modified_base (47)..(49): a, c, t, g, unknown or other
aaccactttagaaacttaaaccgtaaatttaaaaaaaaaagttaaannnatagtatatgaagtaattctcctataataattaatagactaatataaattgtaactaaaattcatatagtaacctacataaaaactatacgaataactactgtagcaacttaaattataaatttgaaaaaaaaaataaaaaatacggttttggttgttgtggtagtttctatatgggttactatgtagatttcggttgcgatttagattactctgttagttgatatgggatttttatgtaaaatttcataaaaaatgcaaaattaaaactattttgaagtgtatttttgaaaggctaattaggatttttacctttgatgtgtactaaattatgtcttggaattttttttgttgttaaaaaattttcttaaactattgagattgttgaatttaatgacttttgcttaattttattcaattttactaattcagtgattatttatatgctaaatcatgctcatatatctacctaatcacattttttgaactttgatatgtatcaaattatgctttttaaacttgattttttttattaaattagacaaaagtccttaaatcgaacaattttaatatagaggatttctaactgccttaaaaatttagggaaatgatttgatacggaaacaaaaattatagagtaatttacggccaaactctttgtacttttaagtttagtaggatttaactctcatactgaaaaaattatggctaaagtcattaatttttacaatcgttttgttcaacactcatattatctactttggtctattaagtg

SEQ ID NO: 56811 - DNA, 1279 bp, Cannabis sativa
ggattgcgttttaaagtgggtaatagttttcatatttcttctggtttagatccttggatacccagccaaagcaacttcagaccagtgagttttagtggccctccaaacatgctggtttcgactctcatcacagacaatcggaaatggaacttggatatgttaaatgagttttttctgccaattgatgttgataaaattctaacaatcccattgagtttctttgctgacaatgatagactaatatggcatcatttctcaaatggaatttacaatgtgaaatcaggtttccacttggccacttccttggaagatcaactcgtttcttccacttcagatgctaaccgtgactggtggaagtatttttggagtctcaaattgccacgaaaaattagtctctttgcttggaaagttctccaaaacattcttcccacttcagatgctaaccgtgactttgagctcttcatatgtctgttatggggtatttggactaacaaaaacaatgtgtttcatggtgggacatcacgacttagcacctccataataacctataccacagggttctacaatgatttcagctgagccaaaacatcccccaaactagtaactgctgcagacccgataattcttcaccaatcaacaactaattctgcccaggaacatcaaattccatggtctcctcctacactgaatggcttcaaacttaatgttgacgcagctacaaatttggaacagaaaaattaggcattggagctatattattcgagaccatgatggcttggttgtggctgctttttcaaaggtggttcaaggcagttttcgatcggatgagatggaagcaaaatcactttttcatgctctcaattacaacaatctataacgcatattgagacagatgcatagagagtttccactgctttgaattttgctacaagtgacttatctagtttttcagaccttattttcgatgttcgttgtcttttatccttttttcctggtgttttagtatcccatgttaaaagaactgctaatcaagcagttcatgggcttgctaaatttgctttagggttggatgatgacatttgttggataggagaaattttctatcctattttctctgttgttgtaaatgattttaatttataataacagtgattattcttaaaaaaaaagaaaaagagaatatacttataacataatttaggaaaaattaagaataaaaagattatatgaaaacaaattaaaaaatgtggaataaaaattaagacaaaaatttaattta

SEQ ID NO: 56812 - DNA, 827 bp, Cannabis sativa
ctgatctaaccaacagctctaacatgtttcacaagcgtactaagcgtgttgacatcgattgtcatattgttcgagaacaagtcaccaaaaattgaatcaagttgttctaccctcttggcacaatattacagatgtcatgaccaagactctcttctcttctattcttagttcaagaatttattgtccaagatgagtattactaatctctacacctcatcttgagggggagtcttagagatattaatgtagagtttgttgtaagtctattatatacagttagttatagtagttattcctaactaagttgtcactagctggagtttgttgtatttctcaactgtataaatacccctttgatcattaataaagaattcaattcactattcactaatagagtcccatctccccaccaagtttcgtcaaagataaaaagtggagaaaaatatttttcaaaacaaaaaagtggagaagaaagaggagagagagtgagatagaaagaaaaaaatgtttttttttattttgattttattatttgctgttatttatatgtttaattaagtgtaattaagattttaaatccaaatttttaacttttttatttccttaagtttatattggtttttaatattaattaatttaaaaaatgtatttttaatattaaattcaaaaaatacatttaaactacaatttaaaaataacaaaaacatatagaaacaaaataagtaagataatatggaaatattaaatttttagaaaattctacaatgcactcccttaaaatggatatattgatgcactcctatctgttttagcatccgaaataattt

SEQ ID NO: 56813 - DNA, 1229 bp, Cannabis sativa
ggttcctccccagcccaaagctcttaatcacaccactacttccaatcctgtcattgacaagtctcaaattgccaatatttggcatcatagacttggtcatccttctcactctatactaagcaaagttttacataaagttgttcccaatgtaaagtgtaaagcacctgacttttgtaatgcttgtcaaactggtaaactacaccagtttagtttcaaaagcacttcaaataatacttttcagccatttgatctaattcttactgatgtttggggcccttctttctacccctctgctgatggttttagatattatataagctttcttgatgattttacaagattcacttggatctttcccatgaaaaacaaatccgaagcaacaaccttattctgtcaattcaattcctatgtggcaaggcaatttcaatcaaaaattaaatctgtccaaagtgatcttggaaaagaatttgaccctttgtataaactttttaaaaatcttggcatcactcaaaggaattcttgtcctcacactcaccaacagcaaggtaaagttgagaggaagcatagacatgttgtggacactggcttaaccttgctgtctcaagccacaatgcctttatccttttggtgggaagcatttgcttcagcagcctatttaattaataggctccccacatccacattaaactttcaaacaccttatgaaaaattatttcatcattcacctgactataatttacttaaggtgtttggttgctcatgctttccccttctcacaccatatgcatctcataaagttgcttttagatcatccaaatgcattttcataggttacagtcccaattttaaaggatataggtccctacacccatcagatagaatttatgtggctaggagtgtcacttttaatgaaaaagaatttccctatcatgatctttttccctccacttcttcatcaccatctaccacggtttccaacaatactcagtacctttttcccatgcctaatactgttacaaccttaccaaacctgccaccatcaccacatgtgtctacacagtaccctatacctcccactcctccatccatatcacctagtttcacatctacttcgacaaatcaagctacccccagtcaaccacaatcctcttttcccacaaatcactcacctactcctactgatactatcttacctactgcctctcttcccacacatactataaaccaac

SEQ ID NO: 56814 - DNA, 1600 bp, Cannabis sativa
gaagcaaaactcacttacgcttccttgaagaacactgaacacaatccaattccacatatatatttatgttaataataagaaaatacttagtatatgtgtattatgatggaagcagcctctggaaactacatgacactatgagattagtcaatgagtattgttatagtgcttgaatgatgaggattaagcttaactgtatcaaagtccccactcgacactataaaacgtccctcgcaaaactctaattctaattgaataaaaactaaagagagcaaatcatttaattataacacaaaattttttaactatcaaaatctaataatggcaagtcaaaataaataccagtgacaaaccactttgcattgatcacagagagtagtggtggggaaataaacaacgacacattgattcagagtaaccatggaaacgacgatgtaacttgattccgtattcacctcgagctcagcctagccacctcttcggaggccaaaaggaccaaactcctaatctcttccttcctagatacagaaaggctccattttttgtggaagccgaagtatcgtttgggtttaaaagtatatatattgcagatattttgtatatatataatttaggattttataaatacctacgggcatattaattatatgttttaattaattaacaaatgacaaattaattgtctcacattctttgcagaagcactaaaggccatatatgcccaagttttttcactatttgttgtgatttgcaatactacaaaacaatcagtaacaaacaaaatatttcaccattttcttcagctggcctattttatactattgctaaattgagtcaaacttacaacaattattgtaaaaaaatataagaaaatctcaaacccagaaaaatcaaatgaattctatatatatatatatcattttctagatttgttgatgaaaattattattagataagtttggatcagatctaacctcttcgtagccggagatgcttcatgggcggagattctttgtggtcatcgtcatggtcggagagggaacaaaacggggttgggcgatgccgactgagatgctcggggttgggcgacgcctctgacgagatgaggatgagaacgggcgtggatttctttgggtataaggggcgtgagtttctctgggtataaggagtgtgggtttcgtgggtttcattgggtatcaggggcgtgtcattgggtatcaagggacctgggtgggggttagcgagctgtcaaaactctaaagaaaaaagaaaaaaaaaaacattaggggggagatgaaaatgataggcgggagtttttgggtgtgtaatatttttttcaataagcaatataaaaaatgacatttggatgaatacattaatatttataaaattataagttttaatatttttctcaaaaaaaaaaagttttaatataatttatgttaagcacattttttaaggattaaattagtagttaatatatattcaatgtagcaataattaaccttaaaacattacttggtacatataaatttttttttttttttttgagatatggtacatataaattattaataattataaaaataaattattttaa

SEQ ID NO: 56815 - DNA, 765 bp, Cannabis sativa
cccacggtgggcgctttcatttttcatttttttattccaaactattgataacatgcactatgcagtgattttcttatttattacgttatgtaattaattaatatctcgaacattatacaaaatgaataaatcacagaatattggaaaaacattcactacgattaatatacaaaaataagagcaactagggttgggataaagttgagattgaaacagtatgctcaccgttcagaccattcgtacctctaatcgtatgtcctctgtttttgggttggtagtcaatgattgtaaacatttactttcctatcttccacatgtttctgttaattttattaaacgatcatctaatcgagttgcccactatgtggctaggcactctcgattcctttctggttgtatcatttatgctcataacttatctcctgatcttcaggaccttttgtattctgaatgctaaatttaatgaagttttatttcattttttttaaaaaaaaaaaggctttctctttccaaaatcctaagtaaacaaagaaaaactctacttttcaacatttgcttagtttttctttgattttcatttatctttcaaatagataaggccaaatagacttgtttaatgtacaaacagatttattcaatttgctttcaataaaattttcttaaatcactaaagccaaaatctatgtttgaatttcattatcagaagatgactgatttgaacccttcataacaaatttaaggttctcaagcatttcataaattgag

SEQ ID NO: 56816 - DNA, 1090 bp, Cannabis sativa
ctttaatataagcgtgaccgaatccatgcccagataataaatataaatataatattgaggaaattatagttcatatttatttttttattttttattaaattttttatatatttttttattattctttaatttatacctaattttataggttatatctcaattatgtgcgtaaaattttttaattttaataagttatgtgaagttatatttagtattttagttataaaaaaggtaattattgattaaaattattttgtagttatatttcattaatgtataataaaaaatgatagttctcaacatatttgtataatattaactttgacatgattgaaaaatcattttacttatattatagaagttaagggtttaaattctaataaaaatatattttatctttaatatttaatttaccttttatcactcacaaaaaaaaatatatatatatatatatatatatatatataccctcaactttagttttgatccatcaccaccacttgaaaatattaaaggaagttctacaaaagtattgatttttaagtaaaaatttataattttactgtcacataattttttttgtaaaaaatattatttttttataaaacaatcataaaacaaaataattaaaacaacagtggaataactaaaaaaaaaccgtgaaaacttaacacagtacactgtatatttttttaaaaaaaattcacgtaaaaaaataaaaaaaaattaaaaaatttattatatggtgtaaaaagcaaaaattcttatacattaatttttaggaatgcactattaaaagctctttattttattttctttctgcaattcaaataacccaaataataaattttagtatgacattagtttgttgacctttagtacgtgaaaaaccaaaaaagtgagctgaggtgattcacatgaaaaaaaaatatggaggaattttcaattatattgaatttatatataatttgtaagaatatgatgattattaaaaaaaaaattatagattaacaagtaactaccaaaacataattaatagtaaaactctgagctatatagcttaaactaaattttatacaaaaagatgaga

SEQ ID NO: 56817 - DNA, 780 bp, Cannabis sativa
tgtgtgagtggttcgtttcaaggcaaaaatgttgtatatatgtgtttgtatatatatagatatacattatttatacgagaaacattagataatatgtttatattgtctttagatttttgtgtggctagaatgaacttttttcattggttggttacataaataagttgtatttgattagtttttatattactatgtttttgttgatttttgttttggtcagtcgggtgctttaccaaatggtgctcacgatggttactggagacatgatgctcccgcatctcaaattcaccatagtagtccaaatcaaccccaccttcaaaagcctttggatcaaaattcttcctatagcaactttcaggatcaacaaaagtctttttattctccaggatccagttcacagtattctgcaactcatcagcagcctccggtgccttcatgccctcaaggatcaagtttgcaatatgcttctgttcatcaggtaccaccgtcaccccagacttttcaatcaccttcgcaaaatgttcaatctttagatactcgaaggatagggaaactgcagatccccaccaacccaagaatcgcatcgaatttgaatttgggtttatcgaagaacgacaaggatagttctgtaacaggtgcagcagctaaacctgcgtatatcaatgtttcgataccaaagccaaatgacaacgtctcatctagtgctggtgcagattctttgcttaaggtaagaagtctgatataaatcgttaggtgctcaccttattggtatcatgtgat

SEQ ID NO: 56818 - DNA, 3343 bp, Cannabis sativa
  modified_base (212)..(220): a, c, t, g, unknown or other
cttatttcttagttaattgttaaagggaaacttacaaaaatactagaatttaggttaatttttacaaaaatactgtcatacagaaatctttacaaaaatactgtgtttcataaaacactagtaaaacccaaaacagaacagctcaaaacaacagtaaaataccagtagaacagtgaaaacttaacacaatatactgcagtatgaaacttatnnnnnnnnncagtaaaaaagtaaaaaataccatctggcagtatttttgtaaaaaaaatgcaaaagttaatacaccatgtaaattttccttgttaaacgcccccattagagaactattctcagttaattaaccaattgggtcttgctaatcacgtcaacatggtaaaagagatctccctttttcagtttcaagcaaaaacattgttgaaaggaagaaaaactgccattgttgtaaaccttaacaaccataattatattaactcgtgaactataatttgttaacaaccaaaccatttaattataagaaaaagaagcattgcaatgtcacatagccaacccatatccattggtggtagaaatagaaggtagtaattttgagaatatacttttaagagagggaaaaaagaaactaccaaattaccaatatttagaggagagatttacacacaaaaacaaattaattttcctgtttgaacattataaaagaatatatattatacatttcacattgacaaaatttgttcaaaaataattttctatgtttctcatgttaactcgaactcaaaaataccccaaacccaaccgaacccaatccaacccaatcaaacataaacaaatcaacaaaaacaaaaacaaaaaatcaagaacaaaaatgaaatgaaggactcccccgtccattgaaaaataaacaaaaataatactcgcagaccaaaactctctaaagtattaacgcaaatacaagcaaagacaatgttgagacaccaattcaatccagctacaaaattcaggattaactacagattcagctaaagcagcagcgctaaacccaccctatttcaatcatgattgatattataactatatctaataagaaacccactcctctcctgtaaaaagttcattttacacgacgcgtattgcttcatcgtcttctgtcaagaggccccattagccacagctgcagtctgctgctgaactgaatatccatacccaccataaccttgccccccgtgatgcgatccgttccactggttactcgagtctcctctccactgttaaattccgtatagttcaagaaaaatcagtcatggactacaaagaaagagatatgggagacataggaaaatctatcatgacaacataattcaattatgacactatttaaagtagataaacttgagagaaaagataaggcctatctctgggagtgaacctttaaacttgggtgaaaataatgttattttaatatgttataagattaacccaggaacaacatgcaaaagcatttttacctgcttgtttcctggtgtgcggccccatgaaagacggaccgtttgcttgccaattacggttccatttaatgtctggattgcactttcagcactctttctgcaaatacaaacataatgggggtcagagtctagtaattttagagttacgtatgcttgcggcttatagaattttcatgctgatcgaacaaaggtgtgttgtatcaaataactgctaaccagtagtcatgacataaagattacaagggtacctattagcaaactgtacaaagccacaagcttttccaatgggaattttcacagagacaatttcaccaaactggataaaaggctgcctgaggtcctcatcactgacatcagcatcaagcccaccaacgaatatctgaaatgaatatcagattagcaaatcagagatcatttataaaagatttaccacggaagacttggactcacagttgtgttatttgactcgctgtcagattgaggactttgggatacgacaccatttgaaccatgtccaccagccaataccagagctaatgaagagagaaaatgaaacaaaattattctatcactacaaatgaatgtcgaaagaaatatacaagatcagcacttctcaacagtaatgacagagagttaaatagatgtctttttattgtgatgggaagaagagcagttagtggagtaatgggaatgaagttgcatagaaaataacataagcagcaagacaagctaacccaaactatataaaaagactagtgtttatcaccaagtgaagaaagaaaaatgtactattatgcatggtattaattcaaaattagttggaaaggtgaacaaaagttaacacttgtccaaagatttagcacaaagaaccaaaagcaaacaaatgaactgttcacctgggatccaatattctttcctcagatgtatatctactaatatatgcattctcaagttgtgaaaccaagagctagaagcaataaaaatataccttgtgaattatattgttgctgctggtacccagatgattttttgggagtagcaacaccgatgcgcatgggtctgcttgaacaatacaccccattcatttcggttatggcccttgttctctcattttcatcactaaacctaacaaaaccataaccctttgaacgaccagtatttgaatcaataacaactttagcagctttaactgatgaaaatctactagaaaaggtttcctgcaatgttgcatcagtcacatctgcagccaaatctcctacgaatatagataaatcagaaccagaatccgatctcttttcacccgcactgaaagttgcccaatttaagcggaagggctgctctgtgtttggcatcgatgtaccattaaagctctgcaaaactttctcagctgcttcacgtgaataaaactccacaaagccatatccctctgactggccggtttgcttgttgcgtataactttcactgagaaaacctgcaaatataagatcaaaactctgaaacttagtacataaactataaataaaaggtacttgagaacagctaactcgacactttctaccatgtccaaatagaaaaattaaaagaaaacataaacctaattagaaagcatttcagataaaatacttcgtgtctatcttctggatgaagtatggactgtgaaagaagattcacaaaataaaattgacataaaagagtgttaaacaacaaacagatctgtcattatttatcgtcgaatcaaaactaaattactcctgcctcagtctcctccccaaaatgataattctatgaacacatattttcatccatctttataatagcaaaccaacaaggctaaacagaa

SEQ ID NO: 56819 - DNA, 767 bp, Cannabis sativa
  modified_base (719)..(734): a, c, t, g, unknown or other
aaaattaaaaaaaaaacatatggaacaaagaaaaataatgaattagatcccagaaaaatgaagccactaatcccaaaattcaaactcaccatcaacaacacaaatcacatatttatatatatacagagagagagacaaagacaaacaaatgaaaaatgttggctcgtcaagctttcttgggcttggttgggtcgagcagctatgtcgtggtggacatcaaggaggcctccgaggaaacacctatagacgcttttctcgagcgagtacgaatcggaggagttgaacccacctgtagacaatttcctatagacgattccctcatccctaatgttctcatcggaatggcaaaccttaggaggaggcgtggccaccacctgagccataatcaagagagagagagtaatcggaggcgttgaagaagaagtagaaggagaagcagaatgaagaagcaaaaaagaaaaaggaaaaggaaagaaagagaaaatgaaagaaagaaaaaggaaaacaaataattttttctgattttttttaattttttaaaatattttaatttagtttttaattattaatattaaatggctcaataaaatttccccacgtgtacacttgtgtacacagtggcaggtctatttggcacttaacaaccaaaaattaacagaaggagtgctgaccaaaatgattgtggagtttggagagtttgttggaattattttaccagnnnnnnnnnnnnnnnncaagtatgttattaacatcctaaacatgaactt

SEQ ID NO: 56820 - DNA, 1466 bp, Cannabis sativa
cgaactttgacatgtactaaattacggctcttggactttcatccatgttagacttttttttactaaaattggaaaaaagtccttaaatccaacaatctcaatagttcaggatgcatttttaacgaccttcaaagttcaaagaacatgatttggtacatatcaaagttctggggataaaattcctaattatataaataaaaaaaataaaaacttatcacttatatatactaatgagtggaaaaataataaattaaacaaaataatattttttatggtgtaaatttagctcgtacaatttttgtactaattaaatttggtataatttttagtaacaaatttatacaccactattaaagtttaattcaattaagatgagctaaaaaaatacatggtattggtgactcctgtataatactctattagagatattctaaatacctcttataacaataatctttcattattttatatacttataaatcaaaagtagtggtggccaatttcactaattttctttgcaatagtttattttcattattgggcagaaaaatcttttaagaaaaaaaaaagtccaaaccactaattatccatttaagctttttctagtgaaatttaagtatgcgtgcaagacaagcttaattatctataattctatatggtcccaatttcataccatgaattagtcaactcaacattcatgttgtctaagctaatacgctatgtggaaataatgtgaaatttaatactagataaaagactaattattagtttcatttaattcattgtgattcaaatgtaatctgcataaaatagatggtctatattctataacaaaaagcaagactgatggaatgaaattatatatatcactacaaattaatatgtatatatggaatatctttaaataaatattatttagtgattgttgttaagaaatttaactataaatgttaattttaaaatattaaataattatatttcaattaataataaataataaaagatatattttagtttttatgtttaatttaattataaattaaaaaatatttttttacactatattattatataaaaaatatctaaatttaactcaattttttttttctaaagaaaaatccccaactatatataatataaaaatgagtttttttaattaaataaaaaattaagtataaaaactaaaaaatttgtaataatacgatcataacaactaactacacgttttatataatttttctaaccacccattcatttttttttttcaaatttttctatatattatatatatggttgggactaatgccctacacgttttgggcactatcatatcatcatggggaattgtatgttattatagtcaacaattaattttcatatttatattttcaaaatattctgaattatttaaaacaactgttatgaataatatagtgttaataacaactaactagtaactacttggt

SEQ ID NO: 56821 - DNA, 2183 bp, Cannabis sativa
  modified_base (1071)..(1073): a, c, t, g, unknown or other
agtatgattttcttccttactttgaagaggataagatgtagcagagcaaccaaggatggaagaagaacttcaagaacctactactccatcaatctcaccaacttgaaatatacaagaagattcaagtgagagctcaaatgaaaagacgccacactttagaagcttgcaagaactttataaggtaactaagaatcaaaatgatatttctcttatgtgtcttttggcaactgtgaacctctaagctaccaaaaagcagttagaagcaagaaatggagagatataatggatgaagaaatagattcaatcacaaaaaatgacacatgggagccaactactcttctacaaggatacaagaaattggagtaaagtgggtgtacaaggaaaagaagaatgctaaaggtgaggtggagagatataaaggaagattggtggaaaaattctatagtcaaagggaaggcatcgactatgatgaggtatttttcccagttgctcgtcttaaaactgttaggctaataatttctttagcagtccaaaatagatggaagatccaccaaatggatgtaaattcttctttcttaaatagtttcctcgaggaagaagtctacatcgagcaaccattaggctatgaagtaagaggacatgaaggaaaagttttgaagtttaaaacgctttatatggcctaaaacaagtgccaagagcttatattactcatattgacaagcactttcaagataaaaatctcaccaagtgtccatataagcatgcactctacatcaaaattaagaatgaaagatatcttgattgtatgcttatatgtggatgacttgatcttcgctagaagacactcaagtatgtttgaggagttaaagaaagatatggaacaaaattgttaaagcatgacaaaggaggaaaagttgatttaactcttttcgaaagccttgttggaagtttacgctacctaacttgtacaaggccggacatttttaatgttattggaattgttagccgctttatggaagctccaataataactcatttgaaaactgcaaagagaatacttcggtacatcannngtacgaccaattatgggctattttattcatcttctaaaaattatgagatagttggatatagtgatagcgattagagtggagacttggacgatagaaagagcattattggatttgtgtttcttcatggaaaacatagcatttacttggatgacaaaaaagcaactaatcgttttgctatcgacatgtaaagtcgaatatgtcgttgcaacttcatttgtttgtcatgttatttggctaagaaagttattgaaggatttgaacgtgccacaagaggagccaactgagattcatgttgatagcaaatcagcaattgcactagtaaagaatccaatctttcatgaaataaataaacacattgacacccgctatcattacataagagattgcatgcattggaagaaaagaagtaagagtagaatatgtcaaatctcaagataaagtagcagatatttttacgaagccactcaagagaaaaacaatcatcaaattacgaagtattattagagtcaaaaatcaagtttaagggggtgttgaaatattaagcttgatttaatatagttaattactagaattgttctgttgctattaaagtttctagactattcttttatttactaaaatatttagagttttcttgtttgtttgagtactcttgaactttctagaattatttttcatgtgttagtagtgggaattgtgtagaaaaatatagaagctaatcattcaataatgttattaaattagtccatagagtcctataaatatagatgtaatcctattattttctaccaaagttcttcttatttttcaacaattgctttgttggttgctatgtgaattttcgttaaaataccaaaaaaaagctacttttaagcgtaaaaatgaaaaaataaatacatggtgtagtataggtttgcttattgaagcttagatcatcaatcgtcctgtctaaatataagctcatgtgactttctctactattatctactaacaagcaaagtttaaaacaaaaaaataataagtaacaaataaattttatgaaaaaaaaaaatcaacacaaaaaatattaatatcatatgtatgctcgtataatcttctacactattatat

SEQ ID NO: 56822 - DNA, 1655 bp, Cannabis sativa
acttgtgagtagatctgagatcctcgtaaaataatttccaacagctccctctcccaacacttagtcaaattatctatgttggagtttgactaaaattatttatttatttatttatctacatttgttaaggtatcatttctttgagtaattattaattgttggcaaaggatagtcttggtgaccaagttttgatgagtcttcttaaggaagatttggaatgtcttagtccctaagttatcttgatgtccaagttttgtaactttataaatatgtattttgtgtgagagagaagtatgtctggggagaaaaatagtgagttgtgaaaagagaagtgtgtgtgagtttgttgtgtggtgagagtgaggaagaagcaaagggcatattgggattcgggtggagagatttagaaaaagagcatatataattttaaagtgataagtgaaatatatttctctttgtaggttttgtagttttaccaaactgagtaaattattttgcttcgtttctttgttatttcgctacacttgaaatttattgcttttcccaacaagtggtatcagaaccaaggtccagatcaataaagaaaattttaaagatggtgtcttccacaaaatttgagatcgagcattttcatggtaagaacaattttagtttatggcagagcataactgaagatttggaggatttgcaggcaaaagcagtaagcactattcgtttaagtttggctccagaataaaattatagtgtattgaatgagacatgtccatctgtgttatggaaaaaattagaaaagctttatatgtcaaaatccctaacaaatagattatatttgaagaagcagttatatgaattaaaaatggttaaagggaaagatgttagggatcatataaatatatttattaagtgcataactcaattgtgaagtgtagaggtcaaaattgatgaagaggatcaagctattatttttttggtgtctttaccaaaatcatatgagacactagtgacaacattttttgttggaaagactactttaactgtagatgaggtgtcaactactctttaggagacatatagtatcaagcaaccaagtagtacgtctcatactgatacagctctagggacaaggttagaagcaagtcgtggtgggagtacatcgagagaaagatatgatgacagaagggacaatcacgctcattcatgctctttgagggaagtggagtgctactattgtcacaaaaagggacatgttaggaggaattgtgaagagttgagcaagcatcttgaagcaaacgcatcaagaatgcaaagacacatcagattccacaaatgttgctggtgaaggctttgaaagtgactctgatgttctctcagtcatagctgatgaaaacttttctaacttttggattttagattctagttgtttgttccacgtgtccgtataaggattactttgacacttataaggcatatgatggttgtacttttttgatgggcaatgattctatctctaaagttcttggaataagaactattaaggtgaagatgtttgatgatgttgtgagaacactgactgatgtgagacatgttccaacattaaggaggagcttaatctcattgggagctttagatactcaaggtgttggaaattattttac

SEQ ID NO: 56823 - DNA, 953 bp, Cannabis sativa
atgcatggaaaaactacgtacctgcgagagtcatgttgaattttatgtggcagacttcagattccttgagggaatgctgaagttgcactaaaattcaagcaatgactttgccttaaaagaccaaagggtgtgaaacatcactgggcgtgtgatagacttcaagcagtctttctctttcgggaatgaggggtgaagacgtatcgaacccccagtgatctttcatgcacaaaaaaactacgtgcctgcgagagtcatattgaattttatgtggcagacttcggcttccgcgaggaaaggctgaagttgcactaacattcaagcgatgacttcgctttaaaagaccaaaggctgaagttgcactaaaattcaagcgataacatcactgggcgtgtgacagacttcaagcagtccttctcttctaggaaataggattaaagacgtatcgaacccccaatgatctttcaaccaaaggtttggcaaagctaaaaaatagtcctcgtaactggccattccacgtgctccacaacttcaaggaacatgtataatttggtatggttctgccctaagccagtaaatctggcagtgctaagaaacgcgctctgggagctcgagatcaacttattcttcagggtgatctcagggtaccccgttgtttgggaattgggatccttctaggcttgaccttccgatccaacactcaagataagaactcagggcgagataataactcgaacttccaacatcgtaaacgttcctccagtagagatttctcaattggtttataatgtctcgagttactttcttcgatgtaacctcatgaggtatagttacatcgtgatgtcaaaaatctctgtcagataccttcactagaagtgatttgccttaactacacacttcctaccaacagtaccataaccaagcctgactagagacctagcagacttcgatgatgt

SEQ ID NO: 56824 - DNA, 817 bp, Cannabis sativa
ttatgtgtatatttcatagaatagtacatatttatatacaaagctaggagactaaatatctactaaataattcttttacagctaatatacaactaatatctaacatggggttaggctttaggcttctccatgattttaatttggctatgcttgctaaacaagggtggaaatgtttggtatagtctaattctttagtttttaagatttataaggctcgatattttccaaatggtgattttttatctgcgcccttaggagccaatccgagctatgtgtggcggagtatagagagttcccaaagtctgattaaactagggggcaatgtgatgttgaaacaggggaacaaatgggtatcttaaaccatccttggttacttgatgataatagttcttttgttactatcaataacaagggcttggaaaaccagtatgtgaattcattattatatgtgtgtagtagtgaaagggatgtggatcttattcgagacatgttcaatgaatgttatgcgagattgatattgggagtgtccattagtttttctattgaaattgattactgatattagcgtggagagacatcaggtcattactcagttaagagtgcccatcgaatgcttcaagaacataaagaagtgtgagggagcgctaataacttagggttttagatgaatttttggcaactaaagatacctccaaaggtcaaaaatttattatggagggccttaactgattgttttcccactcggatacaagtaaaaatgaagcatgtagttgttccttctgtttgtcctctgtgtcaaagtgctacagaaacgatc

SEQ ID NO: 56825 - DNA, 797 bp, Cannabis sativa
tgtaatgagttataatattaattgctttgtaacttcttttagttgatcacaatttggtgtaataaaagagatattacataaaattgatgataggatttaaaaaatatgaaatatagttgttacaaaatatattaatactcatttatattagagaaagaaaaatttacataatagaccaaaaaattaaaagaaaattacaaaagtacattaacacaaaaaatttatatttttactaaaatttatatttttactgtttaaacttttttatttatagaaatacctctacagtaaaaataatgaactacttttttgattgttttataatttatttattgttttctgagcaaagtgtatttctgtaattttaaatatttacaagtgtatttttgtatttaaaaattttaggccgcgaaattgtaaataaaacataaaaaaaatatttttaaaaattttcctaagagaaatgaggtggtgtgtgtgaatcataagtgtgatcaccaaaactatataaaggagtctaatgtacacatttgtgtggactagttttctatcaaaaaagtactttgttagaaaatcataaggcttgatatttctcaaaactattttctagagagtcccctcagggcttagagatagggaaaataagcttttggaaaaagtctaataccttgttcaagtcatggtgattcccactaatctacactcaaggttgtgagtgggtgtatttcttgtatatatgtattatattacatatagttcatatatttgtattgtaacatatatttaatcaatctctt

SEQ ID NO: 56826 - DNA, 1850 bp, Cannabis sativa
gtatatatatatatccttatgtacgttttatgaaggagcaagtcttagaacttagactaattaaaacactggctgctggttgtgcttataaaaatatatatatgtgccttataagatatgacaattgatcagaaacacgttttcatcatatgttaatattaattatgtgtacttacaaaattatcgcatgcaagcaacctctaactttgagctagttacgtaattagaacagttgaatcttccaaaagtaaaacttatgcaaaaaggttttcaattaattaaccaatttaaatctaaggatgcttctgattataataaactgaaaaatataaaaaataaataaaaatattatagctagctaattgaaaagtataaaatttaaaatgtatatagtgatatcacttggctgccaccctcaaattaatcatataattaattagttttgtttaattagcaatttaagctttttcacctacttaatacctccttcctctaatttggaggactgactttgtctttaccctgctagttttttatattttaagattatgccaataccatattcttaaatttgaattctttctacttgcctcgaataatccttaccaaatcccctacatctaatatttatttttatttactcatttgaagctgtatatatatagccaataaagcccaataacattctaagctatgatacacaaataattagtaatcaagcaatatggctatgaagaatgtttttcaacttttcctagtagcattattacttttgttactaaccctaggcagcagctccggacaaagtattatttctactaattcaggtgagtcgtacttggtctcagatggcatctcatcaagtggccggaaaccgagtttgatctctctaaaccggttttcgcagtctaataactgccacgagtcgtatggattcctaccatgcaccaccactgtgctagggaacatcttcctgattgtggtgtatggctacttcatgttcctttcggctaagttgttgtcccatggaagtgagttcttgcttcagattcttggacctggtatcattggtggtttccttcttcctattttgggagcctttcctgatgctatgattatacttggtaagcttttaattctaatcttttatagcctatatacattcacatgcaactatatagcctattattttttgtatagatttgttttttgacaaatatatgtataaggtaaagatcatatattgtgtctgtataactgtttgtacattttaattagtttacttttgaagttagatctgcttttgttggatgcacatgtctgtgtatcttctatcaatttcaatatgtttatcagagttggtttgagggaaatacaattcgtagttaatatatataattaatagcatgttatatctatgttttattattttaattaaaaaagtttcgtaaattatttctaatctgtctgtatatatttgttgcaccaagtcaagttgttgtctttgtttgtgtttcgcttattttttcataatttcatcaattaattaaataatgccacaaaacaataaagtgattaatggctatgctaaataaataaataaacggctatacaaaataaatgaatcaactgattaattaatgattctgtaaagttgaaaattacttattcaaattaataagtgattaattaatggaatattaatgattctataaagttgaaaatttattcaaattaataagttaggggcgatagttactagttgagaaatgttaaagggcaccagtggtgcctagtaccctcctatatgtcaatatcgttattgctctaattaagtatcgggtcccata

SEQ ID NO: 56827 - DNA, 2258 bp, Cannabis sativa
  modified_base (493)..(500): a, c, t, g, unknown or other
taagaggagaaaagaatggagggagtaaaagaatgtggatttggtttaaatacggaaatcgaggtggtggtgggaatgggattactactactactgctactgggtagccgcccttttacttgctctgcttcttgtttttttcctattgtaatactaataaccaaccaaaacgaataataataataatagtaataatcatggaactaaaatttaggaagaggatcaaaataaaataagataaaacagatgaaaataatactattaaataggatttattttatttttttttttggtaaatactatttggatcgcaaaagttactaattacactctctgttttactaaatgacaaaatgaattttgtattttttaaaattgtacaaataggatcatgaaatgatttttttttttttatcaaaataaaacttaataataatctaattataacaaactggttatattttttgtaattgtcttaaagttagttatattnnnnnnnnaaattgttgaaaattgagctcatgatcctatttttactattttagaaaatatagggtgtattttattatttaacaaaataaatggtctaattaataattttggtgcatatatcacactaaaattaaaaaaatttgaatttttatatttaatttttttatttaaaaaaatctcttattttttatttttataccatataagctgctgaggttgttctatagtttatttttataagaacatatttttaattaagtagttaaattaatagaaaaatttaaattttttttttattatttattattgatcaaattttattgtttaatatttttaaaattaatatttttaactaaattcatttagtaactaatgggtaatcttatcaaatagtgttccttatatattatatataaattattgatgtgtaatcgtgttcaaaaataagtagaaccattgtttattcaaaagaaataaataaatgattgttatttgttaagacaagcttaaaaaaatcattgttaagagttaagacaagcttacgtaatgaaaatattgccttaaaaaaataaaccccatattccattttccttttgtaaaatttaatattaaataatcagtccttacaaaaaaaaataataaataatttgaataatcagtattagtaagtaacgccactcacatgactcactcttgccaggatgtttggagaaaatttccttcctatgtgcttaatttattgtcatatctttcaggaaaatagtattttttttttctagaacttttgaaaattagtctcagagttaggtcttttagaattataggtatgttttacaaaagtaataattggtaaaatggtctatttttggaagtcatttctttctagttatgaaaattattttaaaatagtctctaactaaaaacttgactagacatcgttttcaccatctctcttaatttttaaactaactgtgtgacgtatttcgaccaattctctaaagtattggataccattttgcacaaaattaatgaacctaagaaagcaaaatgtaaaatatggctttaaaaatgaattttgctaagaaatcctttaccaaatataaaataatgataggttttagaaataagtaagttatatatatgttaaaataaaaactttgctttgagtttttgctattgttatgatccatatatatgcacttgttattatgtaccagagaactgtttagttcatcttgtttatcacagtgcttaaaactattaattaggcaagacatagttttgtttagcataaaatgaatttgggaagtactcaaacctatttgttgctattttcaaaactcatgacattctctagttaaaaatgactttattcattgtcgtcatcatgctgaattttaatttctaacagctttatttaaacttaagaaagatatcatctattcaaacattcagaaatttgaacatgagatttaatattgttcacatacatcttttgtattataatcacctcccattcatgcatgcacatattattttttacttgtctttcattcttcaattgttccccaagaaatacatgaaacaatttagttcaaaaacatgtctcaataatgcttcttacaaaagtttgtttaacctaaccttatcatcatattgctaaaccagtctaccataaacagaacagagagggtttcatggttactacaaataaatactttgtctttgtcaagtcttcgaagatgttcgcttggggtgttagtcat

SEQ ID NO: 56828 - DNA, 715 bp, Cannabis sativa
acatgatggtggtacaaactcgtaatggcatgatcgatccaacaaatccaccagtggtggatctcacactacaaaaccaagaaatgcaggggttccaccagccacgaatcctgaacaaccaccaaccgtgggtcatggtgtgacgtcccctttgaatggaatcaccaccggtgtgcaagagactggaaataccaatttgccatccaatctgggtattcccaatactggagttttgccagcagcaaatgttttgaacaaccgttggagatgaacccgagatccagaaccttcgtaatgctcttggactcctgcaaggccatactaatactttgcaccatgatcaggaagagctccatgctacagtgaaccatgcatttaaagagcaaaggcgtttgttcgctgaatggagggataaagaagtggaaacattgagggctcaacaagcagccattgacgatcaataaagacaggccaccgtactgatactaagagcctttcaaggtactaatcagcaacctgtggccaacatccctgggtgagtcagacgaagatccaactaggaatgcttctttgactctgaacggtcagccgccaaatccccggtcacaggttttgcatgtgggccaagctgtaggtccccagaacttatctagtaattcatcaagagaagttacacctaataactctacccaggttaatggtttcagccaaatga

SEQ ID NO: 56829 - DNA, 1176 bp, Cannabis sativa
ttattttttggttgttttataatttacttatagttgtattataattgtcttgaagttgtttatttggttgtttttggttatagtttatttataattaatttatagctatcatgaggttgatttctagttacttcttactttttgtgagaaaaacgtatttttgtaattttaaaactttaaaagtgtattttataaataaaaactttagatagtaatattataaataaaagataaaagagtatttttaaaaatttcccaaacttatattatttataaatatttataattgtataggatttaataattatgtttcctttttttctttacattttttgtattatagtatttagggacagtttggcatgtgctgtgggaaaatgcagttgtagctgtgtagtgaggaaaagcagctgcagtagaattgtagaaaaaagctaagttgagtgtttggtaaattataaatttcaaagaactgtgagttgttaagatctattataatgataaggataatgttataatctagtttattataatcacaaatatgtaaaaaatttattttatataatattttattttttatatacttttaattttttttgcaaatataaatttagatgcatttgataaaaataatttatagtatttttatattatattttatcaaatataaaaaaaaattagaaactcgagtatataagaaaaattctaggttgatgttattggttaatattaaaataaaatataaattattttttaaaaataatagatttaataattatttattttattataattagtttattttaaatatttttatttttttagtatataataaataagtaaatatagttttagtgaaaaaaaatattatagttttttaatcaaaatagctttttctaaaagtttggttggagcagctgtagcttctctaaaaattcttcaaaaagttgttttttaattgcttaccgaatatatttttatcacaactttttcaaaaagtagcttttaggttttctaaaagttgtgccaaacgggccctaagtgtgtttggttgggagtaccaatgaaaatagtagaatttacgtggggtatgggttttttaaaccttttatgataaatatggcataattgattatggacactttatatggctttttttatagtttaaccatagtt

SEQ ID NO: 56830 - DNA, 1760 bp, Cannabis sativa
caacagggaagggacacgtaaaaacgctaccagggggcacacaacgaaccaccctcaagggagaaggacgggacgtgaagaagcgagtgttaccacagggcgtataagaacccacaatcgatcaatgcaaggaggagaaagtacttgttgcaacaatgatcgagaaagcattagcacaagcaaagctaaaagttactcaaggacgaggtccatgagcaggacaaagttcgtgagtaggatgaggtccgctagcaattataaccaaccggatctacgagaacacttgaaccaaaaaaaaccttatcttcgccaacagcttggtctaaagctggggatctaatctagttgtgaatagatgagttggaggataatcttaggaggtatcaagtcggggagtaaggaaaacaatctggatatgacttagatgaggaactcgagccattccatcaagacatcagaatactccttttccctagggattcaaaaacccccacgtctcgtcatactatgggacaactgatcttgtctcgcatttaaataatttcagtactataatgtgatatggcaatgttacagacaatctaagttgtatttttttcccacttcaccagctagagcagcaagtagttggttcaataagtttactcatcattcaatcacttcctgggagtagttgtctaaggacttcaaaaagtaattccaggttgcaagggagaggcgacccgaggtgtcctcactcaccaacataaagcaacaacctggcgagatgcttaaggcatacttaagtcattttagcatgactgctgcgagagtgagaaatttggatgatagtacccagcttactgcccttcaggcagggatcactactgatctctccactactaaaggcaaattatgggatgacctacagagtcatccagtgaaaacctccattgagttcaatgaaagggctgtgtttgttcgaaaggaagaagcttgaaaagagatggacttgttaaaaactagctaaagaagcaaacccagcactatttcaacaagtatcgtctcgaccaaaggtgataacccaggagcctcaggttcaaagaggaatgacgactctaaggggtcagctaaagacaaaaggaagtaaaagaagaaggataagtacgtgttaatttacaccatttacaccgagctgaatgaaacttgagaaaacatccatctctcatgagcacaaggtcagatttggtaaacttgagcccatgaggcacgcgaggcatgaaagagatccaaccagatactgcaagtaccacaaagacatcgggcacacaatacacgagtgttgtcagttgaaggatgagatagggagtatcattgcacgaggccattttcggcaatatgtgaaaagacagggcactggacataaccagcataatctgcccaacaacctaggcaacaaaggattacaacctcctcctgtcgaaggagaggatatcatggttatctagggagggcgacatattataggagaaagcaataatccccaaaagaggtatgtgaaggaagtgaagaacaagcaatctacctttactccagaaccttccaagaaagcaaagactgaagaacctccgattatattttcggaggaagatgaaaaagacgtgaggtatcctcacgtcgacccattggtaatcaccatctagctcgctaacaaaaggataaaatgctcgctcatgaatactatcgtatagagctacagcacagaaaagctggtcactagc

SEQ ID NO: 56831 - DNA, 1106 bp, Cannabis sativa
  modified_base (27)..(52): a, c, t, g, unknown or other
tatgatatataatccaattcaatatannnnnnnnnnnnnnnnnnnnnnnnnntacggcgttccaaacgaaccctaacttaatttttttaaaattaaaacttaataataacctgacctaggtattatgacaagattagttatactttttacatctattcatgctattaacgggtttcaggttacttattaaaaaaaaaaaattgacataaattatgtccagggtctattttgtacaatttcaaaaaaaaaaacatagggtctgaaatgtcatttaacaaaataaaaaagtccagttggtaatttttacaaaacacgagttccaaaattatatttacccttataaagtccttttttttttacaatttagttgtcaaaatattatttaatttattttgtattgttgacacaaaaaagtggccaataatcgcttgctagattggggagagaaaatagaagttaagtagtgtaaatgagagacacgagagatttatagtagtgtactccctgtgtcgcgataacaatagacatacgtctacttcgagtttttattgctcaagataattagaagagaagtgactaaggcaagtgctatatatttttagagagagacgctctaatcttatgggaagttgtgaaaatatgaaaaatgagctagtagagctatcctttttatagagaataaggtcctattaaaataataataataaaatattacactttgtcaaaaatgtgaaatatcaagtgtgaatttaatttgtcacaagtcgtggccatcatgatgctcgaggcagaatcaaaattggataagcagaatcaagtgcaccaagctatatgtcaacttggacattaggtgttcctcgaggacttccgaaggctcgttttgacacttctatggtattcgagattgcaaacaagatctcctaccctgtttttgaccaaaataagaagaatgccctgagcagaatttgtctttgaggagcaaacacatgagaaccaagttgtatgtaaacctaggcacaaggcccagcacccatgtcaacctgggtgttgggggacctgttttggctcctaaaggatcttctttttgttaggaattattttaccag

SEQ ID NO: 56832 - DNA, 1213 bp, Cannabis sativa
aaaataacctatcaacttaaattattttataaataaatttttaagagtaattattacaaaaattactactaaataactaatgaaaaattacatacttaaaataccttttaaaatttatacatataatatataaataaaattagagaattgaaaaatatataaactttatttatatattatattaagcactataaaataatctttaaacaatgtgggatttatgtttaaatcaatatttaaacaatgtaaaacttttatttaccattacatgtgaacaaaataagtgatgtacataatatatattttttttatatataaaaaaaatagaaactctcttaaaattaaaaaaatagaataaaaatattatagaattccacatcatcactctaaaatttagctttatatagatacatagatagattgatataaattctttaatcacccataaaaaataatgtaacgcattaacattaatttcatgatttagaaacgcaaaaatatatattgcattcataaaaaaaaaatgtactataaacaagactaaattctttaatcacccataaaaaataatgtaacgttaattttgaaattttattttaaataaaacttactcatgaatcaaatcattgtataatatatagaattaaaaaataaaaaataaaaaactaagaaaatagaaactatgaaaaaaaaaaggtcatgtgcaaaaatatataaagcattcatcaaaaaagatattataactaattgagcaagactaaattcttgcccatagaaataatacaacactaatttcaggacaaactaaagtggaacaaatagtaaattatatataggctataacacaacactcacaaataaaacttactaatgaattaaatcattgtataagatatagtattaaaaaataaaaaaataaaaaaactaagaaaatagaaactatgaaaaaaaggtatgtgcaaaaatatatattgcattcatcaaaaaaaaatattataactaattgagtaagactaaattctttagtcgcccataaaaataatgcaacactaattttgggacaaactaaaatggaacaaatagtaaactatatgtaggctataacacaatactcacaaaggtttctaaaccatgtgggatttttgttttcaataaaacttaccaatgaatcaaatcattgtatgatatatagaattaaaaattattaaaaaaa

SEQ ID NO: 56833 - DNA, 1199 bp, Cannabis sativa
accattgatattgacttagaaagatataacagtaagcttttaaatatcttatccaagattaatatcggtctcttccaatgtatacttgttaacgcagatttttgttcagtaattaataagcctttatcgtaataaattagatacagaaactataagaaatttgagaaaaataaaataacaataatgacactaagttttttatgtggttttgcagttaactcttcatagtccatgagtctatcttattaagatatttttggatatagaattatggtttaacaattagtgatttcttttctctcaaggatttttgtgtccctttttctgtataatcagcccctatttataggaatataggttggcagttatttacatttgaaatagaaatacataactgtttccacgaaatgtgggctttgaccacgtcccattttaacacctgtatacctaaaaaaacgcataaccatttgttattcttatatttgaagtagtggatacggatgtgggatagaagcatctcgttagaggcatgtcactttgtacatagatgaatgactaggtttatacgtattctagcaatggcatgagcaccagtgtacagagcaaaattaagaactgcactttgattataaggccttgcagactggacaatcatgtcctccatgttatcaagctatttcacttagtcattataacgtgaattatacgctaagtgttccaacaaccaatttgcctcgtcgatactttcttatgtgtagtgaggtagatgtttcactatgctttttctgtagctccctcaagattatgcctttagaagcacaagatggttgtttcttctcgtcaatacaagaattgatagttagtgtatcgttgtgtcgcttaagactatacagtcagcgagttacgaatatactctatttactctatatttaatgagttattctatttttcatttaatgatataatcgttattatatctgttggttcacatttcacgagattgacatgtgttactttctcaagtacaaccaaatttcaggtataacaattgccccttaaaaagttcttttcaatgaaaagtgctttttaaatgattaccgagggtatattcatcataatccaatttgaaaaaattcatgctttttagtttggtggttaattttttttaagcacagcattagcattaatgagccatcatt

SEQ ID NO: 56834 - DNA, 3097 bp, Cannabis sativa
  modified_base (29)..(68): a, c, t, g, unknown or other
  modified_base (3040)..(3054): a, c, t, g, unknown or other
ttaattcatcattttagaaagttcatatnnnnnnnnnnnnnnnnnnnnnnnnnnnnnnnnnnnnnnnncctggtaaaataatttcctacaatgagatcattagcaaaacataagtttatgatgttgagactcttacacattgggtaaaatctataatctgacttcttggctgccatttgcggcttcctagttaaaaactccattattagaataaacagaagaggagaaaggggatccccttgtctcaaacctttcttccctttgaaactgccttgaactcttccattcataagaattgagtaagatgtggctctcacaaaagtcattatccatttgatgaatctagcttgcaatttataggcatgaagaagctcctccagaaaatcctaatttaccctatcatatgctttgctgatgtcaactttgatggcacatctaggagacacgttcttcctgttgtaattctctaagatgtcttggagaatcatgatattgtgagcaatcgatctccccagaacaaaagctccttgattctgattaacaagaatgggtagcacctgagcaagcctaaacacaataatttagaaatgcatttgtagaccgtagagcaacaagcaatagacctataatccactactttagtaggttctcgatcttaggaatgagagtaatcattgttgcatgaagctcctttggcatgacaccattgttgaaaaaattttcaatagctttgatgaattcagttcccaaatccgcccacatcttcttgaaaaaacaagctccatacccatcaggtcccgacgcttttgagttaggtatactaaagaaagctttccttatctcctttgcagtgaatggtttaatcatgttcagctgtcgttcgacattcagccgattgccttgctcaatacaatctttccgtagcctctgagaagttaggctgctagtccccatgaatccctgaaagtggttcataaaatgtttcaccacttaaggaaacttctcaatgatatctccatgatcattggcataagaaactatactgttctccatccttcttttttcaaaaaggcatggaaaaaagcattattctcatctcctttacaaagccagttcacttttctccgttgtttcaagaagctatgatacatgtgtccttgatcatgaaaataagttgttgcctctttctcgcttaattaaagattgagattgtgcctatgcatttgagcttccattcttgcttccaagtattgagttttagccgcctggtagcctttccctatgtctcctattgactgcttgttgattttctttaatttgtgctttaatctcattaacttcagatataatgctctcatcccctctgccctaactggtttcgcccagtcattaagtacaacattcttgaaatcatgatgatcaacccaaaaattgttctagctttcttaagatcacgatcaggacatccatgaatctaataatgatttacactaagtacccaaccattccatcatttaggcaactactagtaacaaatcatagacatttcactatcatcaataggaaaattaaatgtttggggaggtaggtttgaataaaattcaaaattcagcttaatgatcttcgaactgcatatccaaatatttctccactcctatcagtttgcaagatctttaaccacttaccttaatgatttttcaccattgctaaaaattcaggaaatttcttaaacatttcaaattttttttgtataacgtaaaatctagagtaatcgtattaagaatattacgataactcatatccacccctgaatgtacatccatattcgaatatacatgaacttactttcaagtggatataggcatatttactctttgctaaaaatgaccttgtcaaaactactatgaacaagatgaaaatgccatagatactaaaatgtggttatggtcttttgatgaaaaaggtttagttataacagagagttcatagaatagtccaagtggatcttgctcacaaaatactaaactcatattacatacataaacatatagtatgaatccattgacagaatatggaaattaagcaacttgtgaaagtcatactatattgtccaatgtattctaggaaaataaaattttaaatttctatttgaaatttaaaatttaaagtcaaagacttaaaatttataccaaatatacatgagtaactattcaagcttggaccgccactactaatctaactctaagtttaagttgcctgaagtaagcaaatataagtaggagatttctaagattgaggatttatatcattttaggatagaatatcgggaatatagtcatctgtgccattaaatttcataagagaaattagaatgacatcataagtagatgatttataaactattcatccaatgatataacattaagaaaattctaaatgaaaaatctaagaggaaaaacttaaggataatttcaaattaaataagaattcaacgatgtcccgtttaggggagagtcaaagttattcttattttattaatctcttcattgtttcatattgttaacactaatgtaagttgtcatctttggatgtacagctagatgttgcatttataaatacttatctgttgagatctaacactattatgtctgtcgaacgaattacaatcctttgggattgtgtcccattaaaaacaacaagctaagttagaccaacaacgaagattcgatatttatactacaacattaataacagaaaacaaatatgttcaatataaattcatacacattcagaaattataatacaagtaacatttaagaaagacatgtaaaaatacaaaacaaacacatcttaaataatttctaaggttcctaacaaactgatacagtgtcccgtttaggcgagagtcaaaaataccatgcattgaataaagtagtcaactcatataaaatggatactattctatcaacggtttattcaattgaaaagagaatcttacgttgctacgttttgagtcgagagtcaaggtcattcctatttnnnnnnnnnnnnnnnttgtttcataccttgtaagtcctattcttagcagccactattc

SEQ ID NO: 56835 - DNA, 662 bp, Cannabis sativa
ctcatttttagtattactattgtgctagcctccatgccacatcaatacatatttttttatatatcaattctgtaatactttataaattacgtgaatataaagagcatttatagagctagattcaggtggacaaattatagaaactaataatgctaacataatattattattttttccttaaacccgttagcataataacttagacatgtagtcaaaatattaattttttaaaaataaagaaaataatatttaaaacaaaaacaattgcctttacaactcgattatcacttattacaaatattttacaactaaattgacaacaacaattacctaaccatcaacacaaacccttaaattcgaaaaaaaaaaaaaaaaaagaaagaaaaaaaaacttcttaacttcttaggaaccattttgttagaaaacatgaacataccttaaaatgtttccaaattaaagagatattatttggtatcatgaggcttgtctcatttagtttatgtgtatttattgcttattctctttctattcaccacatgctaatacagacatgtagacttcacatttgttgtactatatgctttaattgttttctttgatacatgattaatttgttgtcttgagactaaaagtatagtaatcaatcttttttatgaaaagg

SEQ ID NO: 56836 - DNA, 1584 bp, Cannabis sativa
attgctgaagtgatgtcgcacaagtttccaaattatgcagcacatttctgatgggatccatagaacaattagttaaccaactattggagataatggacttactgtcagaatcggataaccataatttctcaaagcaaaaacgactgtgtcgtctgtgttgctgggcagtagcttgagtgaaggtttctgctgtaatggctctatgatccgaatgaaaaacatccaagtgagatactgttgtttgctgaaagttagaggaccatatatcatttacaaaacaccagtccaggcgctcttttaaagtgccaggtgctgttctatccttagcccaagtaaagctgtcctcgtggaaaggaggatcatgaagatggcagtgatcgagagcatttcgaaaggatgtcatttgtgattcactacgaagagatcccccggatttgttcgcattcgaaattatttcattgaaatctccaatgattagccacggttgcattggagcaatgtcataaagccgacggagaagaatccaagaatccattctatttcgcacagcaggagctccatagaaggcagtaaaatgaaacttggtatcactagcatcacttaaccatgaatcaaagtaacagggaccaaaagtattgagttgaagaacaatatcgtcagtccatagcagcataagaccgccactaagtcctacccgaggtgcttccaaaccatgagaaatttttaagagctgtttaaaacgatcaagagagttattgttgagtctagtttccataaggaaaaggacatggggagattgctggcgaacaagcaatcgtaaatgtcttaacgctttcgggttccccaatccccacgcgttccaacttaagattttcataatcccttgcgggattacaaagcaatctccgctgaatcgtctgagtcaccatcagaatccttagaagttgaggaaacattctggtgtgagcaatccccttttgacgagagagagggtacagctgtgtgatgttgattacgacatcttttaagcatttgcctcatggtaggcgcatcagtttgccttttaaacatgcgatttggatgaaggttttctttactgctttgagaattagaattagggaacaaagtcggtgctggtatagaggagatgagagatggtgttgtggttacaatagcatgcatttggggttgaggaggaggtgtgtttgacagggtagtgggaggataggtggcataggggatatgaggagtgagtgaagagccaatatcagggataaatatatggtttaggttggtagtagtggagagattagaagactttgggagagtactggtagaagactttgggagagtgcggacgatagcttgctattttgtattgctacagagagctcttgtttggctattaagcgttgtctggatatataccatcaagcttctggccaagtgttgaatcctgataaatctgtcctttctttctctccaaacaccactttggcggctcaagttcaatttcatagagtgctttctatgcctatcagtgaatgccacgaaaaataccttgggttacctgcatatacagat

SEQ ID NO: 56837 - DNA, 1790 bp, Cannabis sativa
ctctctctctctctctctgttttaccttatctgttacaggttcatgttcatcaatggctaaccatttcaacaagagatagtaatgattataataagatattctctcctgtggtaaaacatccatcaatttgagctttgttggcattaacggctatggaggatttaaaacttgagcaacttgatgtgaaaactacctttttacatggtgatctcagtgagaaaatctacatgaagcaaccagatggttttattaaaaatataatgtcctactcagaggaacgccacatgtcgtgattacaattatctaatctcattaatcggagtccataagccaagtgatttaaaattaataataaacttaatttaaataaataactgacaataatataaactttattacaaaccaaaatatttaaagttacatatccgggattccgtaaatttattttcaaaatattacaagtcatttcatacaggctgatctaagcagcaaaataagattttctacacaatttcttgttggacccaaccctcatgatctaacttgggcagaacatgtacaattcatcttcaaaaccctcaaactcatggctaaactaacctcactttactaatacatgcacattagagtatccacgtgccaaggcctagcaagacagagtaatataatacagtatgaacaatcataataattacacttcatacagtacgccattgcgtatatattgtgctaccgcactttacatcacattattccatatataataatgtcactataattaatgtctatgtaacatagacccacgtgttacactcacacagttcttttacatttaaggccttactaaggtttgtcttagttatagttagtgattctaacctatttatgccttatccacataactctacttatatatacataatctatacattatgctttcacagtggttcatcctgatgatgtttatcaggcctaatttggttaaattttatacacataactcttggtatatatatatatatatatatatatatatgcatacaacacatttaacatatactcaactattcaaaattttaggataataaccctaactcgcatattatgttcattcattcacataatgcattattgcatgcttaagacaaatacatatttagggtaataaccctaattcaccatacatatatttaaggtggtaatcctaattcacaataaatatatttagagtaataatcctaacttatagcatatttacttagggtaataaccctaatttttgatatatgtacttagggtaataaccctaattctcactttcttaaaaacaattcaaataacatataattgcgccaccgcgctatactctatgtgattagttcattgttttacttgatttccaaagtatgaggagaaatcccaatccacgggcgatcctgaacaagtctcagttttcctagtcataattccctgagttttacacaatagggttaatcttaaataacatttcataaatatttacaattaggactctaacatcgaaccaaataatagagcttgaaacaagctttccaacgatatataaaacatccaaaacagaattcggagtcaaaaattaacttgaagattcagactttattttctatcacaaacgcaacgtgttaagcattagaatttttcacctattgtatcttacaattttaaaatccatgctaaatctgtcaaattcatcttatttaacatattttctctcattttcaactcatatgatgtatttgactattaaaac

SEQ ID NO: 56838 - DNA, 2200 bp, Cannabis sativa
gctagtagatgctacagctggccttgacatcctaagcttcatggatgcctatttaggttacaaacaaaccaaaaacacccaccagaccaagaacatacaagtttcatgacagacctaggcttgtattgttataaagtcatgccttttggactaaaaaatgtaggggccacctatcaagacttgtgaataaaatgttcaaagatctcattggccgtaacatggaggtttatgcagacgtcatgttggtcaaatccaaaaaggctgaggccacgtggaggatctacgtgaatgcttcaaaatcctccaagagtacaacatgaagctcaaccccctcaagtgctcgttcaaagtagactccggcaaattccttattttaattgtcaatgccaggggaatagaagtaaaccaggacaagatccaagccctactggacatgaggtcgcccgcaaaaataatagaagtacaaagcttaatgggatgcattgcaatattaagcaaatttgttttaaaaaatccacagacaagtgtgttcctttcttcaatatactcaaaggaaacaaaaaatttgaatggacagaggagtgtgaaagatcattccaagagttaaagaaacaattagctcaacctcctgtcatatcaaaacctctagacaatgaagaactaggcatatacttggccataacagaatatgttgtgagtgcagtcctgattaaagaagaagatggcatccagcatccagtgtattacgttagcaaaaggcttattgacgctgaaagttgatacccactgatggagaagctaaccatactcttcttaggcatcaagaaagctaaggtcgtacttccaagctcacccaataaggttgtacactgaccagctgtcgcgacaggtattacagaaacctaaagcgtctgactgattactcaagtgggccatcgagctcaggaaatttgaaatcacataccagccatgaatggctataaaaggccaagctcttgctgactttgtcgctgaatgtacaggcatatcccctgaaatctctcaagatttaagacaaaagcgagaaccacagaagaagcaagagcacaaagattaagcttggaagttacatgttgacggaagttgtactaaccacttgtctagtgcaggcattgccctcattacacctaggggcaacagtttcacgaggaattcaatttaggttttaaggcctccaataatgaggttgaattgaagctctgatttttggcctcaggctagtacatgatgtaccagccaaccacctagacatatacaatgactctcaactagtcataaatcaagtcctaggctagaatacagtctgatgttaaggaatgatagcctatttgagaaaaatccaagacttattaagtcggctcaaaggctataccataaggcaagtccctagagaagagaatgcaacagttgatgcactcgcccatctagcaagtagcaccttgagcgataagtcaaatttggtgcccatacaaattttgaaagaaccgattattattattcaagacgaggttgacatgttggatgacagtccaacctagatgacacatatagcagcatacatctaaactggagtcctacccgaaaatacaaataaggcaagaaaggtgaggaggaaagttgctcagtatttaatcctatatgaagtaatgtatagaggaggtttctcaatgtcgctcctaaggtgagtcactaaggtagaagttgagcaattattgatagaagtgcacataggcttctgtgacaatcatgctgggggcaaagcctgtccaaaaatgtgacaagtgctagagattctcaaagatattaagagctccaccaaatgaacttacactaatgcagtctccttgccccttttctgtgtggggaatagacctcatcggtcaactccctaagggaaaaggaggtgtacaatatgtcgcagtcgtagtcaactacttcactaagtggatagaagctaaaccaccgacgacaataatttccaagaaagtcctcaactttgtagtcaagaacatcatatgtcggtttggactgccagagaagattgtgttagataatgggaaatagtttgacaattacatgttcactaacttctacaacatgcacgacatcatgaggagcttctccactgttgctcattctcagacgaatgggcaggtggaag

SEQ ID NO: 56839 - DNA, 3118 bp, Cannabis sativa
tattttatacaattttacacttttagtcggtaatatttttcacgtttagtagtgaataagaatagaacaaatttgagaaaaaattgtgcaaaaatgatgaatttaaataaaaaattattgctagagcacaagagatcaatccaagaaaaattcaaaagatttggtgtgattggagcttttaaggttaaagaagtggagagtgtggagtagagccttggcatagaaattcaatgccaggaccctaaaaggaaaaaaaaaattgttaaaaaggtcgtgattttaaagtctatacgcaggcctcaacattgggattcaatgttgaggcatgaggtccttacttgccctctcctccaaattgagcttcaagggctgcgacattggattttcatgtcgtgacccgccttcggtttttggaaatttcctgggaatgtgaaaaaacatgggccgcgacatgcatatccaaggtcatggaggtcgtggcccgcctacatgaactggaaaattttaagattttaaccgtaataaaacgctatgaaaaggaaccttttgggacttttggaaattaacaattattagggacaaaaattagaccaaaacgcggttctagagacttccatcaacaattttttgatgagttcttccttcttctttattttcttatgttctttattaattgttgctagttatttacaatgaatatcaatagttatactttcaattaaggttattagtggagattggttgacactttattttagtttaatgtgtttcaattctctataattgtctttgtgtatcaatttcatttgtacttaattcctttttaatttcttggccaccaattaactttttatattttcattacaaaatctaagaagagagtattgattatactatagtgaaatagatataggtttcgatataggacaagagtacctatatggtttgtgtagcagttaggatttttatgcttaatgccctctttagtgtttaaatttatcatgagagaaattttgcatatagcttcaaattatatgtcctagcccgaatataagtttctttagtaagttcgctatcacatgaaaattagaatttgagaattaacttatgttaaaccatataaagtaaattcaatcaaaattaattttcccaagctttaatcattgttttttgtattttaatttatttgttttatttttagtagaatttggaaatcctttcttaaattaattgtcatcaaatagaatttaggaatttaattgtttggtaattgactacagttcacgtgagaacgatactctatttacaatcatattacttgatttggctacgtatacttgcatcccataattttcataacaagtttttagtttcattttcggggactgttttagttaatattaaatcaattaaattttattctaatttggttttctctttctactatttgtttacttgtttgtgtcaattttcatctttttttcataaataggtagtttatgtgacgttaaggacaaattggatgagggcctttgatcctaaaattgagaagacctataggaaaaatagaagaaacaagaggttaaaaagagatgcaataaggattgaattcggagaagtcatggctcataatgggaataataggggtgtagaggacaaggataatgtccataatccacctggaagaagcttaagggattatgtgcaacccaccacgattggggtccagtcctgtataagaccacctcccactgaagcaaataattttgaaattaagtgagccattcttcaaatggttcaatccacagtccaatttggggggactcttgttagaagacccaaacatgcatttagctaatattatggagctttgtcaaacattcaagatgaatagagttagtgatgatgctattcgcttgaggttatttctattctcactaagggagcgagtgaagagtttgttggtgtcattgagacctaactcgatcaatacatagggtgaattggcactaaagtttctctctaaattctttcctccatcaaaacctaccatgctgagaggggagattaacaatttctaccaactcgacaatgagtactctatgatgcttgggagagatttaaagacttgatcagattgtctcgtcaccatagaattgaaaagtagatgttagtccataatttttacaatgggctgggcagtactactcgcactctcattgatgctgcaactggtggggcattcatgagaaagagtgccaatgaagcctatgaggtcttagaagagatggccatgaacaattagcagtggcctagtgaaagcagaaatttgaagaaagtggctagtatgcatgaagttgatgcaatcactaaactgacaactcaagtagaagccttgactaagataatgactgctcaagttcaacaaggccaagtgatttgtgagctatgtggagggccacattcatatgatagttttcaggttgatgtaaatagtttgccaatggattgagctcaagctattgggaactatcctcagaaccaaaattataatcaacagaatcgtcagcaacaaggtctttcaataaagatacatgcagcaacgatcccaacaatcacagcagccccaacaatctctatatcacactcaacaagaacaaagtttgggtggaagttctattgttcagtctgatcttttactccaattcatggctaaagctaggtattccattagaaccttggagtctcaaatggggtagttggctgctcaaatggccaaccacactcaaggtaattttcctagtactacgaaggtaagcctaaaataaaatagtaaggcaataactttgagaagtgggaagaattataaagaaccaagtgataacaagaagattgaagaaaatgagagggataaataggtacagagaaaagaggataagaagcaagatgaagagcatcttgcttatgatctgtctagtaaagaaattacacaactaataagcactgagcatcacatcaaaattctctatcctcaaaggctccgcaagaatatactggataagcagttcacaaaatttcttgaggtttttaagaaactacatatcaatattccttttgc

SEQ ID NO: 56840 - DNA, 2140 bp, Cannabis sativa
  modified_base (884)..(888): a, c, t, g, unknown or other
agagagagagagaggtgcaaagaaaagagagagattgggtttaggttttatacgaagaatcatctgtagatgaagaagatgttgggatttataccttaaaagcaagtgattaatggataatatattagagaatatataaaatattggattttgtgtcctaactaaaactctttttcaatgtcatcttcaattttatttatcaataaaggaacaaaattatttaataatgcttggttcacatgtttatttcatgatcatttgtttgaatatataaatttttatcatattgtgattcatgattattgtgttgtctacatagtggaaaataatcaatattatgtgattaaattattagtctcatgatttatcagtacatagaatttacactgatatgataatcaacaatttggtttacttacacttataaagtggtatgccttttttaaggcattagtaaagtaagcttgtattggatgtattgttatacatcagactggaccaatattcacagtagaaaagttatcataaacttatcgtaatattttttctaagtaaatatcacttagttgatcttagatcaatgatctgaatcctaagatggttaggttatagttcaagtgtattatttgtgttttttgacttgtttgttaaagccgaccaattagatcggcccaatacttacatcttgggaacatggtagtacagtagagcgggagcgctaatcattgatataaaatttatagctttaatgaatatatagaagtgaaacgattatttccttcgagcttggctaaatgagattaaatggtagagtactcattttagtaattatattagtttactgaaatatcatttacaaatagctaagtattttaaggataaannnnnttgaagggtagaacgataaatttatcattactcgatgtagatcatcaatagaggatcattaattatttagattgaaataatagataatttatagcgtatctatacttggtatagagcggtctatataatcaggagtgcaatttcgaatctatagtggagttgggatgtaatgactgcattttagaatatggattagtaaaggtaattagcgttaattattaatatttttataataattcatgaatttatttaataggtgactatacaacactctagcagacccaaaacatttaggcctgtggtagtcagggttgttagagaatttctcaacgtgtttcccgaggaattgccgggattaccgccacaacgagaaatagattttgtgattaatttggcacttggagttgaacctatttcgaaagcaccatatagaatggctccaccgaaactcaaggagctaaaaatacaacttcaggggatgcttgatttagggtttatccaacccagtgtatcgccttagggagctccagttctatttatgaaaaagaaggatggttccctcagaatgtgtattgattatcgggaattaaacaagctaacgatcaagaacaagtatctgttgccaagaattgatgatttgtttgatcagcttcagggaaagactgtgttttcaaagattgatctacgatctagttatcatcagcttagaatttggaaagaggatataccaaagactgcgtttcgaactagatatgggcactatgagtttttggtaatgtcatttgaattgacaaatgctccagcgacctttatggatctcatgaacagagtattcaaggatttcctcgataactgtgttataatgtttatcgacgatgtcctcatgtactctcaaatagaagatgagcatgagcaacatctccgaatggtattacagcgactcagggatcataagttgtatgcaaaattcaaaaagtgtgaaaaattgaattagtgaaaaattggtcgaggccaaaatctgtggtggaagtgcgaagttttctcagtttagtagggtattatcgatgttttgcagaaggattctctaagatttctatgccactaactgagctaactaaaaagaatcaaccgttcgtatggttagacaagtgtgaggcaagttttcaggaattgaaacagtgattgataacagcaccagtgctagctttgccatcagatcgagaaaagttcattgttcattatgatgcatcca

SEQ ID NO: 56841 - DNA, 503 bp, Cannabis sativa
ttgaatgtaatgttgactacaagtgagatacgatgatgagaacgattttgaaatcatatgataagttttctataaatttatcattttctataataattcgaggggtcaagcttaacataatgttatacaggtcatgtctggcttccattataataacgagatttaataaatacgagttggatcggtccatttgtacacacctaatttttcatacaaaattatatgaaaaattagatttaaatttgatacaagttattacttagttgacattaaataaaagttatgatatattttatatatataatttaatttttttttaaacataacgcgaagttatttactaattttatctataaccacaatattttaggctgacttcttcttattaaattagagatatatctttttcaaagatacatataacaatacaaacaaatcataaagtattttagtttttttcttattaattgaattacacatatactatattgaggttatagatg

SEQ ID NO: 56842 - DNA, 1212 bp, Cannabis sativa
ttggaaactcgtggattcatttttgcagaatgcaaaaagagaaaacgctaagggtatcatgctatgaaaagtaagaagatggcaatgaaaaaaagcaaaataaagcaaggtgttaaaaaacaaaaaaaaaaaaaatatcaaggaagatactaaaactcttgattattcctttaaataattatcttcagatttaaattcgaagtagagtgaaaaggaaatattatgataataaaatagaaaggatagtttcccaaaaaattaaaatgattaccccattaaattagtgttggctcattatgacacgtggaatttattttgagtaactactttcacaaaatttaagctcaaactaaatcagtcacaatctcaaaaattgtagaattaatgggtaattgtaaatgataaacccatcttaggggtaaggaagtaattcctttcattacaaataaagaagatctgatgaaacaatgtggcaggagcattaaatgtgtttcacttaaaggaagagacagaataggaaagacaaagcttgaaaatcatagaaagcggagcataacttgagaaattagaagcaaagcctaaggaactcgagaaacataagcgagcaagaaaatcgtgaaaacaggtgaggaagaatgaatctatgtggaccaatctgaacaaatgaaaggaagtgaactaacaatgattccaacctacaaatagtaaaccaaatcgttcaaaaggaaggaggattcttgcttacaccaggctaatcaaaattctgttagaatacatcttgaaaacaatctaagctggtgaaactgggaaacacgagagtaataatagaaactaaggggaaattgtataaattgatagaacaatgtatctcaactatgttaaacttggtgtaaagaattttatatcataatacaaatttgttgttgagctaattttcatcatcaatatttgtaacatttgatactttttggtgttttgattataatctttcaattagaatataatttgattgatggtaagtttatttttaaataaaaaatttaccatagtaataaaaattgtaaacaaataaacgaatagttttttatataataaaatcatattaaatataccatttatctaaatgtcaaaactttatcttagaatttaagcttttgtatgtttgtaactgtaaagactcggttttgaccgagtcaaatgtatatatatata

SEQ ID NO: 56843 - DNA, 1039 bp, Cannabis sativa
tatggcatttgtgaaagaataggataaataattaaataaatgacaaaactataattggtgggtccacatcctaatggtcagctacttaagctcaatttagccatttatttatcaattttttaatgtcatataattcaaacctaaacctataaggattcctttaaatagataataatagactcaaaactgacagttgatgcaacttaagccttcagtgaaatctgagcttctctttctctctctatttttgaaaccttctctctctctctctcttaaatttttgtccctcttagtgattgagtacgtgccgacacatagcaagtctagtactaatcatacatagttagtatgaagattgtgaagaatccaacacctgaaggagtatcgggctcagatcttgataatactttgcgacacaaaggaacaaaggttagagatctgagtggaagaatccaacacctaaaggagtatcgggctcagatcatcttacgatttagatttatacttttaaaataataatattaagtgtaccaatatgaatttgacacatatacaaaagtatatacataaacagtctatattgacaactaactgtaaaagatggatgacaccttaaatttgcaaatagtttagtagtttagagggttttaccgtcaaaatttgagcttagagggttaagtgcaagtagagtgatagttgaaaaggtttaatcatctctttttttttttttttacattcttacagattttgtttattccaatttttttttatttacatttctatagaattcttttacaagttttgacttgtttttttttttagaaaaaaatattgctttcatgttgctttcccgtaacagtaacgttgaaacaaaattattttgaaacaacggaaaaaacaacactatgtatagttgtaaaaaaattatgttgttttttcatagcagcaatgtcaaaacaatattttttcgaaaacaacagaaaaataacacagtattttttttaaagaaaatagtaaatccataaaaatctgaaagttt

SEQ ID NO: 56844 - DNA, 1519 bp, Cannabis sativa
caacaaactaacagtaactaacctattagaatgtgacacctaggctaactaactacctataataactgtcatgacattagtttaggcaaaccagaaaataagaattctctacaccttgactactaatgtcgatggtaacagacaattatcataaagatgagatagaaagcatgttcaagaaatgcttaaacttatcacagggaagagctttagtaagcatgtctgctggattgccagtagatgaaactttgagaagcttcaccttcccttcattgattgtatctttgatgaaatggagtctcacatctatgtgtttggtcctctcatggaagacttgatttccacttagatggagagcactttggctatcacagaatataggaattgatctttgatcatttccaagttccttagtgatgcgcttaagccaaagagcttccttcactgcttcagtgcaggcaatatattcagcttctgttgttgacaatgcaacaacagattggagatttgccttccaacttatagtgcagcctctcatttgaaatgtgtatccagtttgagatcttctcaaatcaatgtctccagcatagtctgagtcgacaaatcccattacatcagagttattgttgttgttgttttgtccataaaccaggccaacatttgtagttccttttaagtatttaacaatccatttcacagccttccaatggtcgatccctgattctttcatgaacctgcttactatgctaaccccatagcataaatcaggtctagtacagaccataagatacatgagactccctacaagactagtgtaaggcacagactccatgtagcttttgtcttcatcagtggaaggattttgagagcaagacaatcgaaactgttggcttatgggagtggaaacagatttcacatcagcaaatccaaatcgatttaggattttgttgatgtatcctttctgagatagtctaagttgcctttgatttctatctctgaaaatctctattccaagtatcttcttagctgaccccaagtccttcatgtcaaattccttactcaaagcttgtttaaccttgttaatttctcccatttgtttgcttgcaataagcatattatcaacataaaggagtaggtataccagatctcttgagttctttacatacacacaactgtcatatgaacttcttttgaaactaatcttggtgacaaactcatcaaatcttctataccattgccttggagactgatagagaccatagagagatctattcagtagaaacacatgatcttcctttccttcttcttcatacccttcaggctgcttcatgtagatctcctcatccagatctccatgtagaaaagcagtcttaacatctaactgttcaagttcaaggtcttcacttgctacaagacttagcaagattttgatagatgtatgtttgactacaagagagaaaatttcatggtagtctattccttatctttgtgagtatccctgtgttggaaattattttac

SEQ ID NO: 56845 - DNA, 785 bp, Cannabis sativa
tgcagtctatataaaagaagagaattggtgagattatcaagctacaagtcaaggaagttggtattggaagcaaatagttgcagccaagaaccaaatcaaatctctcacggatgtgcaccggtttgctcaaacaaaatacaagatttcagcaggttacaaaatgatctgtcctgtacaggttatagttgcatagagcaatgaggtttgggggagattcaacacacccaagcatagttttatacttcggttagttgtgcgatatcggctcaaaaccaagggaagattgcagcgattccggctgcttgatgacccgacttgcagcgtgtgtttaatgctgcccgagactcacgaacacctgttcttctggtgtcctttctctgaatactgcttacaacaggttaaaatgtggctgtcatgggggcccaaacaaatgagctatcccagctactcaaatggatacacaaggcaaaaattagcaagtttcaaaagaatataatggcagcagctgctgctcatttggtctactccatttggcatgctagaaatgaccaaatttggaatagtcatatagaaagtaaagatgtaattgtacaaagaatcaaaaatagtgttaaacatagaataaaattattttggccaaacaaaattggtcaacaagataaagattggttccattcattgtaaaaaaaaaaaagagagatatgttgttcatgaggtctttaacataaagatgctctttcattgtaaatgattgtacaaagtgttgtggattaataataaacttg

SEQ ID NO: 56846 - DNA, 864 bp, Cannabis sativa
  modified_base (633)..(637): a, c, t, g, unknown or other
tgtacgaaaaattaggatataatagttctttttaggtagtaaaaataaaaacaaacgctcttatatagtagggacaaaagtaatgatatccgtacttattaagattgaatttttcttatacatattatttagaaaaatattacttctattaattatttagattgtatattacatttaagattatgcactataatgtctaaataatttcaaattaatgaaaagcaattatataaacaatattcaacaatacaaaaactcatgatagaagaaaaatgatcaggagcaaagaatgaaattatcttattacatttgaaattattttgaccaaaatcaattttgtattctaatttgatctattttgcaaaatataaaacgtaaaaatactgtaatttaacaaaacataaaatctaaacgtgtatttagccaaaaacgaaaaggacaatacctaatctctatgtctctttactatacatattttacatatctattctatataaaatgtgcctatataaccgaattcttggtttatgaaaaatttataggtgactttttatttatattaaaaataaaatgatttattattaaaaataaaataatttatgagaaatttatgggtcactttttatttatatnnnnnaaaataaataaaataaatcctattaaatccaaaaagttatattttagcacatacagtataattaagaagtcataaaatttataatttcgaatctgttaaataaaaataaaagcaacttaaagcattattattattatgttgctttgtacatactgcgacaaaaaggaatgctaatcttattaatttctccatgttctagctattaatgcaaaccagaaaaagaaaaa

SEQ ID NO: 56847 - DNA, 949 bp, Cannabis sativa
ccatatggcttcgcttgctgctgcaatcataactccttcctcttcgaatccattgcatgcagacgctgtaatatatacaaaatttttacttaattgggtgcgaactaaagtcctatatatatatatattcattagaaatagaatagtcagcgtgtaacatactgtttgaacgtaattttcagcgtgttaaactttttcgaatattttaaaattttacagaatatcttaaataactataatttacatgagcatgagtaaaaattaatatttcgggtgataaaacagataaagatgtatcgatacatctcttttaacttacgggtatatggaggtgtgtagaaagttgcggttcccttgtctgcaaaagcgactaagaactggaataagagcatgcctacaaaaattattattactctgatcattattcccatattttattaaatatatataataagaaaaataaaccactataatttaatataatatatatatatgtatgtgtgtgtttttcttatatgtttttctctaactcgaaagttttgctcccattttatagagagaattgattaagccaatcaataatggttatgagtttacaatggtgtccgcctaaaactacaaagttaattattttattatattcttttcttggagctatagctataaatcttctagctacgacaattggataatttaataaataatcttaatttcatctctgattttcttttttaaaaaaattaataaaaaattgaattatatatgtatttactgtgccagtcgactcgttcattataatataccgtgaatattatccattgtttctgaattaatggtagatacactactagaaatttgtatgattatctattctagaaattattaattaatatgaatccacatacagattctatacatagtatagatcatgatacatatttatccatct

SEQ ID NO: 56848 - DNA, 1710 bp, Cannabis sativa
ataaatcacttcaaatttcttatattgataactaatcaaattgtaaagggttttatttagggcacaaaactcaacaaaagtgtgaacttttttagtcaactgaaacctttggtgaggaggcccaattcaactagagttttgttgctaactcctctctctaactaaataaatacatatgatcttaacacaattgtatgtagaggtgtgcataaatcaatctagtccaattatagctgattaatccaatgacaaccaatcgtaaaatattagatatgcaattatgatcatatcgatgttattttttaatatttaattggatcggatcaaatgttagatgaactgtctgaaaatcaaatacaattcaatattcaattgaactaataattagtaatttcatttggtttggataaataattatattttatattattatacttaaaatatatatgtatatatgaaaattatgattaaaattttacttatttttattatttattggattagatggatccaatcgaatctaataaatattagattgatctcatccgattaaaaaaaatattgagtctaaaacattagatgaattgaaattatataatccaatagatttatatgaattatatctaataatagatagaaccgattctatccaacatctaatgaatgttggatcgctttggatgcctgagattaattggatcggatcagttgacaaaatttaaagtccaatctttgatttaattagatttagataagcctaaaaatattggatatgatccattaaatacctttagtggtatatttttgttaatctattgatctgcatctattttagagatgttatatagggtggaaaatttgggaggttagtattgcactaataatttgtattatttctcaattatttttacgagacattaagtatgttttctatatcactaaattaatcataatgctgtaaattatattcaatatcctaatatttaatatctaacaaaaaaaaaaaaatcacactagggtagatttcctagtttatgcagctattctgacccaaaatacatgatatattggttattgacattagacgttattaaataaaaactctatcaaagtggaatacaccaaccaaagttatgatcactattatctaagttgtgtgtttttttagtgattgatatgatgaatatacatatggtggaaatttaattgaactgatcaatatggctcgaaaccaacccacccaagaaatgactaagttcaacaatttattaccatccaatgttgataaagattctataatggaattgagagtgaagggagtctcttggaaagactatagtctaagactgactatatatagttcaacagttacactgccaaaattgggcaaatcctgatcatgatttagcacccaaattttccatactttaaaaaccataattacatatagagtaaaatctctatataatgagaccaaataaattatattataggggcataggtatcaaaaaaaaaaaaaaaatctaacacaaaaatattaaacgacaataacattccgaataattattcaaaaattatttatttaaaattgagaagtttattgattcaaaaaaaaaaaaaattgagaagtttatttactctttatcactattgagattttttatgccatttttatcttataaatgtcaatttcaaatgaattatatttgg

SEQ ID NO: 56849 - DNA, 882 bp, Cannabis sativa
cagaatccaagtgtgggtctgtgttcgagtccaggtcctagtgcgattacaatttttggtctaggtcgtcatccaattcttggtccccgattcgcttcttgtttcggttctagtttcaagtcacgaggtacgtgtcatgtccaagcatcgagtcccagatcccaagtcccgaggtgggtcctatgtctaggtttgggtctagggttgtgtcccgaatcgcaatccaagttttaaggcccaagttctggtctcggtttgggggaccaattcctaggtctagttcccatcgatgtttgggtcctaggtcgcagtccaggtccaagtttgtgttccggttcgggttcatgtctgaggttcctgtccgagtccaggtcccgatttgggtttggatcccaacctagtctaggtttaggtttttcggtcccaagtccgactttggttcttgggtccttggtttggccctaattttttggtttgggtcttggtctgggtccaggtcccggtcttggtttaggttccaggtcatgggtcgcggtctgggtccaagtaccgatatgtgttttggtctaagtttttgtttaggtttggctccttttacagtcacaggtctgggttctcatcccagtcctggtccgattccaattccaagtcttagatcaagtctggatctcggttcaggttcgggtttgagtcttggtacagaactgggttcgggtcctaaattaaaatactgactatgggtcaggacaaagccttaggtcaagattcatatctcggtcttagtttgggtttgggttcagagttgtgtcccggtagtcagttcctaggttttgggtccaaggtcgagtcctgtgtctcgagtttggggtgaagttttgggtc

SEQ ID NO: 56850 - DNA, 2077 bp, Cannabis sativa
caagcagacactacatcgatttggatttcaaagttcaagagctgacacatctctctttattcgaattcttcctcaacacaccacttttcttttggtgtatgtggatgacattcttataacagggaatgattccactgaaatagccactgtcatctctcaacttaactccatctttgctcttaaagatttgggtgatatcaactactttcttggcatccaagtgactcatactgctactggtttacacctctctcaaacaaaatatctttactgatgttctgtgcagggccaagctccaatttgccaatagtctaccaactccaatgacaggggggaaaagctctctgccattggaagtgatcctgtcaaagatccccatctctatcgaagtcttgttggagcacttcaatatgctaccataacaagacctgaaatttcatactctgtaaacaaagtgtctcagttcatgcattcccctcttgagtcacactggaaaatagttaagagaattcttaggtacttgaaagggacacttgattatggcctcacacttcagcaatctgcctctcttgatcttgtttgtttttgtgatgctgactgggcatctgatatcaatgacagaaggtcgactacaggtttctgtgtttatcttgggcaaaatcttgtgagttggacatccaaaaaacagccaactgtatctcgatccagtacagaagctgagtacatgagtttagctagcatcactgcagagatcacctggatacagtctctactttctgaacttaaagtctcaattcctcgatcaccaactgtctggtgtgataactccagcacagttcagatggcagccaaccctatactacatgctagaactaaacatattgaattggatctacgctttgtgcgagaaaaggttctggcaaaaactcttgctgtcaaacacactcctgcttatgatcagacatcaaatattctaactaaagcattgtccaacaacagatttgtatttcccagagacaaactcaaagtcgagtctctctccaccttgagtttgaaggggactgttaagaataatacttaataattgtaataacagtttttctgttttctgttatgtctgttggggttcaaagatattcttgtcctttcccttttattgtttatttcctgtatataaaggatgtaatcactttgctttaatcaatgagaatcagtttattccttttcttgctttatttcgtttccttactctcttgcccctttggtatgttgatttgtttccatatccatatatactgcaatttatatcctaatgaatttcggtcctcttagtatcttgatttgtttccatatactgcaacaagtaaccatggagtgttataaattctaatattgcatgtaaaaattcaaattatagtacttctataatatctaatatattacattatttgataatatataccgacaaaaagataaaatctacatttgataaaaatactaatacacacatctgtataccatgtataaacatatattaatatatataatactcataaaacaacacacatatttttattagaatcatttcattcaatcttcaggcaatgaactcaaataaaattcacatatacgagtagaagaatatgagtagattactcaaatgttgtcaacacaaaaacaagaacaggccaaaccataaataaaataaaatagattaattaagcataaagatataagaactaaggaaaaaagaagaagaagcatacacaacccactacctagactagacatgagacatcattacgactttctccttcttcataatagtggtgttgtggtgtgaacaaacaatggtttatgtggcataaaacaaagaatatataaacgaccttcacgattaagagtataagagcatgtttggtattgttttctgttttttatttttaaaaaattgtttttcgaaatgaaaaaaaaaatagtttttgaagtttttaaaaacaagttatgtttggttagtgttttttaaaaacaatattggctaaaagtgaattggtttttaaaaaagaaaacaacattt

SEQ ID NO: 56851 - DNA, 532 bp, Cannabis sativa
aagctccgattgaagcaggatagtgaatcattaaagaatgagagcttatggtaagaattagttttgttttaagttaaaaacgattagttttatataatggctttgtggtttagagtagttatggagattctgacttcgtagcattgttctttggtagctatggaactagttttgatgtttacttattgaatttgaggggattttgagttagaaatatagtttggaactttttgaagcttaagtccgagcattaatggtgttttctgtttaagggctcacttttaaattcagtcacgttgggactatagtatatatggtatttatgtgtcctgtttggataggtttctggggtgtttcggtgagtgaaaatatgggattttcgtgtcagactattttttgaaattcttaggagatcagaaattgcatttttatcataatttttcactcgagtgtccgttttggacgttttatataccattctgaagcttgcgacgagctctataatacagtgtatgttttagaggcaaaatat

SEQ ID NO: 56852 - DNA, 709 bp, Cannabis sativa
tattagtacaagatttgaaacttacagggccatttatttactacattaagtgggttggaagtaatgtattggaggaatatgttgaaattgacacatatccacagagaaatataaaagaatctatcaaaaagtgtagagtattggaagtatttttagggcattccaaggtgtttgaaagtcaaagttcaatgttaactcactttagacaagttgggcttgttgttgagcctactcttgggcttgttgatggggctggttgttttgagcctagtttatgtggtggtgatggagctggttgttctaggcctaagattactaatgacatagaggatagtcttgatgatgaggctggttatgaatatgaaagtgatcctgagtatgagcagtgtcatgatgacttgattgttgatgagacaacagaaattcatctcaaggggttagggaaaaggccaatggaaattgatatggaggatgcacagttggatgactttgacaatgagtacatacaacaatatagttctagttataagaaggacattgatgatgaactcaaaaatttacacgtgtaaaagaagctccatgaaagctaagttacctaagatgccagaattcaatgttgatgttgatatgaagaacacttcatttgaggtaggattagtgttttcttcagggaaagaattcaagcatgttgtgaaggaatacgcaatta

SEQ ID NO: 56853 - DNA, 1655 bp, Cannabis sativa
aacaatgttaataattttaagtatgaaaattttgaaaatattcaaaatcttggaactatatatccaggtcaatttatagatgtaccgtacagtaaacttattatgaatcgttttccaaattatatgacggtgatacaatttcatgtgagaacaaaatcaatctctactccatgtgtcaatcgttttgcaagtactgattatttaacaacttttacaacaacgacacgatcatcattatcatcgtcaaaatctaataattctaaattcaattactatagtcattctttaatagaaaatgaacttaaaggctgtaaagaaatcatgatcttcggtcatgatggaattattgttattcattccatattgggatctttgtatcttcgaaaatcatcgtaagtttctatgtgtattattttttaaatttgtcttttaaattaaactttgtttttcaaagtcattttgaaaagtagtgaaatatacatatatgctataattatttattaatattgatttttttgtttatttgttttgtgttgtttaagcttaaaattaatacgttatttgaagaagaaagtggaagaatcatcacctgattacaaaatgataaagaatttcttaaaaaagttgcaacacgaagattcatcgaggtaaattatattatccattattttagttttatttaatatatatatatatatatatatgatactataactatgtatgttatggtttattttttcaggagcaagagtaaattggagtagatttgagggagaaattttcaagttctattacctaagttttttaagagtgtattgattgggtatcaataattgaatgaatttattactggtttatcatttattttctattgaagtactattttttttttctacaatatgacaacactagtcttttagtatttgattataatctgtaacttgaacatcaagtgtatttatttgcatatgaattaaaacaagagagtgtaagagcaaaacactggtgagaatctgagattgagaattcatactcaactgtgatgcactcgatttgttgttgattaataaagaaatctgagatcgtgttctaattagttggagtaagacaaaattcacatcaaacttatgatttaaattaggataattcattgtcttgtttctacagtttatagagtgatctttataattctgtcatgttccttttgtatttgattgcttgccattgttgatattttaaattgtgttctgtcactaccacaaatttaggctataagggtaataatggtcccatcccattttaatagtattggaaattccttctaataactattagaggctgcatctaaatatatttatcagatcacaattttaatttttaggagcaataatgtcgcccctaatttatttaatattaataaaatttataatatcatatcataactatttttatatattaattgagattaatactctttttctttattgtcctttgtctcaatatgaggtagttcaaaaaaaaaatgagttagttaatatttttttattggtatttttatatttactagatgaaagttacgtggcgagccacgtaaatattagttttatttaagttttagtgattttttttttaagaattcaataactaattgtaaa

SEQ ID NO: 56854 - DNA, 1152 bp, Cannabis sativa
cacagcgcctctcacatctctctctttcttctccctcgttggcagcgaacagcctagacgcatcctcccccttctctctcgttaacttttatttttttctaaaaataaaaggttaactcaaagtttctcatctcttttccgcctcttcttctttgtctattctctctgcgatcatgagatcgccaggccaggcggagcttctcccggtgtcctgacgcccaaatgggcaccgccaataggcgcaacacccgtcgacacgacacgatggtgagctccttcactacaagaaaataggttctttacctacatactgtaattgtaggtaaaaattatctaattgtaggtaagcaactttacctacaaataaacaaataatttataattgtaggtaaaagattgtggagaaagatctatacctacaattattcttatttgtaggtaacttatatggtggaccctacaatgatgattaagcaaatgatgtatacaatcacatgtcatcttatgtggcagccacataggacaaaacatgaaacatttttacttgtccacgtgtcaaatttatttggccaaccaatatgggatttaataattttaccacgtgtcacccattgaatggttcacataacaagtttgctagtatcttattattttaataaattttttaaaattatataatatcatttttttaaaaaaaaaaataaagcagaccaaatttaattataaaatatacattaatttatttcaatgtaatttcaattacaaatctgacaccaatattgattaatatcctaacataactctattttacaaaactgaaacacattttgggaagaaaaaaatttctttcccttctttttctttttttcatatctaaattgtctcctcctatcttgaaatgcttgattgcttgatgaaagacatgattgcaacataaagctgaagaacaatcttgatgatggttttggcgaagagccttctaattaaatcattttcttgatgtcttcaagagttgttccatatggcaagtgctaaaagtataagacaagaaaaattatttagacatatcttaaagtcaataaaattacaaaaaatatgacattaatagtaaaatatggtagcaactgttctcgctttgttcaaagattgggt

SEQ ID NO: 56855 - DNA, 1190 bp, Cannabis sativa
aacttaaagctttatctaagttaaataaattacatgcttcatggatttactgcttaggtaaaagagttaattattcagcgttttgcctttattacatgcaatagagagaatgtgataatttactatttcaatattatttgcgagattaatagttcgattagaaatgtaaaataacattcattattaggaattaatgatgattaatgttaagggtgaagattaatcttaaactatttcttaaatatcgtagaacctcattctatttgctttttaatttatgttatttgatcttcataattagactcccttttttatttcttgttactgatttttgaataataaattgataatagtcctcgtgggatcgacctgtatttaccgttatactgaagtagttggtaatatataaataaaaattagtaaatttgttgtggtaaacgacacacattaaatttttggcgctgttgcgagtgactattttattcaatttgttattcatttttttcttgttacttatttattcttcgagttgtggttttaatttttagatctttttttagaaatatggcaatgtacaattaacaataatatgatccatattatatcccgtcacaagtgtatcaatatgatccctactacgacacttacacatacaatcaacaataaggagattattctagcacttcctagagtgggatcaatcaatatgttcaaccaacttcttactatcctcatataacaccaaaagatcaagatcattcttttactgatctgctcaatattttggtggcttctattattcaaatagaacaaaataatgcacaatttcaacaacctactcatactgcaccatatagtgaaaaaccaactacggctgagctgattaaaatgttagcagctaataacttgcagattgaacaaaatactgtgcaatttcagcaaaactttcagaaaattatgcagagcgcccaaaaatctttacaaaatataaagaatcttgtggaggaaatagaaatatctatgagtgatgaatatgaaatgtaatattcaaacactatgccttcacaagtggagagtaaccccaaaagagaatttcaatggcattactatccaaagtagtacacaacttgaattaccaccacaccaagaagttaatgattcaatatcaagtcatggagtcaaatagtcat

SEQ ID NO: 56856 - DNA, 2299 bp, Cannabis sativa
aagcttttggacaaatgtgtaataccttgttcaagttatggtaaaccccactaatgtacactcaagattgtgagtgagtgtttctatacatatttttcttcttctacctttcttatatatatatataaataaatacatatatatatagtgtagtatatattgttgtaacatttatttaatctctttgttgatccttgtattatattacaatatagttataatatcttgattttctatgttgcccatgatttctcccaaaatacgtggcaagttaaaggttggccacatggcactgagactgatgttttttggaataattatggcaaatctttctaaaactacaagggaaatcattagccacgactaggaagtcccactaggagaacaagctacactatcccagctccgagagtcaagttaaaaaatggaatgggtctagattctgtgagtccagaccaaagtcacaatagacacattaaatgtagtatggagaaacgtctgcaaattgccttgaaaagacatgttagaggtttaaacctgtccttctccgattgcgacggatgcataatgaataatcaaatcatcaagagaagctaaaggtctatctcactaaacacctagagcaaatctacgaattatacaaaataggcaggcatgccatattgtctaaatttgggaaattgtgcaagtaatactcatacaattacgacaatggtggccttttcaccatcttgatgaggctataaatacccccaactacatttagttgaggggtcgaaaaaaaagagtgagaaactctctgtaaaaaacggttgcattaataacagtgactaatggactaaggctcattaattccccaaccacgtaaaaatcctttctattaaatttcttcattaatagttgtcaaaaatctcgatcaatattttggtgctttcattaagagctgaatgaagctttccaaagaaggaaaatcacaaatagattcatggtacgatggtgttgataagaaacaactcacatcgaccacattcgcctgaagatcctatgggtgtggatggagaggaagtggctttgagggtagacgttgaagaacaagatgaaacccaatatcctgagtacgaggaaaaccaagaagagtacgagaagtacgatgatggtagctataccaagcttatcacattgagataaaaaaatgctgaccacgagctgagtttgcagagcaaaaagagaaaaacaagtgaatgctagatatagtaatttctatgaaaaaagtgatggaagtcgcaggaattcatgcacgccagaatgtgggccctcttggacaagacaagatggaagaagggccttctcaaccctcaagaatgcaaaaataaaagagctgggagctaagccctatccggctcccttcaaaaagtcccttagggaaatcctagagctaattcgaaaaggaacaaaaagacttgagatccgcaaaaagtttgttccgatctcccttaagggaaagactagtcgtcaggatcggggagatcagaggagcatattcataaaccaagagcctggggaaagaaagggaaaaagccaaaaggaccatccagtcaatttaaggcagaaaatcaatgccaaagactgaaacctcaagactctcttagaacaaaaaaaaagccatacaaatttcaagcaacactttaaatgaaggaatcttggctgaactcgctattctccaaaaggacatagctaaagtctcgcaaaggcaaaagggagatgattcagtatatgactgcgaagaccaggagccttgcgccagcaatgtacttgaagcagagctcaaaagaactttaaaatccctgaaatgactctatatacaggagacacagaccccagtgatcacttgtcaaggtttaatcgggtaatgacagtcatgagagttagtaatgacacaaaaggcttgtatttcccgttgacatttgggggatccactgaagaatggttcaagaagctaaagcctagatccatggactgttagaacaactgcaagttaatttcaaaaggcagtttgtagcagccagaagatttatctttaagttagtgttgtgactaacatcaacaaactactagtggagacattggaaaacttcatcaaaagattcaaggaagaggcctccaaaaccaagaaagtggatgattgacaataattagcattgtaataagctggtatccaggcgggaactccctgttgagttttctgtcctaaataaaatccatttcagtataatcagatttactaattaataaaaggtca

SEQ ID NO: 56857 - DNA, 689 bp, Cannabis sativa
cactaaatcaagtttataagttaactacaaaatttagtgcatcaccaataaatgactaagactaaatccatttccaagaacctattccctgccactaactcctgttacggctcagctaagaattacaatccggacggccatgtatgtccaatgaacttagggactccttcatcaatttgcatgaaatttcctccatctccctctcggtctaggagataccggtctcaggcgatagaaccttgctgcaattatgtcatgttgcagagcactcttaactcagtgaatgcttcaaaaacaaatgtgttgacctgctagatgaggctcgaaagaggattatcgagcttgcttcgactatgtaccgacaaaacaagctccagggtgagggaataagtgaccaggtgaagacgttgggagcatttctggaagctgtcaatgactacctcaaaggtgaagtgagagtctctgaggtgattcgtctcgattgaggtcttgggaactcgccttttatgcaccattcactggcccgccccatcctctccaaacctacgaatggtctaacatttttctaaattattttatgatattttgttgtgtgttcttattatggtacgctttatattgtctttctaagagtatgttgcgttttagtttgtgttcacatgtttattagtaactttagttggtattga

SEQ ID NO: 56858 - DNA, 1332 bp, Cannabis sativa
gtgtggcttaaaagtttagcccgaatttctgagtcaacactcaagattcatactgatctactattaatcatctttatgatatgaattaggtctttatagtaaacgacatgtttgataaagataacttaatttcatatcggtccagtctatattatatacaacaatttaacttagatgtcatactacatcagcaatttgaatctatattgcttgcactgaataattgtgtgaaccgtactagcaatcgttgattaaagattctataactttaatatgttgccgaattttttattcatggctaagtgatcttaattctccatacaatacaagtcacaacctcatgtatgaataatgaattttttaatattacatataaattaatcaatataaaatattaataatttaacattcaagtatatatgaaaatgttcaactcttatttataaatagaaatgtcattaaaaaaatttcaaggcataaattctaacattatttctatgacaatttaatacctttttaatactcattgtatcacgctttataatagcatatacaatatacttatgtgcccacagataggactttaatccaacataaatttctttttaaatctcaaattaattgttttaaagtttctttctctttgtttgaagcataaactagaaaagtcaaatgtattgtattctaaaaattgatttttcatcaaaaaaattgattttttttttcaagaatttgattttaattatatagaagtaaaatttatatatgaatttttaaattttttatagtagtccttcttatttatgatgattttttcaaaattaattttttcatcaagaaattaaattttttatgagaaaataggttttaattatatagaagtaaaatttatatatgaattttcaattttttatggtatttttttttatttatgataatttatttcatattttttaagatttattttgaaaagaaaaaaaaaatcacatgcagttaattaagtttgcatgtcaatatatattaaaaatttcctatttttattttttcatatttttttgtaaatagtcctattaacaaaatataggaccaaaataatatttacactataatcaaatatgtttgattgaaattgataaaaggacaactaatttttcctcgtcattttatgtatatgttttttttggcagaattatatataatattcaaaatcttaattataaaaaatacagtttagtttcatttattaaagataaattagaaaatggatatagtattagttagattttttatttcaatactgttttttttatcatttattatatctgttaataa

SEQ ID NO: 56859 - DNA, 863 bp, Cannabis sativa
  modified_base (787)..(792): a, c, t, g, unknown or other
ttttttttataaaaattaaaaaaacagttttaaaaaaataaaaattaaaaaaaaaccctaattccctctttctcttcttttcttctcgttctctctctcattgccctacacgccgccccctcctcctcctcatcgccatcaacatcaaattccccatcttgcagtttttgctcaaattgataataataaaaacaaaagaaccaaattcagctcaatagtcatgaataatcacattgaaaaagcactgtgaacaagtgaaaagaaaccaattcgaaaagtcttatacatatgctatgaacaagtaagaaacaacaattttctcattatcagctctacctacactttagaataaaactaacatcgctttcaggaaaaagtgacacctgtgcgtagacctcatcagtgccttcctcagcctgacctaaaaaaaacgcaaaatcatcaaaacaggaaacaaaaacccaaacttcataacccgttttccatataaaaaattcccgggtattaagaatgtaaaaccatgaaagagatgatcttacatggagcttgacgtccgaaacacggcagaagaggtggggtgggaaatcacagagagacgtcgaaaagtaagagagctgttccaagtggcccagagggaagtaaactacgacggtccctttcttggggagtgaaatgagtgggccagcgtaggcgtgccatagctccaagcacactgaggaagaagaagattaagaaggcgatgaagaagccgaagtcgaagtcgttgtgttatagtgagatttctctnnnnnngaaactcgagaccagactcctgtttagaggacacgtgtacttagatttccaatgaaagctgagatgtccat

SEQ ID NO: 56860 - DNA, 1656 bp, Cannabis sativa
agggcaagtcctcgcagactttatggttgaatggaatgaaacggaagcagcgactgacttaccagaccctgttattcccacttggagggtatacgctgatggtgcatcaaatgagaacaaatctggggcatgaataacaatgatatctctagaggggttgaagctccaagtcacgttaaggtttaaatttccagcttctaacaatgaagctaagtatgaagccttgttggcggggttgagactagccaaagtcgtgggagcccacaaggtagaagtttttagtgattctcaactggtttttaaccaactgctaggagaatatcaaacccgaggagaaaagatggatgcctatgtctcagtcacaagggagttgctcaagaattcaagagctataaaattgaataaatttctcgagaaaaggatgctcatgcggactacttaactaagttagcaccaaatcgggaaatggaaaaattgggactagttcttgtcgagtaccccttggcgccaagtattacgtctaaggttgagattacgacgaatgaacgtgtatcaagttggataaatctgatcattaactatttgacaaagggggaattgcctcaagatcaggcaacttccagaagaatacaatatcaatcctcctgttatctcatgaaagaaggtatcctttaccggaaaggtctaagcatgccatacctaaggtgtgtcttggactccgaagctaaatagatcgtacaagagattcatgaaggattttgtggaaatcatacgggggttctgagcctctctaagaaggtcttaagacaaggctacttctggcccactatgaagaaagattgcatagactatgtcctaaattttgatcaatgtcaaaggtttgcaaacatcccaagggccccacaaatgaaatcacattgatgacaagcccttggcccttcgcggtatggggcattgaccttataggatctctcccaatgggaaaaggcagagtcaaatatgcaatagttgttgtggattatttcacgcgcgtgcatgatgatatttgatggcgtcactccttgaggcaagtagcaagtctcattttataaaggtgcaaaatgagacggggggtatatgttacccctgatttttcctaatacacgtggcaatcccagagtcggccaggtgggaggaaagcctaaatcaaaagtaattaaagtaaaccttttaagacaacagtctgagactaaatggtcatgttcgggaagcccctccaagagctttagtcgcgtcatgctaagttaagaattatgcccacctcaaagagctagataaaacatccaagtccgtttgttagatgtattaaatgcagcatgggaaaaatatctacgaatggtttcgaaaagatgtgttagatgtattaaatccattattctacgattacactatgatctatgaatcttatgatggctgcataatgaactgtcgcatcaatcaagaaaggttaggggcttatctcaccaaacacctagaaaaagcctatacaacctaccaaacagacatacatatcctattatctgaatctgagaacttgtgcaagtaatgcttccacacgtgcgacaatagtaatatttttttcttttttatgaggctataaataccctaactgtattt

SEQ ID NO: 56861 - DNA, 1010 bp, Cannabis sativa
  modified_base (739)..(749): a, c, t, g, unknown or other
tacaaattaattagtttacaaatgaacaactacggttgcattctatatcatttaatgtttcttgtcagtaaacagttatttaaaaattgctttgatagataaaaataattacttaaaactatttatacaatttgataaaacaaaatgagtaatttacaatagaccaactacagttgcattcaatgtcatttactgtttcttgcaaaaaaaatagttgtttataagtttttttattagattaaaataattatttgcaactattgatgctacatactcataatgaatacaaaaatttaaggacatggaatctctgcaaatttcggtacagggcaataactattgggaagacaacaagtactatgttgattacgaattaagtggaaaattactatcaagagattgtacttatgctcaactagtaaaaataatgatggagaaactacaatgcaaccctaatacaacacaaatacaattgaaataccaactaaaggaaggatgtcaaccactacaaatcaaggatgataaaagtctattgttctacatatagttattaagcaaagaaattgatttcacgcagtacgcattatgtgtgaacacaatcaacaacacagaaacacaagcttttttggcagctaaccaatcaatgatgtaaaatagtatgatgatgacagcatatgacaatcacttagtataggcatatgtgtagcaacctttataacaacacaacaacaacaacaannnnnnnnnnnacaacaacaacaacaacaaataaacaactactatctgcaccaagaatgtgatcagttcaagttgatgctattttggtcgatactatgactttaacatcagagtcaactatatagcaacaagaaaacaacaacaaaaaaaaaactcctcaagaagatgaatattttgacttcactgactatgccaagcttgttactatagaaatggtacaacaacttgaaaacaaccagaaagaagaagaagaagtcaaaaaacacaaaaat

SEQ ID NO: 56862 - DNA, 996 bp, Cannabis sativa
ttatttgtcactaatcctcatttatttacaccatcaaatcaataatctccctaaagatatgtttctcctaatagaggaggcggcgagaaggcgaaatggtgatgatgaagcctgggggattgggatgacctgcgaagctactcaggaggctactgccagggataaaccaagagtcttcttgaaaggtctggtatttttcatatataaatcgcgttttcgttcaagtttatgcattgtttttgtttgtttttctcttctgtctgggtcgaaacttttttctgtgttcactatgaattctctaagttctagtcctgttcctcctttgatgcttactcttgatgaaaacatggtctataccatgactgaaattcaggatgactcccccaccgatataagtcttcttcttaaactctgcaccgttaaacactttaaccgagcttcccttattaaaactctggctccgatttggacttctcaatgtcgtttccctgttactatctctgaacactctgatggccttttccttgttacgtttctctctgaaggagataaacatagaattcttgatgggcaaccttggcattttgcccaaagtctcaccatctttgctgcccctaatacttcctttcccattacccctgaccagctgcattatgtgcccttttgggtgcaagtgtatgggatcccttttagatgtaagtcctatgatttggctaagcttatagccactggggtaggagacttgattcaagtggataatactactcttaaggatgggactgggccttatcttagggctagatatcttttagatgttaacaaatctattaggaggggaattaatatttgcttcattaaaatgggtagagaatttactaagtggttggactttaaatatgagtgcttgcctgatttttgcttctactgtggtaagcttgaccatactaagaagtattgtcatacttacctccagaaatgtgatgaatccattgttcc

SEQ ID NO: 56863 - DNA, 8861 bp, Cannabis sativa
  modified_base (164)..(173): a, c, t, g, unknown or other
gagcttatgaaagcaaacccttttgttatcaccacacacactactcatactaaacacatagtaacccttttatatcgaacacctaaccctaagggtgtattaggcttattgggctaatgagtataattagtggtagactataatttaatgagccaattataatnnnnnnnnnntctcatgtgcttctaatacatttattaattattaaccatcccattatgatagtgaataaatattgggcacatagttaatgattgtgtttatggtattaagctcatgattatattagtccacaacaataattctaacataatcttcattctttacctttgccaaatccaatctaacatcaagtttacagcaaaacttaagtcgcttataacataaatatcagtatatgaatcaattattaagtttttttaaaacagcttctaagatagaccaataaataatcgccatacatctactaatgtttttgtattcaaccactaaacgttttccttttctaatttactagctactgcaaaaacaaagaaaaatccattccagtcccgtttgatttatttcaaccgagtttttattaatatatttttgttttatgaaaaacttagtgatgacaaaacaaaacatatggaaagttcaaaaaaattcttctcgcaatgtctaatagcaaagttgtaaaaaaaaaaaagggaaaaaatagattggcagctgcaaagtccatttcaaaatttttaaaaaaaaaaaatggaaatacaacaacagcttatattataatataattgctatatggcaccagctttatcttccgtcatcatctgtttctgaaagtaaaaataattaaattatagtattatacaacataagaaatgaggggtgagatagctacaaacagatagctgttgaaagctcctccattaccatatttacaagaagctaattcaagtactaataggacaacatgtgatgggtcactcctgtttgatttagtaaaaggccttttttttctcccttcttctttctcgtctacattgtacagcttacgactgttcaaactcaagttggtacaagggctaatatttgagtcttgattctacccatgtacgattgtatttctctgtatatttgtatattttgagaagacaaaggatacaatcttgtgacggctgtatctaatatttgagccacttcagatggaggatattgtcgttctgtacatgtctgcaacacataaacacacaagtaagccattaaaatcccaagggaagttctttgaatcacactgaacacaaagccggtaaataatttgaatctttaacactaaagcttatgaggtgtacctgtatcatgagcaaactagcaacacatgaagtgatgatgcctgaaggtacttttacctcacttttgtcagaatctgtacgcaaattagaagcagatgaatcacccgtgatgacaggctctgattttatcagcgaatagcgatggactgatgttccattgacctgctcatgaggtttatttgttaatgctctggactcagacgtcatcaacttgttatccatggagtctagagcttctctaatctttagatacgcatcttccccttccttacacaatgaaaatgcctggaattttacatcatcagattcacctcctaaaatatttacaaagtattgaaaagaagaaactaaacagttgaagcagcaattggtgactatccataaaactataaccaagtctaaactaccagagagaatcaaacccagcagaacataaccttttgatgacttctggacagcaaagttgaagaccaagcatatactaaaaataaatatacaatttataaaacaatgtttatgccacatacagattaattacaattatcatttgcattaatcaaaaacgatgctgacacactaaaaagcagagggcttccaaacctgaatagcagcatcaaccatagattgtgcttttattgtcgatcctttaacaatttcaatgagattagatgccgagtcttgagaaatggaaaagttatcaaatgaactgggaacgttactgtgggtagtggaattgatagggatcttcggaccagggaacaagacatttcccggatgagtattacgttgcctcaaatcatgcaaagctgaagaaacctgcatgtcagaacaaagaattagatgctgctagaagtaaaagcagagatagtaactgaatatagacaaatataatatatatatagtcacggaaagccacgtgcctggctactggcttcatttagctgtacaagtactgtggcgtaatgcttcttaaacatttcacaatcttttaaagagtagtctccattattctggttttccagtatttcactatttgtttttctaagctccatcaacaatgcttcctaaactcaagagagagagagagagggaagggggggagaagaagccaattaagaccatcaacaatcttaagcaagacacagtacacacaatatgcttacatggcaaatcaaaatgccatgcgtgaccatatacagactaataatatgaaaaaccaaatcgaaccaaggtgaggaaacaaaatatcccagaagaagagaattataagaacttggtctccaacctccattctgaatgacaaaaaacctatacttaaattagcgaaaagtttataacctttttgtcaagagcacgagtcaactcagaaagtgctcgtatatctgcttccctagcttggttgttttccacgataagagattgactgtaagctattggttgggtactactaacaatgtcaatagctgctgctttcatatgagaaacagcatgggttatatccccctgcacatattacatttaaataaattaaattaatcgatttaccgtgcagcaattagttttttctttttttttttttaatctaaattcgtttaagggtttcttgtagataaaactcctaaattgctccttcttatgcactttcaagtccctgagcttaaatttttagcatcctaaagtgactaattctttgcatccgttcatccctgctcataatccgtctaaaatttcagtttgaaacttcccagatgagaaaatactagggctatcaccactacaaggaagaaatgctacagcaagtgataaaaattcattgttggttgtgtttactacagcaagcactacagaggataagcatgacatcaacaaacttcacacactgaagtacggctggctgtaataaacgtagtacaagtttttgaattctatgttatagccttgttcttaaactagcaagtgaataaattcccctgaatcaaagatccttacaatcttcagagcccattaggaattgggccccagacatcacggaagcaaaccatacggcaatgtatactgacagctaaacatgcataaattaaacatacagagataggatctaactcatgatgcccagttaaattccttaaataattaaaaagaagtgctaaatcgtttcactatctgtaaaaataaaataaaaagaactgtcaacttctaaatgtcacgaactaatgttaatccagaagataaaaagctacataacaaaactaagtcaacacataaagagaaaagaataaacacatgcaatggattgataacataaagttaaagattcatgaaatcaaatttctttgattagtattctgacctttccatgctttcccaaggtattgatagatgtaggtcctttctccatgtgcccacttgaagcaaacatcaaaggccatccaaagttcagattcccattcggtagtggctctttagatgtaagagaaaaattgtcaatcgtactgttctgtctcctaagagattctggcatattctccattgggtttgaaggcatgcagtcaacatcctacaaataagactttagttaccctcccaaaagtgcttctattaaattgtcactctccctaaattcttcgcttaataaaagaaaagtgaataaaatagtaacttcaactaaaatatgaacaacttgacactcttatcacaatctactaaacaagctatatatatttacaactactcctaggcatcgtatgttgtttatgcatgatactctatgaatcaataaatcgaatctcttctcagtatatataggtaaatgattcgcataaaacctatgtattttctaagaattagcctacatactcattatcttctgaaattggaaaatcaaattaaatgttcaagtacctaaactcaatgttacttcagaaaacgacaggttagaaaacactttcagacctgctcggaatggaattataactttcaccatcacaaaaagatcataaaattatatccagaatttctctattgcttgtacccaatgttggcaaattaaaatccaaaagccatccccagaattaaacatgaacttcatgaacaaaatatgaagagaaaagttaaaaagagcccagtaccatgacaaattcaacacctatgtcaggatggtcaaactgaatcctgcacttgtcatgatcaactgtaagcacacttccatcgtgaacttctctagtttttggatgtatagcaatcacccgttgtccaactgtaagaggtctcgctaaatctgtagggagaccttccctaactccattgcggagttcagtataatgctctctaacagattctcgatattgtttaagtttcttcctttcttcacgaagaaagagttcagaaaacctccgaggttttccaagggaactgcattaaaaagcaatcacattccatgttttatttttcatagaacttttttagctaattgatcatacatgcataaagctttgtttggaagtgtaccttctaatgacaccccattcaacccgagttagccttgggatgtgccccaatccaacatggtttaagtactcctcaaattccctcttggcaaaccaagggtaatctatcgcactataaaaccactcaaatgtgcaccatctccgtaccatagttgatgataggaaacaagaaagtttctcctacaaataaaacaagaaaacatcagttgatcgttaacttcagatagttttataattcaaagcaaaacaaccaaataaacaaaaggttaaaatttacctctggcaaagtgaaatttttgttaaccttccgtttaacaatattctgcgtagactttatgtctttggtgggcaatgtttggggtagatacattttgcgcttacttctttgcttagttggtaagttaacttggctggcagcaggaacttgagtagtagatacagctaaatcagtgccacttccagttcttttaaattcaccactcaaagaaccttcagatgatcctactgatttccactgttttgaaggagtagaagattggctactccgtttacctttaatcactggtttactctcctcttcacaaataacctaaaacaagtagatcacaaagatgataataattagtcaaacaaattatttaaggaatccattgctgtcagtaaaactcaatgaaatccataaaaatttagattcctatttggatatgcctagcatatgtttgagtgcacatgtaagcgtatgagggtggttgtaggaaaattattttctgagttgaggtggtactgagtattttctgggaggtccaagctcctcgaagaatttgtcttttttttggtattttagccatttatcaattcaagggtaagttttgaatgttattttaagtatgaccaccatgaaagtgaaagactaccgccaatgatatgagaccttggtcttggctttaagcaatatacagaggctgatggaagcgactttcatcaataagctgaaagatgatattcgatcagaggtgaaattatttaatccgattggcttggaccacatgatgaccacaatctaacgggctgaggtccataatctcttctggaagttaaatgaaggacccaatgttactgtgctttcattcaaacattatttcggacattggctctttgttctcttcaacctccaccaggccaatgtcgacaccaaacaaataattgctcctcacctaaagaccatcacaataattgataaaaagatctacatagattcttccttgtctaattcgaggggattagtcataccaaagaaggctctttattgtgcaagcaaaaaaaaattcagagaaggtctaagttggggaaaattggaaacaaccaatggaggattgtaaggtagagctttagatgaatgttgtggtttgattaccatccttcaaatctatgaagagcctactacatgcctaatctttttgtgcacgatggcatgtgacttcatggttttcccaattccattgtctgaaataagcaatttttcttcacttgttttgaaaaggccttttaggtctcatttagatgatgtgcagtatgccaaaaaggagatcaagtttatttggggcttcaaccttatcaccaatgttccttcaatgttgaaatgaaatgcttgctccttgcttcttcgatactcattaagtgttggcacgtgtcgcagttgtaacctatcagcaaagccacctaaagaggcagttatccaccttgttttccttgtctacctgcttcgacctactctaagagttgactaggacactccacttccaacccatctcaccgttgaatttaagtgggaggtggaaccataatcaatgttagatgttcatagaattggggatgcatttgcagaccctactcatttgagaccatcaataaacaattttctcaattccactttgagggcaaggtgaaagtttggatgatcaatattgatccgaccttgaaccaagcctctaaccaaattaatccatgctgggaagaggttgaaaagagaatagttgttgtagcagcctctgagtggaatagtaagttaaaggatgcttggtaagttttcctaggagagtgatgtaggaaacattgttaatagttgggtgtgtgtaagggtattacattttgtattgtggtgcttcatatgacatactgagttttcagccccccctcaaagagtacttatctttggatgtatttcaaccattatcaagacattaagaccaactttggtccgtgcttccttagaattgtactttggattgttgtcgtttgatagctcaatacttatcacaagacagcataagttgtccgtaaaattgactcaaataaagaaatataaatctaatgtttatacatataaatatttatataagctacatacctcggtcttaaaagttccctttaaaatagcatctaaacgagcttctacttttgacatctagaatgtgaataaaaaataacattagcattaaaccaaacaatgtgctgacgacatcaattcatgaggcagagagagaagctatctattagttcttttaatgagataagaatgattttgaattcacctttggtatcgaggacttccgcctccttttcaataatttgttctcagaaagaagttgtcccgttgttgaatcattaataatatcaccatttgcatcccttccaagtgtggactttttggaaattgtagggggtgccttttgtttagcacctgagagtttatttttgtttctaacttggcttgtcgcttcaggtacactgcttttttcttctgcatctagtgttgttctttcttccttcaattggacagacgattctagatacacaagaatatgacataagataataaactaccataagaaaacaaggaccaaatcatttcaatacacatagcaaaaataagacagatatcaaaatagctgcaccaaaacaacaatgatccctgagaacaagttataattttagatgtagatccaactttaaaaccttttaaatttatagatgtaaataaatattaaatcaatcggaaactaaaatgaaaacataacattccagataagttagagcataacaattcatacaactgaaaggtgcttaccagattccacggtacatggaggcatcatgagcgacaaattagccaacgtttgaagagcatcaatggcagagctttcatctggggtatgaaaatcatgaattattagaagaaagctagctttgaaagtaagaagcaaaaaattgaacagtatgcaaatcagtaactgctaggtacactaaattggatatggtatttacatatagaattattttcatctgagtttagctaatatggaatatgatgtagctagataccatacttgaatttttgtttaagaaaatttttgttgataggaaattgtttttaatcttgttttatttaaattaatacatgtttaattgatttatttttaaaaatacaaaattaaacttcattcgacacttgttcaaattttcatcttttttaaatttagtttttgtttcatgaataaaattaaataataaataatttaaacttatatttaatgaactaaaacaaagtaaaaggaatttaattaaaaaaatgactaaattatgtaaaacaaatagttatcataaacattttcaaaatcaaggatcaaatgtgtgatttaactaaaatgcagggatcaaaataataggatagagtaataatatgtgcagacaaaatttaaaccaaaacattacacacctatggaatttggtgaggattcattttttccaatttggttagggtaaaggtttttgccaatatgcaaattgacaaaaatagtgttttggttaataaaaaaaaaagttggaagaattaattaaaactcaatttatttttttgttttcccaatttatttttgttctcattgcatgaaaacaagattttctagattgtacagcattatgatacacaattttatattgcaacgttcactatatt

SEQ ID NO: 56864 - DNA, 676 bp, Cannabis sativa
  modified_base (26)..(32): a, c, t, g, unknown or other
ataaaatggattacattgaaatggannnnnnnttagggcataaaactcaacacctaaaaccctatattacagtttagattcatagatatttgcatagtttgttagataattacaaaagaccaaagtacccttgaatctagatattattcagtcattctgttggacttttgggatccaattcgcaacccatgacttgttgtccatgtgtacagagctcctcctggccggcgaggcccctgtggaggccaggctggctagccatggtgtagtcccaaggctggccggccagctcctgagagggagttggcttgtcacttattgcctatttgagtgctgaggtctccgtttatttaggtgttgacttggtctttctattggtgagatgtactgccatgtggcactaattttgtccatgtaagcatgccacgtcaagagaacaaaaattgagataacagtactaaacaactcaaaccttaacaaaaacaaaacactaaaagcaaacttaaaaatcaagcttaacattaaaatttaaaggagaaaaaggactagggctcttgatcttcctaattgatcccccttccaaaacttgttgaattcctgctgtcaagggtgaggttctagtcttaaattataggttccttcttggggtttctaaactgagagagagagagagaga

SEQ ID NO: 56865 - DNA, 674 bp, Cannabis sativa
gtttgccgttctgattatttgctagtgcttaaacttgcaccaaatctctaatgctaaaatgccaacaaagttttagattttaatagaattccaaatatttgtaaaattaatttttatttgagaactatcttgtttttgcacattactcaaatgctttgtaactaggggggttttaaaagaaaacaattttcattttattcttttatttagttgcatttaaaactattgggataccattttgatgggatggtttttccatattttaataaaatgactattccattttaaaattgagaaagaaacaccattccaatgtaagatttgaaaaaaattaataatttattttattaatttttttttatgtattttaaattttattccattcccatacttattcccattcctattctaattttttattttcactcctcccaactaaatgccacctaagttcaaatagtagaaaatgaagttcacacttagctttattgtagaggtaatgttttcagagctaattctttgattccaaattgcaaattgggttttgtatgcttttaaaaaaaggatcaaaattaaaatccagactgcattaaaagacctcttttcttagaagcaaagataatatataaaaacttgtcagtgttcagtcaaaaggtagttcaaaatatgagtga

SEQ ID NO: 56866 - DNA, 1476 bp, Cannabis sativa
  modified_base (58)..(63): a, c, t, g, unknown or other
  modified_base (1156)..(1165): a, c, t, g, unknown or other
aaaaaatacttttttaaaaaatatccatatttttttaaataatttttaaaaataccannnnnntttatagtaagggtccaaatttttttttttgcctatagcctattttaactcagagccggccctgctcttaaataacgtatatttattagtataactataattctcacttttaattttacgtttgagattaactacacattgttgtgcagggcattattgatggtgccaaatgcaaaaaagatagaaatctttaagtcaatggaagagtggggaagagaaaacattttacctctattgaagccagtaaatcaaagttggcaaccacaagattttctaccagaaccaacatcagaagggtttgaggaacaagtgaaggagttaagagagagagtaaaggaagtaccagatgactactttgtggtgttggtagggaatatgatcactgaagaagccttaccatcctaccatgcacgaatcaatgggatcaacaacttccacgacaaaacaggtgcagatgagacgccttgggccatatgggcaaggggttggagtgctgaagagaatagacatggtgatcttctcaacaagtatctttacctctctggtcgagttgacatgaagcgaattgagacaactattaattatttgattgcaagaggattggtacaaatttttattaatgtttttgttataatgcttttatgttttgcgtatatttattggttaaacattaatataaaaaccaacacaaatattaaatataattatgtataatcaataatcttagtatataattataaaaattacaagatttactttaagcaacaagtttagaagggtcattaaaaaaataaaaaatcttaggtgattctataatatacattttaaaatggttattttggtatacttattatttattacgatatcttgaaaaaaattcagtcgatttattttatttttgataaattttaattacatacataatattaatttaattaccaaaactcttattatattcatagagttaaggctaagtagttatgaatgtaattttttttgaaattattttacaaatacataaaaataataaaaaagttataaaaatatggtttcacgaaattttaaatatttttatattttttttattttattnnnnnnnnnnacggtctttttatgttgtactcttgttaatttattgttgattttttgttaactgtatattattttgatgttattttcatgttgcttttatgtagtttttttattgcttctatgaaaaatcgtaaaaatataaaaaaattccttaaacgtaaaaatataattttttttataaaaaatggtgccttatctataattatccttttttttttacaaatacattttcgaaaaatcacatttttttaaaggaaaatacttatattaacatcacattacattactcattttaattttcacattgacaagaaaatactt

SEQ ID NO: 56867 - DNA, 2921 bp, Cannabis sativa
atacaacgtcggctgccaatgttttaggttcaaacggactgtatgcaggcggtccgtcttcttcatggtgaggatatgggttatcgagaggaggagggtcttattatggagattcaaaggttgcttcaacatcattctgttagtggtttgcgatttgtatttcgggaagctaatgtggtagctcatgtattagccaattatgctttgacaaacaaaattagtgctacgtggatcggtgtttctcccccttgtgctcgtcacgcaattgagcgtgacttgccatttctttgtaatcggtagtgttgcttaatgaaatccttattctcaaaaaaaaaaaaaaaaaaaaaaaacaacacttgtatcacttttgatagtgcttaacatttttttgtttttgaattattgtagaactttttttttttttttagtgcttaacatttttttgaattaaagtgctcattaacatttctcttttcgatttattgtagaactttttttttttgtttttgaaaaataattattatagaaccaagctaaaatttatacaattttatttttttacttaaaaaagaaatataatgaatcatggaaaaaataaaataaaataaaagaaaataatgtaatagtgtcattcattcattcatggcggagcttcggcgtcgtcattagatatagacactacttcacattatttacagttctgaccaaagtcggctacgttacctttcttcttcttcttcatttgaccgtttcaaaatctgatctttctccattcccaaatcaaatcatgctattctcaaggggatttcgtcggattccgaccaccaccttcaatgggttttcccgttggttcgtctctcaccgacccgggtactcacagtcacagaccactactcattgttctagagattcaacccacaaggttattattactgctaatgaatagattcgttgtttcaatcatatggggtttaatcaaggtttttgttttgatggctttcgttttgtttggtagatttttggcggtttcgaagaaagtcgtttctggggttttgctggctctagataccaaattcatcaccagagtagctccttagttgaggtaagagtattgggtttgctttcatttttgatttgagttactccattttcaaatgttgagcatttgatttttctttttcaggaagaattagaccctttttctcttgttgcggatgaactctcacttgttgctaataggttaagggatatggtagttgctgaggtatatgtttgatttgaacttggaaggaataatagtttggtgttttgttcatatcattaggatcaagttttgatttttcctacattttgatcagatttatataaagggtttttctcattttgtttaattcaggtgcccaagcttgcttctgctgctgagtacttctttaaaatgggtgtggaggggaagagatttcgtccaacggtaaacagaatatacatcccatttgagaatcttatagtttcataaaaaaatgttaaatttgttcttagttttatttgggttcaatcaaatcaaactcttcactttcaaattgttcattcactttgttcttctacagtgaatttcttattactgttggtaatcatttgttacttttctaaaaaaagtaaagtatgtattacttatatgtataactattttaggaattacataatgctttaacagtaatttgaaactttatgaatttaggtttgtttactgatccattttctttgtgatattgactttacatcctgttatagagtcagtgatgtgtgattcaccatgagtgtgacttatctttttatatgtttcggttaaattacaattactagttcattcttctctcttattttcttttcttgaatgcaggtattattgttaatggcaacagcattaaatgttaaggttcccgagcctgctaaagcgttagcagatactttaacacccgagttacgtacaaggcagcaatctgttgcagaaataacagagatgatccatgtgagcccctaaagtattttgtaaaattcttttgaatatgttaaatgaaaaatctgttatttgaaaagtccaagaattacaaatgttcatcagatgatgcttgaacatgttaaacatgattgtttgatgaattcgactgccctttatttgaacattattgttctgtggcttaagaagggctttaacaatcaaatggttcaaagaatgctgtccaatgtttatcaattcttgcgataatgtaaccttcatatctttccacttttgactattatttataaaaagacaataatatgtagttgaaaaatgaggatatatcactgttcctagcactcgggtaacatacttaaccctagcttttgcgatcaaatgatatatttcggaaagcttttcttgtgatactttgtgaaccatgaatttcccgttacattggtttggttatttttgaaggcagaagtgtttcatcttgttgattttccaattttttagtcgaaagcttgatcctctatgaaaatctatttatattaatgtgactatgctatcttaggtggcaagcctactacatgatgatgtcttagatgatgcagaaactagacgcggtgttggttcgttgaattgcattatgggaaacaaggtatatctgtcattattttttcattcattgagttgcctttctttttgttttatcttgtaatatttttcataagatgccctcttcgagattagaaaagagaaactaattttttatcgaatttgctgatgtggagtcttttattttaagattgacagcttaggagtgaatatattgacaatttgatcttttaatttttattcttgcattgaaagaatcttttgtattcgcttgaccttttctgcttgtagatgctagctaagttgt

SEQ ID NO: 56868 - DNA, 672 bp, Cannabis sativa
cttcttgtacaattccctcatgccttgttcactcatatgtccgagcctttgatgccatagctgcatatcactttctaagccttttactgtatctaccttagccataggtatagtttcaccctcgagtacataaaattcagctagcacattagaggaagacacgtgtcaagctgggaagaatatgaacccaaacacgtaattataattacacttgagatggataggattatgttaaaagtaattttgcgtttagttttagaataaattggactattttttttaaaaaaaaaattaaaatttagctaaagttaaaatataatgataaatgaataaaaattaaacttaaataataaaaaaaaatagaatgataaaatacaataataaacctttatagaaattaataaaatttatattttagaaacataatatatcatactgtaactaaatatgtatatatatttatgacacttagttgcataatatattatcattaataataatatcatgatttcatataataaaaatatttgaataataaaatatcatttatattaaataataatttaaataaattatttaatttaatactaaatatttttataaaactttgttgtaaatatttttaataatttaaagaaaatcaaattttttattatatataattgtagtaac

SEQ ID NO: 56869 - DNA, 758 bp, Cannabis sativa
tttaggtctttctatgatatttgatatgggagaaattaaactgtatacctattttatattactaactctcatttttaccctcttttttaaattctttcatttctacatttttttttcagacactataccaatcttacccctgtcattacatgatactctattcccctctaatttgatttgcgctaaaaaaaaaaaaatactgctagtacccatcgagatcttcaaagtttagcttccaattgttgtgcgctccaactccaatgattagaaacccccattttagccatttgcgtactgtactgtcgtgggcttcaaaggttcagaggtagaagggtaactagacacgccaaagctgatttatttattctacctatttgtgtttcttctctcatgaactgatcagaaaaaggagttcctttcagatttaactctaaaatctctcctctgccattagcaacacataggtatacctaaaatctattatgattatatatgtgtgtgaaatctggttcgattcatagtgcaaaatttgctatgaatacataatattcaaatggccgtatacgacctgttttcctttgaaattaagaagaaaaaaaacattaatggaggcctaacttttctgtgatgagttgtattgtttgcatttctctgatttgggtttttttttcagtaagacaacaagataatgttttcttctccaaccaaacttttatttgataagctcatagttctttttgataaaaaaaaaaaaaatt

SEQ ID NO: 56870 - DNA, 802 bp, Cannabis sativa
gacagacgtcttaactcactcttcccgtccagccacaggactatggctcgcactaaacaaacaatgcgtaaagtcaacgtgtttgaccctcacatgctcagcacgctaccctacctagcaccgaacaggatccacccgtccaggaggaaggggatcatgaaggggacgctgaggtccaggagatagaggagcagggcgatgtctgccctggcagttcttctaaggcggaggaagaggaggaggctgcacctccaaattttaggggatacaactaggctagggagccggttgacggggacggtgatgccctggtttaaggagtggactacgtcactaaggagcttactgttgcagtccctcaaaggagataaagtgcctttggtgccaggtgggtaagtcctccgtccaaggtcactgaggcacgctaatgggatctcgaccaaggcagctatctgggcaagctggaatgttatgttcttgcctcgaacaaccgagcctccaacccgaagaaggggatgtgcgcctggtcgggtgctcattccaaacaaggggaactgctgcctttgcacccatactttaggaaggtggcaaacttcttccacctctgtccgacccaattcactcccaagggcatcaagtgcttgtttgccctgttcgttctctatgccacctagaagtgggatatggcttctcttcatgagattagctggtttattgatttgaagtctactcccaagcaagacaggttgggatacttctatttttctcagtcagacttcaagtggttgacgggcacttggga

SEQ ID NO: 56871 - DNA, 1731 bp, Cannabis sativa
gaccctccctgatatatcaactagtcttccttggagtggatctctgatgagatcctggcctcttccattggttctctgattgaaccgccttattaggttgttgacttctctattacagcgatctggctctgcttggtgagattgaaggatgtactgttgttcatctatctatctcaagaattcacatctatactgagcgaataaatcacaatcagcagtgcgtggttcttcagttaggctggcttgatagacgacctctttcagtcttgctaactcgagatcttctcccaagtccacatggggctcgccaattcctggtcctatctctccagcatagtactgaagaagagatccaattgttattccttggggctgtttcccaaaggtccttccttcagtgggaggcgccagtggagggtcctccctcggaggcaagggcctgttgttcaaatccattgggatgtttgtgtcactctggccagctgtagttgccagatttgaggtgcctgccgtggtggcaggattgatcacatctgcagtgttcatgagaattctagtagtggctggaacatggacatcaggatctgcactcaaagggtcttgagcaagacctaatgatgcagatggtgcaactggagttctcctcgtgtcaactatggtgcttgatcaaattacttgacaactcgctatcaatgaaagtactaaattgttgactcagaaattagccaaccgacagcagagtcgacttaatgttgatgcttgccacatgctacacaattagaactagaaagtaaaagaacataaggattttatagaggtttggccccctgagttagtggtttgtgacctactccccttttagttgtattaataccgagagataatactattcatatcactataggtgggatatgatatagctctcttaaggttataatctaggaatcaaagatggtaaatctcaagtatagagagaagctatggtgggcgtgagagagagagagaatgacttatttgacttagagtttgacgacttagatgacatacttaacacttactgacttagggttttagggttgagttaagactctttatataggagagcttaaaccctaattaacaaataaaataagtagatattttacatattaaattggtaaaatataaatgactaaaatgtcccttaaaaataggtattttccatccagtttattgggctgttaaggcctaattcgcaatctagcatgcaatccacgtgtaaggttgtgtaccaaattcctgctaggccaagtttttgccagccaagcacctgcaagatccaggttggccggccttgtgctatccaaaagctggtctgccatagggtcggccaagggtggtcgccagccccttaaggtggttggtctgtcattcgtcgtcctgtttgagtgtcaggacctcctgttggctagggtactaagtagatgacttgaccttcttcttggtgagttgtattgccacgtgacactgatattgtccacgtaagcataccacgtcaagtgaaaaaaaatcgggataacaaacactaaagaaaaaaacatatatgtacattttaagtgtcggttgtaaaacgactctaaaactcaatagtgtcggtttaaaactaacaccaaaactctaaccttttatcactgtagaataagtgtcagttctatgaactgatactataggtataagcatggccggccaaag

SEQ ID NO: 56872 - DNA, 806 bp, Cannabis sativa
ttataatttaattatttttttttatttttttatgcaaatcatatatttctatttatttattattatatattttaattttaatttaatattatatatttttatttttgtttaagtttttttaaaagaaaataaataaaatagtttagtctatttttaaaccaaacacaggattactttcatcgtaatccaatcttgtccagtccaatcctacatacgggcccatgtggattaaataaacttaattattcaataaaatgtccaattagtttttttaaataatatattttagattttttttaccactatatattaaaaaatatgtaaattttgtcagtaaaatatgctcaattatattttctggcccaatgaacgatcgagcatgattactagagtctctcacctactttcaactgtttcaacacttttttcttactaatttatctaaaaattttgttatattcgttgacatttgttcatgtaactaaattaaaaattgaaagaactagtaactagtcactatgttatttcgtagaatcataaccagttaccacttaaagaaaatatgtaactatagtgtatatttatcatgtcgactggtagtattatttatataaataagtctcgtgtttctttttttattgaaaccaaagatcaaaatttatttattttatttgtttgttatgggatgccatattattaaaatttcaaccaaagtaccatacttgctagctgttaaaatgattacacagccacaaaaaaagaactttttaagcaaaacaaaacaaacaaggaagagactatgacat

SEQ ID NO: 56873 - DNA, 744 bp, Cannabis sativa
gacagttggatcgggtaccttgggaatcaaagtaatgattgacttgttaatatcagtcatgtccttgccttcattaagaacaccaagcacaaggctagtaacagaagggcctacaatattccaatagtgttggtagaacatggcagacattccatcacaacctggacttttatcaggactcattgattggagtgcagcatatacttcattaccagtgaatggagctgttaaggacatattcatttctgatgtgattgttgtgggaacagcattgagaatatcttgcaaagagtcattatcgacaccatcagaactgaacaaattggtgtaataatcacaaattacttgtgtcatagcagccttggaactaactggaagaccgtgagaatcatgtaaggatttgataacattttttgatttcctagatgaggcatgagcatgaaagaattttgtgttctggtctccacattgaagccaatccactctagaacgctggtgccaataagtctcctcttgttctaacaattcatccaaaatggcctcagaagttttcagatctaccattgttgcatcagatctgtctgcaacattgttgagccgagagacctcctgctgcatttgtgatatattcttcttcatattgccaaattttcgaacatgccactgctgtaatgcatcggtgcaggagtgtaaatttgataaaaaaccgtctatgccacttgtggaagaatcagaccaattggc

SEQ ID NO: 56874 - DNA, 708 bp, Cannabis sativa
ctagagagttccagagaaagaaaggcttcgttttgtaagagtttgttcaacgtatgtactttgttctccatctgcaactgtgtggtgtgctaaactttgttattgctagctttttcctttgttgttcccttggcccttcaatctacaattcacattttaaaaatcaagttattgaatatatataaaataacaaaataactttacttcacacgaagtctgtaagtcttagcaataacaatatataaagatatatatatacaatacatataaataacaaagaaaagatcaaatttactttgcccgagaattatacttctaatatctaatgatttaggttgtccacaattcaatagcaataaaagtacatttaacattaataatatcatactatatgaatatatgaatttagtaaagtaatactagcatagcatagtaaaataataagaccaacaaattaataatagtcttattataaaagaaaaggagaaaaacataataatatgaatgaatactacattattatataatgataaactgtaaacatataaaaatcgccaacacaacaccactaattttaaaactacaaggaaaataatgatcttagatagaaaaaaataatgataaaaatcatatagttatagagggtactatacaagttgaaacaaatcacacaaaagagtaaatatttacatttctcgcaagcaaagt

SEQ ID NO: 56875 - DNA, 1571 bp, Cannabis sativa
ttttttttttttattttagtagagaaggacttacaaacttgtacacacttgtcagatattattgtgtgcattgaaaataggatcattgtccttggtaagatttttattttttacctttttcaagtccgcaattagatgttgtcacacgatactgaaagtaacactttataatggtagtgcatcctattcataactcctaattatagaatttcaacttactcacaagatctcaaaattataaagagtacatgacactaagataaatatcatcaaaaagcataaggatgttttgtctaccaatgatgaaagaaaataaatgcaagataagaacacctcaaaataaaaaatcaaaataaaaaactaaatgaaaaaaattagacaatgcaaacctccaaaaatttgattagggttgtattatactcaaagatttgatttcaacatttccagtatctaaagtgactctacagaggttgtgggtgggattaggaatcctagattgaatattatttttaattctattatagtagatgttaatttttcaatggcagctattgatagtgattcttgtgattatttcgtgttcagcaaatggtattatttatacactcacaacctctattattagaataagagagcgtttgtagacgaatgttgttcttgtttaggaatctaatttgaatattatttttaataataacttctattattagaataagagagcatagaggaatgcttcttgttttttaagttcttctataatagttgatttgatttaatgaaatttggtactttctttaataataataataattttttttacccaaccattattttaattctaaaagaaacttacaataagactagtcaaacaagatgaaaagtctttattaggtatacttttcatctttcgaagtttctcaaatacttatatgggttgtacataaatttttgtaaatcccctaacccgaataacctgtccaaatcaaatcgaaataacccgacgaaaaatgcaaataaaaaaatccgacgtaaatataacccacccaatctttatattgggtatgttgaaaataatatcaacccgcccaatcaacccgaactaaccggaccaacccaattaagagagtttttttttatatatatatttttattatatataatctatatattatataatttatatacatatttataaaaaatagaaagttcaaactattatatttttttatggcggatgatttgaatcttaaattcaatctttatatttatctcattatcacaataactaaaatataacagttgaatgtgaaaaaaaaaataaacattagtgctcggtttggacgggttaacccgactaaaccgaccaatttattggatgggttgaaactttttttttttaattgagcgggttgcacttaaatttttgtaacacaatctttacatttgattaaataaaatgtaatgtaaaccgaccaaattcaccaactcaaaaaagatttatttatttatttatttttttggatgaattaacgtaagaaagaatttattttttccataggtactgggatatt

SEQ ID NO: 56876 - DNA, 881 bp, Cannabis sativa
ctctgtcgaagttaagcaacgaccaggctagccactccgagcatacagtagcaaattcatgacgaaagtgaccaaagtttcacgggtaatcgaggatggaaggttagtcgtgatactggggggcatcgaagtcctcggtgaactttggaaagatataaggaagaacaagtcggtagactcaatgagtgatttccttcaccgagccgaaggcttcatcaagctcgaagaagtcattcaacaagcagaaggtgaacaaaagcagggcatgtcaaaggctccttccactggaacatccgcccaacttcccaactacccaaataattcaagctcaagtggcaagcgttccaccaacaaccacaagcaagggaatgagaagaaaggaaagttcactgataaatccagacagactccccgggagaatcacgccaaatacactgcattcactattctaactgaagatatagaaagtgtatatatggaaacccagtcgttgatcccgtacaagaagctctgacccatgaagaaagataccaacaaaagggacatgacaaagttttgtcggttccacagaggctacggccacgacactaacgaatgctacaacttgaagcgggaaattgaattcctaaaaacgaaaaacaatccacacctgcagaagtatgtcaagaccgaccaaggtcagaacgaccaagatttgctacctccatcggtagatagacacttacaagtcatttttggaggccctcacattgctggagatttgggaaagctccggagagatatgcccgaacagtgcagcacgaacaagaagaagtcatcctggtcgtggaagaaaggaagcccaaagttccacgagtaggagagtcgaccataaccttcaa

SEQ ID NO: 56877 - DNA, 993 bp, Cannabis sativa
gggtccgcggtggtctttgggtccgtgagttgttgggtctgtgatcgtggtggtcgtggagagaaggggccaaggttgtgagtggtgggttgtgggtcaaatccttgggtgagttcagagagcaagagagataggggaggaagagagagggttagatatttgaaatgggaggggtagaattggattttataattaaaatgttaacctattctaccaatataggttaacttaggtgtagaaaaataattttaatctaataaatgtataaaaaatcaaaatttttatataatttaataattattataataataatatatatgtatttacaattataaataaattaaaataataataaaacttaaatataacattcaatattataatttaataacttaaaaatgtaaaactaaaactatatgctaatttatttatagagtgtgctataataaattgtaagtaaatatttaaattttaatatgattttttgtaaaatattattgaaaaattacataaatataattaaaattataaaatatatatagtagtttagtaattaacttatattaattgtaaaaaaatatgaaaaaaatataatacgaatttaagtttgaatataaaaatggattgacctttaaaaatattagtacgatataatacagttcatattttaaaaaaaaaatagaaagatatacatgaatttaaaacactgatgtaagttgtaactatagtaccaaaaccaaacattacataagttagtgtattgttatatttatgtataagttcaaatattttaatttaataagtaattccaaaaatgtaaatattatattatatttaataacatatttaacataaaatttataattatacgcaataattataaagtttatataaaaacaaatcatccaataattttatttaatattgttaattaaaaatatttgaattttttttttattactatatacttaaagattaaaaatctaaatttac

SEQ ID NO: 56878 - DNA, 1001 bp, Cannabis sativa
gaaatttgttagattttaacttttttgtaagtaactgtataaaagtcccacattgtttgtaaatgagaattaaactcatacttaagtctatgaatatgaacccattttactagttatataatcatttcaaaatttgtatctattatcataaatagtggttgtttactcaatcttgcttaagttctaattttgaagttcatccaatagtgaagtgattagcgacgcctgagaatgtaggtaacttttgtgtaccaaacttcagtaaatttctcaagttttgtctgtttttatattttgttttagcattttatttcaatagcattatttttgtagctagcttaaacttttattcattaaattatgaatgggaactatttagattaattttaataatattttagtgcgatttattatttatgtattgcatataaaaataattgtgtatgcatgtatgacaaatgttgaaaattagtttcaaattgtttgcatgtatgccatatcattgtttttgtttctatatcaaatgtccctactaatggacacatggaattcttggatttggaataactcttaaaagtctaaaacaaaataagtacgaccaaaagagtattgttattgagtattagtagtctttagtatcgtctaaatatgttgttttacgattagctagcgatacgttctaaatattattatattaaattatatgatactcgatatttagttagactaataacaatattaatatattagaaaatactagataccactaatatcttttaatatattttttttttgtcaaaattcactagccctctttaatatcattgcacattgaagtgtgtgaaaataaacaaataaaaaatgattggaaagtaataatgggtcaataattataatattgaattgactagtattatactcaataatacattataagtaatttaagtactattgatttttccatttaaaaaaaagtattattgttttgtctttaagtaatt

SEQ ID NO: 56879 - DNA, 1358 bp, Cannabis sativa
cttgtttataaagtaaaagttaggaatccatgcaatattttggtgttagcttctgtatgagtttgagatgttgggtattgaattccaaagctgtttttgagataattatactgttctatgctgattttgttggttgttagtgagttggttcgagtttggagcttttaagctcaaatgtgaccctttaatggtgatttttaatttacaagcttgatgttggatttttcaatctcattagtatatgttgtgtatggccaagtaggtgatctggagcatttggtacgatttgggataaaattttaggagaaatgagatttcttgtgtttttacagtaaaaaacgttttacagaaacgatctaccatttttagcagtataggaccaaaaaacagcctgtcgtttgtagcaaacggcctaccatttttatggtattttcccaggaatctcattgtttagtgttttcttgatatttagtgcattgtcatgctatctatcgatatggaaacttttaattttgagtttaagtccctaaaaagtgatttagtgtatcacttatcaattttacgtatgttgtgacttaggggcctgtagactattaagcagcagaaactactcaggttgaccagcacaattgaattcagaatcaagataagattagtataataactgcatatatgaatacatatttagcgtgcatgtcagttgccattaaaataacgtatcagggtatgggtgaggtgtacataaagttgcaccgagataccaatagatatatgttaggcatatcagtagctgtcagattagcatatcagaatattagtgaagtgtacatagagatgcattgagatatcaacaatatatgctaggctttgtcatacgaacgttctagactcagtacgcgtgggacgcaggataggattgtaattgggtgtatgagcgccttgttataatctagtttttgttatgttatgattatgattttcttactgagtctgttgactcacaaatattgtttatatgtgtaggtatagacaaagttaaggttgaacgacagtgagcacgagcgaatgaagattgtacatatcgggatagttagacttagagtgttcgatcttcggggcagcacgctttattttaataagttgctaggcgataaattttataactaaatattttaaaaaatgtaactttaaagatgggatctgaattacgtaaagtatttatttattcaagtttaaagtttaattaagaaaattttaattattcacgatttttcataaactctttgattagaaaatgagtgcatagtattaaaaaatcatgataaaacatgcctaatttactagggtgttacagggtc

SEQ ID NO: 56880 - DNA, 888 bp, Cannabis sativa
tatacctgataatttacttactctgttgtaagcaacttacattagtaagaagctagagcatttttcaaatggctgactctaatggaggtcacttgacttccagacatggagttcatttatcttaggagctatttctaactactctacaaaaaacaaaggccacgaaaataattccctaagcatcaatagtaagaggtcttatgtatgcttttgcatgcactagaccagacatctactgttgcgcgggtgcttgagtaagtattagtttaaatctagaaattggaaaattggaagataattaaacacatcttgaaataaaggaactatatgttagccgataagggtagtattttaatacccttaggctacaccaattcaagtttctagacttgcattaatactagaaagtctaattaagagatgatgattacattggggtggagtagtgaagttgggagaagagtaaaaccacttcaaaaccactaactctactagcatgactgaataataaggttttcctaaaggcaattagaaaattattcagactcgggaaagtttgatacaaatttttggcataattctagaaatagaataattgttagtgtgactccgtgataacacaaatgcaattgccaaatagtaaagaatcatgtaccctaagaggagtaatgcatataggtgaggaattcgcaaaatgcatcaattttatgactacggaagatgtgaggatggagaaggttgatactgaatacaacctatcagatcatattacatagtttgttccaaatactacatttgataaagacatcaagtatatgagattaaaaagaaatacactattattttatattagtgcaagtgggattttgttgagattttatgccctaa

SEQ ID NO: 56881 - DNA, 1094 bp, Cannabis sativa
aacttatattgatcatgcttatacggttgtagaacactaatgtagtagttaaaaatgattgaatttaacaatttattaagtaggcttgtaaatattgaaacaaatatatttattgcggatcatttaaaatctaattttaagtatcaaaacttcttaaaaatttatcgaaactaatgactaaacaatacctacaagaatttaggaaatacaaatgtaaatttataataaaaataattcacagttcgttaaatatatattttgtcaaaattaactttgttttgtcgatcttaaattaaatatttaatgacttattacattgtaaattcaatgctcatttgagttattagtcttgatgtcatgttaatttttttttaataatcactacttatctattaattttaaccattaatttaataaaatagataaaccaattataaataaataaataagcattttttaaaagtcctagttactataaaaaaaagtgatagctactgttagtacacaaaagttttgagaaatgctaaagactacactgatagagctcaatactattataaagtgatgtattattattgatattatatatagagatttttaaaaattggataataaagaaattaaacttaaagaagaataaattaaagacaatgcaacaatgatttttacgtggttagaatgttcacgagccttagtctacaagctaatattattaagcttgaaaaactatggtgtattcttatacaagaatattcttgccaaagtcttggaaccctaatttttagcccttaatttgtgaaatgagtttctaaccctttacttgaaggggtgatgttctatttataggctagaatcatgtttatagtgtaaaccgagacccgttaggatttgcatgtattagctaagctcagtgatggggtaatacaatattatattgactttgggccaattcggtgaggtccaatttatgagaaacgatccttcgtataaaaggtgactacttgatagtgaaaaatgtcgtgcatcgtcgatcctacaaagtaaatgtcacagaagaaggcattggaaaaaaggcatgtcccttttggtggtga

SEQ ID NO: 56882 - DNA, 879 bp, Cannabis sativa
tggagccgccctccacaacagcccactctatggtgacctactctgtggtggcctacttatttggacttgatccacaggttgccccttatgcatgtcgccccttccataggtcgcctctttcacgacgttggtcccacttgagggtcatgactctaatgccactagacacaaccacttgggtagaactcactctcaaaatttagcctaagataggagggtgctcaagtgggttatatactactaaccaatcccatacttggtcaatgtgggatccaaacacaatcctattctgcctcatcatttcattgactctttcttcttcaaacatatgaattaggaatgagaactgattgtaaaataagcagatcttacttacattaagatttgcttctgctattttttcaatttgggttgccttctcactagcaatttttgcagccaattctgctttcgccaactcttccaccttgttcagcttgaattcagcttcatgctcctgcaattgtaaattaccaaattaatagttatcactcggatgcttgaacactgataaaccattttgaggcagagaatgattttgtaccaactgttccagctctgtcttgtatttctcttcaagtttttcttgaagtgacttgagtgcagcagctgcttttgttctttctctctttagttcctgaagcaaaataaaagctttaaagttcagtaattcaaagctgtcattctctaaatagtgagcaagtaacagaaattttatatcttcagtttcagtttgtttactcattttttaaggatagagattgataccaaagaaaacgtagaattatctaaatagacataaacttgtatagcacgtttgcttgtaattcttccttcaag

SEQ ID NO: 56883 - DNA, 888 bp, Cannabis sativa
taagaacctgacaataagagtcatcgagttatttttaacatggtcagttaagtgattgtttcatttgaacacttttgcaaacacatagtgtgcattgtctcagaattatttccatatttcaaatagaaattagtcaaactattttcatcaatgagaactatttatgaaagtttatggcagaaatttaatgcgatccacctaataccaaaggaaaaaaaaataatagaagaacaattgacccaagcaataacaacgtactaaagaaaatgaacaaaaaacaaagatataaagcttttaattgaaattaatatataccttgtatggacacaatttcttcctgagctttgtaaaaccagttcgcctgcaaaaacaacaacctagaaaatattatgatatatatagattagaaatatgagagagagagagatagatttaaatatagatctagaaatagaacttaacggagatctctagagggaccgctggttgtgtgcttggccggtgggcggaggtgctgggtcggagatgagagagaaggtcgaagatgagagagaaggtcggagatgagtcggtgttcgtagaaagagtggaggaggcacttagagaggaactgaagtcgggtatattagtcgactgggagtgggagtcgactgatcctaaacgatgatgatacatataggattcaaaataatattaatttttaaaacatttttttttgaaaatatttttaaaacattaatattaatatatttagataataataatgctaactgttaaataataatatgttattatacgggatgtggctaagatgatttttttttttaatttaaaaaagattgtttaatttttttagatttaattatttaatttaaaaaaagattgttt

SEQ ID NO: 56884 - DNA, 527 bp, Cannabis sativa
actttaatccatttgtctcaggtggttttgcatttgcttgaactttaatacatgaacaaaatttaactttatacatttttcttcaatcattttttcctttataatattccctataatcaaattattttaaacactcattccaaacgccaagaaagataattttttgtttttattttcctatattttaggaccatttctccttccccaccaagataaaacaaaatgcaatgacaaaccaaaaatagctgtgaaaaacacttgaagatctggagtaggagagcggcagggcagtgttggttgtcagtttggacaataatttcgttgtttgttaccaataacataaacatggaacgagatccactctttaagcatctcaacccttctattgcagttgttacaaaatctaatgcggttttttatgcttattttcagttttcaaaccatatacataccatagaaaagccacaaaatcaaataatatacaagaaaaataatcaaatacaaattttaaaatttagggcagttaa

SEQ ID NO: 56885 - DNA, 711 bp, Cannabis sativa
aaattattaattttttttatgttacaaaagacaatataaataataaataatctaaaaaaatgaccattttgctacaagttttgaaatggggatatttactaacatagatatatgatttgatgccatttactataatttccctttaatatatcattcatctaattataaatattaatataaaataaagtactttttttttttaattttaaccaaaaaagataacaatattacaaaaaaaacttttagccgaccaaataaataaatatacaactcaataaaaaaaaataacacaaataactcttacgcacactttcaacccacacgatccccacttcctggaattgaaatcttcatgtgatgtaatgaggtcatcaacgatgaaaaaattccagcaggcgagaaagcaccattaatttcggcgatgtcacctaagaagaagaacaaactcacgcacacaaccttcgattgaccaacccaataacccaacacaaccgaaacgaaacccaactagaaagagaactaccattaatttcttcacttgagaagacagcctgaatcaatcaaaataggggctgtttcgaattcatgaaaaaaaaagtatagaaaactgatttatgacccatttttgaagccttttttttgcaatggagatggagaagcaaaactacaagtaatggccattatatttatgaaatgaaagatatataaaaa

SEQ ID NO: 56886 - DNA, 1675 bp, Cannabis sativa
aggtgatagccatgcattggctagtacgatgccaagttttttcccccacttcaggccacagtacaaagcatgcatgccattgtacctgcccaaatgatccaacaaccatttataagagccattaaaaaaggggaggcccttaagcgacacgtatgagatgtccagacagtacgagctgacacctctatacaccatgtgatggagcggccacctactaaattaacggtcggatctcttctagctagaccagctcagaaggcatgtgaatgaagatatcacctataagggcccctgcatttcacgagatgaagaacaactctggagagtctgaaagactattgtttactttctaaaactttgctaaaactcttattgagcttcttcttcttcaataggaacgagaggaatacatggttaaagtccataatgtaaacatctgtaatattcgttacttgtcgataaggcctataaaattgactagtggactaaggataaagaatagttaacgcctgaatcaagtgaaaagccttatgtttattattcattattttacttctttcttaagctctaattattcgaaatctgaaaatctcagtaaacaaatatgatttagaaaattaccaaccaattattgtatatgtgaatcggtatgatattgagcactttaaaatgtcacatagcaataatagtacaaaaaattatttaaaaaatatagcacagagatcattcatcaaaataaaaaaaaaaaaaaaacacaaaggattaaaaaaaattactattattgagtagcacatcgatatgtcattaaacaccttatgttgccaagaaattttttaccaaaaaaatagtatatatataaaataaaagtgaatatatataaattttttacaagataataaagaatttttttattgtaacatctatttgtatataaatgttatagatatatgcatattatatcaatatttttagtataaatatgaatatataataacagtatagttattttttttaaaatttttaaattttaaatttaaatttattatacatatttctcttatcatttattttatattaaatatatctataaaacataatttttttatattgcaatttaaatttaaaattattatacatatgtaaaaaatatctttatattatctttttttactaaaaaatatagttctattgttactttttgaaaaaaataaaaaaaaaaggtgatatttttaaaataataaaaagtgatataaaattaatagtattacaataattaaattaacattataattaacaatatttgaagtattattatatattttttttatataaatgacacttaaattaaattttttaataaaaaatatttttatttattaaataatataaaaaaaaactaattatagaaccaatattaaattttttgaatataactaaatatacattatacatgtaaagcgtatgatcacgaattaatggctaattaatgttattattgctagagtagtcaataatcaaacttttctttttctttttttatttattttttttgtttttttaaagtaagctagatttttattctttgaagcttttctggtcatatgactgactgatcatattctttggttatgcatttgcaatgaaatgttttaaagtgagcttttgttttcttttt

SEQ ID NO: 56887 - DNA, 1975 bp, Cannabis sativa
tataggaaaacctcacataagcgggcacaacaagtagaaaaaaacttacaagattatgtataattggaaagaaaagttaaaattctaattaaagtgaataaagatatgcagatattaagagcatctcaaatgtagagctaatactgtggtgtatatgcatattttagtttattttcataaaaataaactctaatggtggtatataaagtggtccaaatttagcacatgcttaaagttaggggtggacattcgatccaatccaacatttttcttctcattcgatccaattcaattgtaattggatttgaaagatcatcatccgatctgattcaattaggcctcaaaatctaacaattactaattgaattggattagctttttaattagatatccaactatacacctaatttttaatattaacataaaaatatgatgaagaatacgcaaaaaaactaaatatcacattttatttaaatttaataatctataaaaatagtattgttacgagtctaatacgactaaaaatttgtaataccgcgtcaaaaaaaaatttgaaataggtaaaacaacaatgttacaaagtaataaaatagacaaaatatcatgaaaacaaatagacaaaccaaccaagtgttacaaattcaacacaaaataaagtctactaaaaatataattaatatatatttttttattatacatgaataaatataaatatattttttatatatataaatgtaattggattggatcattttttaattgaattttgagaatgacatccaataaccgatccaatccaattagaatctgatttttaacatccaatccaatccaattgtaattggatatccaattttttgtaataggattggattagattgattcggttcaattagactggattgaatattttctacccctacttaaagttgtgccaaatttaagaaaagttatagcatgaaccaaattttacatgcaaaaaatattactttctatttactcttttgctatttattaatgtaattaatcatttcttacattttatctatatatttaatagaagttttatataattttaataatacttaatgattttgtttactttttacacctttctattaaaaaattattaattttaccttaagggctcgtttggaacgtcgtattaagtcgtattgtattgtattatattgaattggattgtatatcattttttttatataatattatgttaaattttaatttatactaaaataatatatttaggtatctataaaagttaatagcacatgtagttttacattaaaatattgcataaaatataatttaatataatactatacaatacaatgcggtgtaaaacaacgtactaaatgaaccctaaatgtattggagcactattataaaatttgggctaattataatattgattcatttttagctgaagttatacactatttattggagataataaggaaaatactgaggtgttaaacacaataatggtgacatatcgttattggtgtaatttcaatatcggtcgtacaaattttgatttagtgactaatatgaaaaactgctaaataattattatttgtataatattagatattttaagatactaaataataatattctataaataataataataatactaatcaataatttaccaaaaaattattatactaaaaattatacataaaataattattcataagaaaaaaaattcacaaaagttgttgcaattatttttttcattcataagaacattttacgaaatttgttaaatattataaatgatagcaaactgatattagcgtcaagcacaacaaaaacaaaaggtagtaaaaataaaaccaacaaaaaatactgtaaaaaaaaaatcatacaaaaaaaaattgtaaaaaataaaaataaggctaattagcaatttttctttccgaatttcgacaagtactaaatcatgcctcct

SEQ ID NO: 56888 - DNA, 3831 bp, Cannabis sativa
aaccagtttccgtgaattctaatcgtaatttatgtaatcatttttttaagtgagattattttgttattttttgttctttgcctcctatttcttttgctttggtggcttgtaattttgtcaattattgcatattctgcaattgtccgaatttgccacatcttgagcatttcattaccatttttgactctctagatttgattcttttctttgtatcattccatttatcttcataccgaatcacgcacatgatggattccatatctgcaatatatttaaaacaaataattagacctgttgttgacattttttttaataaccagttttctatgtgtcattttgtatagttattgtaatttctttttttcctccttttgatcagttttcttcaatgctatttactgtactggtttctttacaaataatctttttttatactattcatatcattattcaatgtctcatgagaataattggtttccatagttatttatatatataggacatgtctatggtgggtacattggttttgttcatagttatttatatatataggacatgtctatggtgagtacattggttttgttcttatggtaggaaattttttacaacaataataagttaaatggtgatctattaatatgagtacatagcaatagttaatatttagagtgtgttagattatttgtaaatatatattttaataatattttggaattaaataataatttattaaatcaattattttgactcctcacttaagtttctttttttttttgtgcaaattgtttctgcagtgtctttctcaatctctttcactcatcttctagttcctccaatgaagctcctgtggattttttcatctcagtctcgttcttacatattagtgtatggtaacagtgaatggccgtttttaataaatgtaaacgaaaaataaatttactcaaatttgaaacttatgcctcgcatgaaacccgaaaaattactgtctcacccccaaacaaaaaaaatcctctatatcttttctgaaattagcttcccagtccctctatttcctcctcaagtccattcatctcattttgaaaatgtgctttcaggtatgagtataaataatatatgtttaagttttatattaaaattggtttcttgtttttctcactcccaaaatccattagggtatctttttcctttacaggtttgtagtcagattcatctcccaaccaaatgatcaaatggagtattgatttatgtctgggttgaagttgcacactcagttctttactatgctaccctgcgtgatccccttcaacctcatctgcagttgaggtatgtatgtttacttaaagttagggttagaagaagagtttgaaaattgacaattgttaatgtgcactttagcttattttttattgtgttcatgcttttgattgattgttttgaaagtggaggagggtatgcagattttgtgtagttaattttggataatcgatagtgttttgatatattgacagaggggcaagatagtttagcaataaaagaaaatgaaagagaggcaagataattagaatcatctaagctataaactttgttgaaatctttgtgacatttcatttgtaatgtgttttgatgtcgtagaaactatattcgctatctagttatgccaatattactgattttattatttaaatgcccgaatttgctatttttgccctacatgtaatcttatgcttgcttgatacgtgatgtgtggtccaatttgatctcttgtactctttgaattgccctagtactcactgctcacattcgtataacagtagtgtattactacttttatgactaaatatgctcagcttctcattttttaaactctgttatcgtttatttcattatcaacatttgtcattagtaatgattgctcttcgactatctttccctgtttaatacggtggcaaggtgtacattgtttacaagtcaataaaattaatataagaatatatataagtaatttgtgtatcacttgaatgaaaatatgcacgtccattttttacttatgcagtaggaaatattcaattcttatgcataatagatatagagatggtgaaagaagtttgtctatgcacttctttgagtcttggaagaccaccttatctctccaagaatcatggctctgtttgaccagggattgtatactctagtaaccaaattttggctcaccaaaagaggactattgctcgtgagctctacattgacaaaatcaaggtaatattatatagaactatataaatcatttatatatattcattctacttaccattgttaactagttatatcaagtcatgtttttttagctttttctttgttttacatctttgaatcattttaactagttatagaactatataatttatttatacatatatatgtaaacacatatatatgaatcacttacttgggtaaagctcaaatgtacgatattaacagtacatgaacaaagatgacatatatgtattttgtttgtatttccttttcattgatcatttaaataaaaaaaatgacgtgaaattggtatacgtataaatatgcattaattataccgagatatagactcaccaaaattcatatatatatataaaatactgaatataaatattacatatatgtaacgtatcaagatataggctcaccaaagttcatatgtatatatatatagaatgctgaatataaatatatatacatatatataacatacctgtattgtattgacggagtgtattgacggagtgagacaaaaattaaaaattgaggaatatactaaaagggcctttgggtccaaagtaaattaaaacttgctttccacttaaaaatatttaaataacatatatatatatgttgtgcgtacagtgcaaaagttaaatgggtatatataatacacttctttcgagttatataattcaattttaaataggaattgaattataaaataaatatcgtagatactatctttaattttaattgaataatttaaattaaatttgagaaagtatttgataaaagataaattattattcttcacgttttggaataaataattaaaatattagccaaataatctttttatttataaaagataataaaaagatcccaaaattcattttatcaaaaaaaaaaaaatgataaaattccaaagccatacaaaaaggaacaaaattcccaaatgagttcactaaaatcattcttggaatatttaagatgtcattcacctcacaaaatttcaaagaggtcattaacctcacaaaaatctcaaaaatggtaattttacctaaaaaattaaatagtgcactaaaattcaaagccataacaaattaaatgacattccaaaaaagaggggttattcacctcttaaaaaattaaaatcggaactacgtttgacttgattcctataaaaagatacgtaggtaacttagttcctaagactaagtgcagtcgccgataccgcaaaatggtataaaatataaatctcaaaattccataaaaggtcatacacctaagaatttttccaaattttcaaatagccaaggattcctgaaagtggttatctaccagaatctttatattcaaattctaaaatactgtattttgaactacaagtggcttgatctttcacaaagaaggtatgtaggtgtaattccaaattcacccttaatttttcccaaattatttcaaatcatttaatatcatcgtaattgcgatcaaagagtatttcctttaaataaaaggattgtaattaagagattatttttataatcttggatgggtcgaacttaaattaataaa

SEQ ID NO: 56889 - DNA, 1506 bp, Cannabis sativa
ctctcaacaaccaaagaataacacaaagttcctaaaaaacaaactgtctttcctaacatggcattgctcacataactcatatgaagaagagcactaccacaccaagcatggtacagatcataaaaaaaaaaacactgcaacaccaagcatgacagagctccctaaaaaagagagcactgacacactcaaagtggcatagctcaaatatagctcctctcctcaagatggcgtggccaggagagaagtagatttttcatggctattcattgttttgaatcgtattgtttatgaatcaattcctattcattagttgtatttttttgcaattttttgaagagtcacaaaccttaacaaataaatagcttcgaattaacagatttgttaaaatattctgtaagaataagatatgtacctactgaaactatcccaatatataaaaaactcaaaaaatgcaaatgctaaagcatcaatgtaaacttgaaattcctagcaagcaccataactattttgagttgttcagtcttaattggacctaaactttttaaacacatcaccattcaacaaacaataaatgtaaaacaaagacaagcccagatctgagcaaatctatccattatctaagctttgagtctctacttttacacatagttcaaatccttataaatgttcatgaaacaaacagctctgcatacaaaatttcttatgaatgacaatgtgatgaccatatattacctattcaatcttggtttatatatgatgctctcccaaacttaaaactgccatgatggagagtaatcaaccttcaaattaagattgtcagctatataatgataaaaaatgatattgatggatgcaaaataaataaagaaccacgtctcttcaagtttaggagtcactgacgaccatatggagaagccatgttgttttcgtgttggccgaatggaggtctaggtcttgcatactctgcaaatatgacccaaccatcaagaaactgcagagcacaagcaaacagaaaataatcaaacattacaggaacattttcaaaatatatgaaatacttaaaaaaaaaaatcttcaactatataaataagaacgtatttattttattaggccatgtttgtagctgtaactgaaatcaagagaattgattatcagtgttaattctttggtattgaaacacataattgagggttccaaatttctaaatttgaagtttataaggacttgttataacggaagggtgaaaggatcgaccttcagtagagcatgtgaggtcgactcttgtgagtcaggaattgtttaaatggatcgagtattatatcacacctttaagaacaaccacgtgtttctcttttttgtttcgttttttttttcttttttccatatttacttttcaagagaaaaagggatcatattatttaaggggtaacaaaaactgaccatcaaaatattgcaagcaactgggtaagctgtacaatccagtcaagtgtaataattttaaaactg

SEQ ID NO: 56890 - DNA, 805 bp, Cannabis sativa
  modified_base (309)..(309): a, c, t, g, unknown or other
cataaaatatttaatttcttcaatagaaaaggaattatttcacaaatacacaaaaataacaaaatattacaaaaatacggtttcatggaattttaaatatttttacgattttttttttagttactaaaaataaggtcattttatgttgtactcttgttaattcgttgttgattttttattatatgtatattattttttgttgttattttaatattatttagatgttattttcatgttacttatgtgtaattttcttttttgtttttatgaaaaatcataaaaatataaaaaaattctttaaacgtaaanatataatttttttttttatataaaaaaaagtatcttatgtaattatcccctaaaaaaaagtagcttggtacaaagttagcccatcttacatattatgcaaaatttgacacacaatttacacagtctcatttagtcaaattgtgccaaaaaaaaaaaacatgacaattgttagaatttaggattgtatagttgagaaagttggaataaaatgtgtaggataaggtgggggaagatacatttcaaaattaattcacaatgagaaataatttctttatcttagtaatgcaagactatttctaataataatataccattttaataacactctattaaagatattttaaaaatactatacccactagtaatgcaattcatgtgggataagttgaagaataccttttttattaatctattaattaaatttatctctaattttatatttaattaaaaaatacctctttttagatgtattgtacccaaaataccctgacataag

SEQ ID NO: 56891 - DNA, 723 bp, Cannabis sativa
aggtaagctactttgctttgtgaacttaagattttcaagtttgttctcgattagggttttggtgatttttgtaactgtggggttatgatgagttaagattgtgttcatagggttgttttagagtatgttggagcttggattaggtgactttgatggctgctaagcttgaagtaaggaattttgaattttaaggtttaattaggattcaaactttgtaatttgtgataattgtgaaattgtagtgtttcgatgtgctgggtatgtttaatattcgatattggattgttctgaaagagtgtagcaggtttgaggagttttgtgtggtttttggggcaaaaaaaaaggttttccatttctgccaactgagaaaccagttaaccagctttacaagtgttgtaaaacttgtaaaaccagtcaaccagtttcgctagtaggggaaaattctagttttagcctcgaaatcggtttttgcttgcggtgtattttagaacttagattagggtaatttagcgatatttgaattgttcaaatctagtgggagttggatgtctggttatggagattagggttttattccagagttttgacttaaggtatttattaagttttggtagtcatcacataggaccgcccaacttattttccactcaagttggcccgcacacttgagttcaggacagaggtaacaaaagtgttatgcatcatgtaaagaccgcttagctt

SEQ ID NO: 56892 - DNA, 1493 bp, Cannabis sativa
agataagtaagtttaaaataaataataatgtatttggtagtatatgctttatatttttttgtttaaagtataagcatattatattatgtttgattatgtactttatttcaataattatttatttatttttatttttttttatttatagttcggtcacatcaaagattatttgtgaggagatttggagaagatgttcgaaccaaaattatacgagaaggataatggccctgttattgtaatagtaacttcaacaagtattaaaaattttagaggtaatttttttaaaagatcacactatctaatattttgaattataatatatttttactaacttagatatactctaaatatgtgaagttcgttactctatgacaactgccagcaaaatatacataaatctaaaaataaattatgtagcaatatcattagtagaaaatttttctaccatctccaatggtgttgaagtcattgagaggtcgaatgtgaataaaatttcacttgaggaaaagatgttccttaataagatgagtattgaagaactcttaaagactgattgaagtcctcaacttaaggtgagatttaataataaaaataattttcaaatctcttcctcgtgtattttttgttcaaatattataaaaaactttaattgtaggaatacttttttactgtgaggggcaaaataacagaaatagacaacacatttgattgatactatatctcctgccaaaaatactttagaaaacttgtacttgacgatggtgtttataaatgttccacttgcaacaagaactctgactatcctcttgtgaagtaagaaaatggttctaatttttcatcatcaagatattagttgtattattgattttttttactgtgtaaatatataattgttttaatataggtacaaaatacatataaaagttaaggacaagactgcagagacaactttggtcatatttaatgatatagctgagaacttacttgacacagcaacaaacaagttatttaaacaaaaaacaaatgatgttccaacagaaatttaaattctttatggcaaagagtttgtttacaagttgaggttgaatacgtataatttgaaatatggaaatgagaattttacagtgtcaaaggtttcaatctgaatgagaaattacaagagcaagatgagttgaagaaaataaaagataataaggtaatgtttaactttacaaagttaaatttgtgtgcaaaatatgttatcaaatgaatttattatgagtttccttgtacaggaaaagaataataatactaatgaagcaaatgaggatatttcgaagacataactattgtaaaaaatttggaagattctattgaagattatcataatagcaattcattaaccaaaagaaatagaaaaaacataattattgaagatgatagttgaaaaactgtatttttgcaaatgtcaattatatataagaaatataaaaactgtatgtgtctgcagaagc

SEQ ID NO: 56893 - DNA, 1189 bp, Cannabis sativa
ttgatatattacattcctaacctgaaaaatagagttgattggaagcttgtcaatgtttacacttccagcaatggctgggatttcccatatgaggatgatgatgagaccaagactatacaagaaagaaattctccaagaatccagttagtcgttcaactttcacaattggacgatgtcgaatatgtgtgtgatgatgacccaattgaagtgaccagtagggaccgtgagtagcctcaccatcaagatttagataattttattgtttatagtgatgatgaagacactagtgataatgataataaaaataatgtaattgttaatgatgatgatgatgattatgatgatttgtagactttaaagttttgtaatatttaagcccaccgttaattaaatcaaatacatgttccttttgttaataggttgattaattaattattcctagcttgtatgtgtagaatggctgatgtaggtgcaagcaatagtaagaaaaagagagttaagagaaagtacaaggggaaaaatattgaacaaaaactggccaagcagcttgcgggtcaaaagttgaaatttagaactcataaagggactggggccccgatagacaactatgacaacaagtttaacaattatatcaaatttcttgttcgcagtaccatttctttgaacaagtttgagttcgaggacatttaggagacgatcattcagactatctggccgatagaataacggtaacattaaaatttgtattgtaatagatcaaagaaaactatcatacaaaaaaataaatctatatgacttcaatgtttattttttttttcagacaaagtgtgagttctcaactgacaatcctatgttcgaggattatgttcttaaatcaatgtcaaaagggctacatgactggagagcggatacgaaaaaggcatggaagaagaatatttagaaatatcgagaggcggaaacgactaggagatcacatctagatatggtaacactagaggtgtgggcagaggttatcgcacactaaaaagacccaacaacaggtataagttcctcgtcggtaacttaattcgccggtataaatacttttactggtgagttaaggtgagcaaaacacgttatgctgacgaatcattgccggtgcaaaagctcgccggcaaaagtactttggtctgaagagagagagagagag

SEQ ID NO: 56894 - DNA, 654 bp, Cannabis sativa
ttggaagaagtgatgaagggacccgttgtccaggagaagtacacgtgtcgatccaacagttgggaggcggatgagcttcactcaaccttgacctgcacccatcaattggagaagatcgtgattgtggccgggatgaagccttccgcctcttgggtcttccaccgcttgccctaggaacgaggagacgcccaatcgtaactgcggtggttttggagcttgttggagccagacccacctgataatatccggagccatgcttccacttcaggactactttataaattttcaagtttttgttggccttgcgccttaccaacttattccccaagcataccgcctgctttcaggcttgtacattttttatgtagcaagaggctgggcttcacctagcccaatcgagattttatacttttacgaacttgtgtctgtccccaagaagggggataggcttaaagacagttttttcacactctgggcccatcctgctaatgagggtctggttccttttaatttttaaaagaatgtaaaagagcaccgtcaccgatttttcttttcttctggcttctaagtcgtggaacgccctgaattgctcacggagtgggttagggttcctccgatgcaccgcaccgcccctacccaactcttcctccagca

SEQ ID NO: 56895 - DNA, 1330 bp, Cannabis sativa
tttgtagataaagaaaattctttggtaagagtgtgagagtgaacactttgagagaatccaatagagaaccgatctcaactgtatttgtaataccctaatattaagaaaaatagattagcaaaccctaactagttaaatgtgtattagtatggaattatattattatataatctattatatgtgaattaatctgatatatgacatgttaagatcccgttggtgagctagggccattttagtaattttgacctgagaagggtaaaactgtggaatttaacttaattgtgtgcttatggactatattattatatattatacttgttttgtcctttttcagttgttttcttacaggtcggtgttgtatagtcacaattgagaattttgggccgaatcgggttcggggctgaaattcattttcgggattatttattggcatcttttggtcatttaaatattctgaaattatttgaaataatgatatgtgatggaatgacttatgtgcccttgaatatttatgtgtgctatatggccctaggggcaaattggtctttttgatcacttgatttactttgcaacaaaagaaaattaggaaggcatttttctagttatttctcagccaagaaccgaaccccccttctttacctctctctttcaatcgctttcaattgttgcatcctctcgatattggatttttgttgatgttcaagcttggatttttggaggtgataaagcttgattttcttgcttagggcttgaggtaatttcctattattgtgatttttgtttgttgctaaaattaggttttgaaagcatgatttttggtgatattgctcttggtgtgcttgtatgtggaggattagttggattttgatgctttttgttagttgtgttgttaatctttgattattgtgttggagtaagtttttgagaggattgtagggatttaatggatgttttaaatcagtttagtagctctaaattttttgttgaatttgtgcaaagttaagtgtgatgttgagctcaaggtttggagcctagctagtatgttgctatcttgagatttggtgtatgttggttgtggtttaagcttgaattatgtgccctaaatactctgttttgatatctataaatcttttgggatgattttgaggttatatgcatgttttggttgaatgaggtgtgagtttggcttattttcaaagctgaaaagtgggttttctgggtttttaaacccagtggtcgcgactatcatagatctggttgcgaccataacaatgacagattattttttttgggtttttgcttttgccataacttttgactcgggact

SEQ ID NO: 56896 - DNA, 922 bp, Cannabis sativa
  modified_base (666)..(667): a, c, t, g, unknown or other
  modified_base (842)..(851): a, c, t, g, unknown or other
atctaataagataattttaatataatattttaaattaaaaagataaagatatcttttaatttaaaatatggctaataataaaatatctgatcttatgcttaaataatatgtaaatataaaacaaattaacaaatttttaaaatctgaccataaataaaattaaaataatcaatttttaaatttaaaccttaaaatattaaagaattaagaataatctattaaaaaattaaatattattaatctaaaattgatatttaagtttaaatatattaaaaataatattttactttaatttttggggtttgaaattgggaaaattcgaaaaaaaaaaattgaaaaaatcccaaaaatattggatttgggtgcaaaacacccttgcagggcacacataggctacgtacagccttgtccgcgtgcgcaggaggctgcattgtagccttcgtgtgcgagcgagcagggtgcacgggtgggcttcagacagcagaggcccttcagacacgcacgtgaagcacgcctcagacagggcacttagtcaccttgtcccagcacctacgcgcgcatgagtggtgcgatgacactaagtacatccgatttttcaaaacagctgaactctctcaatttttatcggaatcgagttccgtgaaaaccaaaattgcttaatttttnncaaggaatccaaataaattattttcatggaaaagtttcgaaatacacattcaatcatcaaataattacataaaccaacctaaacacatccaaatcaacatacaaacaagattcttcgttttaaatccatatttcatgaaagcaactcatcaccatggctctgaggccagttgttnnnnnnnnnntaccaggatatagatttactaacaggtatgttgaatgaacatcataattatgaattctctaaaacaatgaa

SEQ ID NO: 56897 - DNA, 2472 bp, Cannabis sativa
  modified_base (118)..(119): a, c, t, g, unknown or other
cacaacaagtattatgattaaaaatatatttagtcacaacaaaatataatttttgtgactaatacttttagccacagattttttagttacaacgtaagaatcatgatttataattagnnacaatttttttacttttagtcataagttttgttgtaactaaaattaaaattttttgtagtgattaataataagaatttatatacagttgttgtctcgattttttttatttatttttatatattaataacaaagccttttgttaattgtaatatttaaattaacacaaatgcacaattaatttatcaatatagttttttttttcaaatttattgtttcatgaggaactcgcgttgtgtaaatttataaatttttttataataatcttaactctaatctcaatcacggcctggactcggacccgaaccctagatcaaaatcaggacttggaccccagaccccagacccaaactcggaccccaagactcgacccccaactcaaacccggacccgagtccctaacccagaactcggacctagacctgaacccaaacttggacccaaaacccaaacctgaactcgggtccaggtttgggtctaagtttgggtccgagttcgggtctgagtccaggtctaggtttgggtttaggtccaggtccgagtctaggtacagggtctgagtccgagttggaatctgtgaggttagaatttattttatcaggatcttaatttacaataatcttaatttagaaaatactccttttatgtcccagactattatgtccaacacaaaagggactcgaaaaatttatctagtctaatgttgatggactaaaaaggggttttttttagtagtgtgtatgtttgattataaatatgtataatctaacatcctatatatgaaattcctaaaatgataaattaaacatgtaaaagtataagaaaccttacattagttggagcgaaatataatgtctccttttgttcagtactctaatattttttttcaattttgttacagagtagtaacaagtaatgaacctagattctccttccttaacccaaaaagcgatagttcttcataatctaccacaaaggtctgagtatcactttaaatagtgtggattgatactcaattcacctttggaacatattttgagagagagaaatagctatagtgatttttgaaaatcaaagagaaagagaggagattttttcttgtgtcagatctagaaattaggttaaaaattaaaatagaatcactaagctctcttccatcacttcttttatatagctatcgcttagggttaggtttagatgggctttaaaaatatacaatggaccataaaaccaaagccttggccgaaatcccatgtgggcctcaaagatttgattttttttttttttttcattttgtctcatttaaatgaaacactgctatcttttccaaaatatcatttatctagttctttttatttaaatataaatttcatctatttaataattatcaaataaaatatatggaagccaaagctcatatgcaactgtacataaggctttctgctctttcatgcaccaaaaatctaagctgagttgggtaaaagagggtgatcaaaatactgcactatttcactctagcatcagagaaagaagatatcaaaataggattttatccattactaatgctgaaggtaatagagtagaagaccctaatggtatcattgtagcttttctatcatattattaaaatctgttagggactcaaatggagaaaatacaatcagttaatgctaagattgtagcccaagattctgtgattactaagtagcatgaggagctactattagcagatttcacaaaagaggaagtacaacatgttgtgttcagtattcttggaattaaagcccttgggcctgatggttatagcagcttctctttccatgacaattgggattcggtgggaaatgaagtctttgaagttgttacatccattttacatacaggccatctgctcaaagagataaactcgacagtgattactcacattcctaaaaataaatatcctagcactgtaagtggttatcgacccatagcttgttgtaatgtgttatacgaaattccactgtaagtggttatagtagacttaaacatatccttcctaatctggtggcttagaaccaagggggattcattcagggcaggtttattgcccataatatataataatttgtcaagatcttataagatatattatggaaggaaatcaaccaagcttaactacatggtcaagttggattaacaaaaagcatatgacactatggattagaggtttttagaggagatgctacaagcttttcaatttcctaccaattcattaagctgataaaattgtatcacaactcctagatactcgctaatgttcaatggcaccttacatagtttctttgaagcaaagcgaggcatgagacaagggga

SEQ ID NO: 56898 - DNA, 947 bp, Cannabis sativa
aaaacataagggggtttcgccgcaaattgctctattatttattattattattattattattatttatttattatagcacatgtcctttctaatttcttcatcacttcttaactttgtaaaggtgagttaattaactcaactcttcaactcttgttattatcttttaggagttaattatgtattattaaatctcaaaaatatatataatactcattattttggtttgaaatcattaattaaaataaattgtattactcaatcctctattcttgctataataattcttttgcattacggcttttactacactactacgtaaagagttttaactacaaacttttaaattagctttaaaaggattgcaaacttttaaatgagtttgagctcatcaaaaaaccctaacaaacccctataaaaccttaacgaacatccaaccatcttaaccacaaaaaaaaaacccttcaaaaccctaaagaaatacccctcttaaccgtcttaattgtcttagcccaacaaccactgtccctagcaccgttggcgcatcaaccacgaagatcccaccactgccgacgaaaaactctctctctagcaccgactcaaccaccaccgaaggtcccatctttctctttttttttttttgccagccatgtttttcttattgtgtttactgttaccaatttgttcgcaggtagttctcgcgggtaactgtatgcatttttttttaaaaaaaaaaaacaaaagtgttattttacgttgagatctatgattctttagttaaattgaactctcttgctctattcatcattctctgtcgttgaactgccattaaaataaaaaaaaataaaaaaaacacttatggtggcggatattaacaaataactgccaccatatagggttcatttagaggtagttttttcgatccctttagcgatccctggaatacttat

SEQ ID NO: 56899 - DNA, 1408 bp, Cannabis sativa
ttttttaattttttaactttttttttttcgggttttttttttttttttttttttttgtgtataatttatcatgtaaataaggttatttattttattttttttttttaaaaaaaatctattattataaatttaaagggtcatttataatttataagaacagataaaataaaagagaattttctccaactaagtacaaacattaagccaaaccaatataaataaaggttcgaactagttaattatacatgtattaaaaaaaaagtacacatacaactaaatgtcaaaatcttattgttgacatgacatacattttcagactataatagaattcatgttatataactactaagttcatatttacaaaaatatggatctataatttttttttaacatttttcttaaaaaaatgaacgattgtttttcaattattctcacattgttgctatatgaaattaatgtaaaaatagtattatttttctaaataaaaaatacaactaaaaatttattaaaattaaaattcgtaaaaacataaaaataattgatatatatataatttttcttttaagtattttgtgtaaaactatccttttctttttgtcattgtcattaataaatgagcaatattattggccactaatacaaaccaagtggggctttgcaattaattagtttttataataatgattaatttttgtttaaaaaaaatgttaaaaccaaccttaaattacacaaataataataccaactcaatataggtattagagtattattatcccccctttttcttaaactattattaccttttaacaattttgtaaatgcaaattaagatttttttctaaaatatttatatgtaccaaattatatatatattttttttaacttttcatatcgttaacttggaactttttctagtgaggagactccaaccattttgtctatatctaggcctttgggagatactccaaataaacttgtgtggtgtcttgagaagcatgagttttattcagtaaaaagtgtttattggcaagctattcgtgatgtaactaagtccatcgcttcttcttaatttaacccctaaggtaaaaagtttacttgaatattatcatgtagttggatccctattatgattaatcttcaaagacatgacttccttaatgacaatatttgcccaatgtgttctacacatttagaaataactcatcatgctctttggggatctagccaacttgtgcaagtttcaaaattttactctttcaatcttggtgacatatttgtcattgtgagtggcatttataatttcatttgcatttttattcaacatctccctctccatgaaattgaatggatcctcaccacttggtgaagaatttggtaccgacgtaacaagaaagtccatgaacaaaag

SEQ ID NO: 56900 - DNA, 1333 bp, Cannabis sativa
ttgtcttgatgactataaaatagtccacccctagtctcattagaatatccaacaaatatacaaaccttagttcgtgattctagctttctttctttctttcttcagacatgagcgggacaccgacatacaaacattccagagttctaaaggtgtctaagggaaagacttagacgggatgacatttaaaatgttagttgtcgtttgtaaagcatatccctaggacactagtagagttgaatagtcaagcatatacctaaccatttccattagcgggcaattctgacgctccgcaacaccattttgttgtggagtttaaggggcggtaagatggaatgcaattctaagttcaactaaatgatctttaaattgcacatcaaaatattctacacccttatcagttttcaagatcttttatgtcttacctaactagttgtaagtcattgcatgaattctttaaacttttcaaatgtttcaaattttttaaggtaaagatgagcatatttagagtaatcatcaatgaaagtgacaaaatactcatagccactcctggcttgcacattcaaaggtccacaaatatctgaatgtaccatctcaagtggtttagtgacatgatttcccttttaagataaggaacttttagtcattttgccttctagacatgactcgcaaactggtaacttaccaagggcgaattaattgtagttttcttctagttgggtttcgtcgattgtgttgggttgctgggttggtcgatccaaggttgggtgtgtgaggttgtttgttttgttccgtgtggctgaagtagtagaagaagtgatattttgataatatttagtatatgggttgtattaatattcatagagtcgactgtaagtattgttgtaattcaattgcctttttgtatatacatgaaaaaatttattatttttttaagatgtatctcactaattaaaagtgacttgccacacataagtgtgtatcacatttaagtgtgatttgttagactataatatataatatgaaaataaagcatatataaacgatatgtaatgcggaataaactgtaaacatatcaaaactgtagatgtaattaaatgatcaaaatacctctagtcattgatgtttgagcttcaattcctgcgatagcttcggtattggagtttcggcttccgcgctctctcaactctttttagatggaatattactgtttttgaatagaatgagtgaaaagctcggagaccaagaccctaaatttataggtgagatactccatcagtatctgtgccacattaattatcagaatattttgacaattaattcaggaaatcaaatc

SEQ ID NO: 56901 - DNA, 1371 bp, Cannabis sativa
agttcaagagaaatttttaacggcaaaaaaaattcaaggggcatgataatttagtacatgtcatagtttaggggaaaaaattattaattagccttaaacaaatatatagttccaatcaaaattattgagagacaaaatcctctatcagtaatggaaatgcttttaataaattattagtaattaattaattaataaatattgatacacacaattaagtagtgcaaattaaatgtgtgtgagtgtgagtgggattattaattgatttgtggggtactactctctagttctttctaaaaagaaaacgaatcgaaagtggccttaattgagagatcaaattactaattaattaaaattatatatatatatggtgttaattagattaaaccgggtggactaccctactattccactacttacccactataatagcccaataatcatatttaatatttgtaaaaaacaaataatatataaattatacatcttattggccaattttccacttatttccatttaaatatatttgcatggctatcgctgctccacacatagctaaaccacacacacacatatacatatatatatatatattgatcattttttatttttattaattttcttaattactgtaagttatacatatatatatacactaaattgttgtgtaataaagacataattattaactaataattaaaatcaccagaccagtcatgagctaatttaattaaaatgatataattaataattgatgtttttttttcaaaaaaaaaaaaaaaagtgatgatatataactctaggtaacgtataatagatatatttggaaaggaaaattaactatatatattatatatagatatatttaaagcaatatctataagccttaaataatggtttgattttttggacaacctgaattaaatgctgtccagacgaaagaaaaaattaattaaatgctttcaatttagtcatataaaagttaattgttcgtatgtaatatagaaagtccaagtcaaaatgataggtataattttcttaaataatcaatgataatattgaaaagttacatatatatctagttaataaaattcatatataattttattcttttgtttgatttgaaaagaagtagaaaattaagtaaaatgattgatttttattctttgttgaattaagttgttgcaggtcttctggaaataaatacaaattctagtaagttaggtttgttatttggtctctttcatattaatttctcatgtaatatttaaataatgacatacaagtaattaaggttgcgtttggtaacacttttgctttttaattttaaaaacagaaaaataaaagtaaattttttgtttttaaaattttgtt

SEQ ID NO: 56902 - DNA, 3419 bp, Cannabis sativa
ttgctgatttggcatttttggactttattttgtgggtgaagggaactcggaaaaattcagtttgatgaaggtggcggctcttattgaaaacactgcaaaaagcggatcacaagttcttgatcttaagggaaaattgacggatcagatagaggggcttcctgtgtcaattgggaaattatcagaggtgactgaattggacttgtctgaaaaccgaatcgtggctcttccacctagtatttgtcgcctcagagccttaacaaagcttgatatccactcaaatcaacttgttaatcttccagactcgtttggtgatctgataaatctcactgatcttgacctccatgcaaacaggttaagatcactgccagatactttcgggaacttgaagaaactcatcaatctcgatttgagttcaaatgagttaacccatttaccagagctgctcgggaatttgactagtttgaagtgtctaactgttgaaacaaacgagctcgaggaattgccatactcaatcggttcctgcacaatgcttaccgagctaagattagatttcaatcaactaagagctcttccagaggcagttggaaagcttgaatcccttgaggttctcactcttcactataacagaatcaaaggattaccaacaaccataggcaatcttatgaacttaaaggaactcgatcttagcttcaatgagcttgaaagcgtacccgagaacctatgttttgcaactggtcttaggaaactaaatgtggggaagaactttgctgatctaagagccttaccacggtcaattggaaaccttgaaatgcttgaagagttagatataagtgacaaccagataagatatttaccagactccttcagattcttatcaaaattgagacttttccgtgcagatgagacgcctctagaaatcccacctagacatgtaattaaattgggtgctcaggtaaactctaagaacacgccaccttttcccttggtttaattttcggtatctgttttcactgtcacaacagatactaactaatccaacattgtcgaattcatttcaccaggcggttgttcagttcatggaggattacgtcgcgaagagagataccaaaactatgccattgaagaagcagggatcatggttcttgtgctgcataaagccccaaacggagtaagtcagtcagtcccaacaatcaacagcacataagtcatgaaaaagtttgcctagctagctagctaattcatttgtatttctcctctcaacaatggcctattgtccacaaatcattcaactatatatagttcacccccccaaaaaaaaaattcaagttatgttttttgtttttgtcaaaaatggattaagagaccatgtatatatacatacatgagatcctgtacggtacagacaaatgtattatcttgtatgatttgtttgataatttgttttttcttttttcttttaatgttaatagatgagataataatattgaggatgatggtggtaatgatgagcttcatagtttttatcaactctaacttcatagtcttatatttgtagtacagaggatatttcagtatattttttattagtatttaggagagttttttatttttattgttttttatgacgatgtactatgtacattgttattatataggaatatttataaatttacagaaaattttaaatattttactatactaaaaataagttacaaacaattatttatcacacttataagaaaaaataagggtaaataacggtattagtatttaaagttttaaatttgtaagcggcataaattcaatatttatgtttagcggcataagtactcaatgtttgtaaaatagtattttttttccagttttatcagtacagatttcattttgaatttattaaaagaatatttggaagtaactaatactacatatttctgtctaggctcaatgatttaaaatctagactttatatatggtatgtttacaaaaataacagagtttgtactgacgaaattagaaaaaaaaattatagttttacaaacactgggtacttatgagctaaaaataaatattagaattatgccacttacaaacttaaaactttggatacttatgtcgctatttatcaaaaaaaaaaatatttacgcatgtataatgaaatatttgaaaattaaaaatttacaagtataaaaaaattaaattaaaaagttctaagatttttttttatttttatatttttacgaaaattcacataataactaacagaagaataatttaaattacaattaaaattcacatagtaacttatataagaaattaattgagcaaatactaaaataactcaaaacctaaattttaaaaaaataaataaaaaataattcctcaaaattctattgcatcgtgaaaaatagatgaattggaccaaaatatctctttatttttgtaattattttgatttttttttttgaggtttagacagctgttaattctggtggcaacggttgtcttaggtgggtttcaattattatttatgtggacacagaatgcatgggattgggttggaagctatataattattaatgaccaaattagctgtctaaaataaaatctgattctcttgtttgtttttaacacaaaattattattattattattattattattattattatgagtggatggataattttggatctcgaaatttgaacaacaaacatgttacatgtccaactattttgatctcatcttattattattattattattatttcaaaggagactgccacgtaggatactatttgactttgtgtggatcaaagctcaaattaataacgaggtaattatagttgacttgattatagcgctttcaattctttttttttattattatttattttttaaaaaaataaagaatctttgaaattatttaatttgttttaatttatttatttatttaaaacagtgggctatataggaattctattgtcagagtagtgtgatggatgggaatcttgtagtatgagtctatgagattgttcaatgttgatccacgaatgttctcgagaagataaccttctttcattatttattgttcaaatattttagtagatgtagattcaaaataaaagtctaattagtggcaagtgatatggatggatgagttctactgtcttgtgtttatttaattaagaatttctcttacaattttgatatgtactaaatcatgtctttaatttattaaagtcgttaaaaatatttctataactattgggattatttaagaatttttgtccaattttagtaaaaaagtctaatatgaatgaaagttagtatatttgaaaatttgagggcatgtttggtatatattaaagtctagggagcatagtttagtacataaataatcactaaaatagtaaaattga

SEQ ID NO: 56903 - DNA, 1050 bp, Cannabis sativa
gaaaacccatttttgtagtagtgcctttacactcccccagatggtgcttcttacaactggggcactctgggtaagtgtatcgggtttcggtgccactctgatgattgcctctaccttggttccctcagaacctctggttctgactggagccaatagttgcagtggatgcctttcttttttgatctatggccgaaccactacctcgcatgctaaaacttgatgcacgaggggtaggagccccaccaacaactggagtcccaccagactctatcacgcaccccactgcgccttcagctcccagtgccttatcaaccatctcagcataagtggttctgtcgttagtagtaatcattaaatcatgcctgatcttagcatttaacccatccagatatttctctttctcactgaagtcggttggcacaattcctgaggccaatgtcgctaaatagtcaaattgtgttgtgtactcagcaacacccatattttctttttgagttaaatgagtcaattcttttctcttatcacttctaactgcctcattgtaatacttagcattgaaaatttcctgaaacttttcccaggtcattgtcgtaacatcatgaatcctggacaccatgtcccaccagaccagtgcatcttcttgaaacgagaaaatggcacagaccaccctatcataaccagtgacgccaataaaattcagaattctgctaatcacttttagccattgcttgactttcataacatctgctcctcccacaaaaactggaggtgcttacttgcagaacctttcacacaaaagttccatccgattcacggccaccactggttctgcctggacagcaggggcaggtgccactggaatttctggagcaggcactgtaggagcaccctgctgtctcaaccgttgaatttcattatcttggtcattgatcctggcttgcatagctgcaaacctattttcccaattttgggcatcctgagcagcttgggcagcttgggcaacctgtggcgaattaacatcatccaggccacgtgccctgcccctgggac

SEQ ID NO: 56904 - DNA, 1603 bp, Cannabis sativa
gttacataattgttgcaacaaaaaattatttatttagacctcctaatatattgaaaatttaaaatatgacttatctaaaaaatttagaaaaatttaatacatgcatgtcttaagagatataaatttaaagttgcacgcactgtatgagaaagatatctttgtatgaaattaaaaacatgtaagtaaattattacttaaaaatgcaagtatgattgtatatgcaatataaaatcgtaaattatacattataacatactcttaaagagtttttgattatattataaaaagatatatagtttatttataagtattagtaaagaagtcatgaagtacttcaatagatcaataattatagatatatgatcatttgatatggaaattaagatcataaaataagaatagaacaagtatatagtcttgtagcaccatccttattgaaaacaaaaatttatattatcaatgtgttatgttcatatgtacttaaaattttaaactttggtacgacaaagttgtatatacacacacatggatgattcaataagttagataattattgatattcgagaaacctctcatccataatttagaagtccacacataatctaaaagaattatagaaaatatatggtcatagataacaataattttatgagatatattatcacaaaaaaaattatggatcatatgtgcatagggagagacatattcatgttgcattctttttcctttagcttagttttataataaggcttttaatgagacaacttgtaaataattacgaatatatattgcactcttttttccttagctcaaattttgttccactgggttttttagtgagtcaactttaaaccatgctaacatacttgtacttcatgaaacaagttgagaataagattattgacataatatattcgaaaaatatatgaattacactcaataaagtagtatgaacattagtaattttctatgaagataatgtaaaatgcattactcaaataaaactataataaaggagatagaaccaaagacatttttactaagttcttcttaacacacgatcttcaagaaatgactatatgtgtatccaacacattcaatcaagtgtcaattttacatattttttcattaattaccaatatcaacatcaaaagatagtacacaagatcagaatgcatcaattaaaagatcttcgtgaatgtcaaaataaggaaaagtaaacaaaaattgcattcttttcccttaattgagtttttgacccactggattttttagcaaaattttcgagtagctattatagaaatctaataagaagtgttgtaaaatattatattatatatagatgaccataataatagagaatcacaattagttatcccaaaaataaaaatcatctttaatatgtaattgtatagtcttaattttcttgatttcttaagtcttatttcattgtataaatatatgttcattccattgaaataaacgaataagaattctcattcaggatttctttctctattcatattattattttctattttatattattgatgatagttttataacatagatcaatatattgatttggaaacgatttggttag

SEQ ID NO: 56905 - DNA, 916 bp, Cannabis sativa
cgcgaccgcaccgcaaagaatttcgaactgcattttttttgcggtgtggtgtggtgtggtgcgggcggtttgagcggtttgatgaacacccctacccaaatgatttatggaataacgttggaattttttaagaaaagaaaaagaaaaatgaaaattttcattaatagacaataattcattaattgatgatatatcactcaaagaacataatcaacaagatcggcaaaccatgccttttacaaaaattggaataaatttttttatagctccttcaactaacataccaataagccgccagtgttgaagtatcaaagaagcgcgaagaatgctagatatttgattcatataaaaatgtgacaaatcacacctattaataactattagccaaaaatcttccaataaaaattaggtaacaatcctattattcaagctagaataaaagaaaatactcaaacgagtaaccatggtgataacaatcgcaccataaaccatagggccaataaaaatctaaaaaatctcccaaatctgaacatgtacaaaaataattaagattctcccaatataccaacaagaaacaagactaaaatcccatgccataaatgaataaaaccctactactaccatgacaatagcaaaatggtatagcaacattgaaaataaaataaacattaaaaacaaaatataacaaataaaaataacaccactaaaaggattaacaccagtaaaaatccaattcagagctaatgagtaaacttaaatcttcgaaaaatacttctaaagaaagacaaaaaaataacactgacataaagatagcgacaatcccaatagggccggcaaaacgggtcagacacgatgacacgactcgaaacccgtaagagagttagcgggtttgagtttgccttaaatgggttcgggt

SEQ ID NO: 56906 - DNA, 1509 bp, Cannabis sativa
ctaattacaataaggccttagaatggttcatctcggttatagttaccgagtccaacctgattatgtcttaagaacataatcctagaatctcattacatttaacatggcatgacatttacacacatatatcgctagggtaataaccctaggctattaaaccgttcctattagggtaataaccctaatcctagttactaaacaatcatacatatcactttcaatataagtgccactgcgcattctctatttgctaaccactgtcttacctgttgtccagcaatggtagagatttcaaatctccgagtgctcctgatcaggtgtcggtaatcctagtcacataaatttgggattttcgcaactagggttaacccctgatttcaaactcataaaataatttcatggcatttaaaactcagataataacatatagctcggaacgagctttccaacgatataaagaactcccaaatcggagttcgaaatcacaggatatgcatttccaaagtttccactcaaatggcccagaaaatcgagggcatgccgcggcatgcccaagccatgccgcggcacccgggacaaaacccaggttccaccaacaaggggcgggccgcggcatgctcaacccatgccgcggcacctggattgaaaacccagaaatcagcaagcatgaacacgaaaaattagcaacaaactcaaccatttcacttcaaattcacaaccaaacttccaaatcaataagtaagattgttagcaattaatagttggccaaataaacataattcatgcatcaattcctctaataaacttcaaaaatcagattactataacaactcaaaatcatacacaacacataacccttcaagctcaaaaaattgagctttaaatccattaatcccttaacatttttcagcagccacatatcaaaaataacatggttccaagctagaaaataccctatagtcttactccatgctcaacaacataactctcaacccaatcatgcattatcacactcaattcatcaagatcacaacaaaacccaataacatgcaacttcaagagaataacaactcaaaacatgctttatccccaacaaattcagcaagaattttagtactaaatttcaaataaactttgcaagaaattacctcaattccaaacttaaaattcttccaattcaaagctccaaaatcaagcaaactccaagcaattacacaaattaaacttgaaattgaaaagagggttaggaagagagagagagggtcagttagagagagggataaacaccagaaattgatctccttttttctcaaaaatcaattttatcaaacatagtaaataaaggtcaaaagaccaaaatgcccttagggcctcaatgcacactcatacacatacaagggtacaaatgtcatttcatgcatattgaataccaaataaaattcagattatcaaatatcaaataaaatgccaattaattcaatctaattggcccgaaatacccgattgtga

SEQ ID NO: 56907 - DNA, 1304 bp, Cannabis sativa
aactcacaaattgaaagaggtaactctttgatttttgtgccggagacatccaaatacctgagttgttttaaattgccaattgaatcaggcaagtttgtgatatgcgattgtgacaaagaaagagttcttaagcatcctccatcctttagcaccatttcaagcttaaattgggtctcaagtgatctccatatatgtcgtaatggcaaagccaacagggtacgcaaatgcttcactctagagaagttgtcaaattctattgtatctttcaagtccttcatgtatgatagatggcgaatcttgctattggttattagcttgcgagagtcgttacaactatcataaataaagcaactttgacctgatatatgcatagctaaatcatgcataagatcatgcatagaaatattaagattccatgtattgtttctttgaaaaaacgatcttgatattaaagcattccaatactcttccccaacatcttcaattcttttccctttctgaggttgcaaaagaccttctgccatccaaattaagattattttatctttgtcatctttttgaaattcataatctttgggaaagattgaaagatgagaaaaacatggtttcaaataaggaggtaagaagtggtagctctaccataaagccggaacaattctaatgttaaggcgatttggcaactcccagatatcactttgcaatacatgcctccattcttcatgatttgacgtacatttcaaaagtccagccatcgattttacagctaaaggaagacccttgcacttttcaacaatttgctttccaatttcctccaattctagatgtacctcattggagtctatatcatcgaagacttgttctgcaaacaacttccaacaattatcgtcagacattacttgaagatcgtaaggttgaacatttgtcttcatcatcaatgcaatatccttgctccgcatggtcacaataattttacttccttgctcgccaaattgaaaacaacttttcaaagagtcccacaacaaataattctcattccatacatcatcaagaacaaaaagaaactttttcccaaacaatacacttttcaattcattttgaagttgatgtacctcttctgcatcacatcttcgtttagtgattgcctccaaaataagtttgcttatttttaaaacatcaaaatcgacggagatagttacccatgctttcaagtcaaagtgttgtttgacactggcatctgcatacacgctttggacaagcgtagttttgcctataccacccatccctactatagaaataacagagat

SEQ ID NO: 56908 - DNA, 1761 bp, Cannabis sativa
  modified_base (976)..(981): a, c, t, g, unknown or other
  modified_base (1383)..(1388): a, c, t, g, unknown or other
attggatgaatggtttataaattatctacttatgatgtcattctaatttttcatatgaaatttaatggcgcagatgactatattcctgacatcctatcacaaaatgatatatatccttgatctaagaaatctcctacttgtatttccttacttagggcatcctaagcctagagttagattagtagtggtggtccaagctagaatcattactcattttatatttggtataaatttaagtctttgacttaaattttaggtttcaaatagaattttaaatttcagtttccagaatacattggacaatacagtataactttcacaagttgttagtatccattttctgtcaatggatcgttaaccaaatttgagcatcacgatgataattcaacacagaaaaaataaagctatagaaaaataaaaaatgaacaccgtggttttttacgtagttttgtagttaaaattctgcatattccacgagtcaatcttattcagatttctgagtatgttttcttagggcctttctcttaagagttttttcgtcccccatctttgatcctgactgccactatttataattgcattgtggcagttaattacaaagctgaccaaaattcatttacaaccattatccctaaaattgtgggatttgattacaaatcaagccaaataaatgaggttcttacatagttttgaatattgcacctttattgggtcgagatgaacgcataattaaagatatatggtaagccgtatctcatagggatgccttccttcggagggagcgaagttcactttgatagcgagcagctgcttgtcattttagcttcttgagactaatattatctttctgataactacacttctctggcattgagaagattttcctgcaagaaaaacacctcgttgtctgctgtcttggctcgtcaaaccatttacacttagtttgtatatcgtataatatacgctaagtattttnnnnnntgtcgctttctctttcacgcagcgtggttgaggcctcgtcatgaacgtgtgcacccacatgctttctcgtcaatacataagttagcactttgtatgtttctgtctcgcaaaagactattcaaccaaccgggttataaacatactctaccaattatatttctaacgagctgttccatgctaggcatacttgccatttgcgtgtttgagcctttcccagctcgacacgtgttctcttctgatgtgcttgctgaacttcgagtataacaattgccccttaaaaagttctttttaattaaaaagagctttttaatgattataaagggtattttcgtcatgcttttttgtttttgaaaagacgcattccctctgattttggtggttgtgcggtttcgaggtacatcnnnnnnaaatgaccatcttttccactttcacttcaaatcacgtccattagatcaaatcttttttgaaatcattatcatgggtataaattaaggaaatggaaccacctttgcaccatttcagaaagtttgagaaaaacccttaaacttcttcgtttaggatcaccattaaactcatctgaagacttgcatgccatccttgtccttgacctttctcctgcaagtttcctccgacttcattttttaaaggcgatccttgcttcattcgaaggtttgtagacggatttccctggaattgccccaagccctaacttcaaacggtaagttattttcttctttctcatgtttattacatagtgtggatcagttacttgattcgttt

SEQ ID NO: 56909 - DNA, 1133 bp, Cannabis sativa
ttcccagagtcacctgtttttgacaatttcatgtgtttatgctcaatttgtttagtaaccttgaacttgtctttccaaggataaaaagagtttttcttaagttgtaagtaactgaattttaaagccgccatgcctcgtatgaagagaagtcgaagaatgtcccacatgtggctcatctcattacggccaagcaaactgtccccaaattcaaaatcttatttcccctatctctaaacactaagggaactctcatggaaataacttttagaattatcaagccctagagttttatattagctagagttactattgcctaattattaatttaaatattaataattaaaaagactaaatctaaaacaattcaattatatttttttaaatatataaaattcaatataaattttaaatttatttataagaaaatatatttagctattaaacaataatataaataaatatataattaagtttgatttagatattttaaacaacataactaattaatgaacttgttataaaatgtgattaattaattgaattaacatctaattcaaatttaaattaagatttacgtgaaaaaaataattatttaattttgttggtactcttaaattaaatttaagatatttgaaactaaaaaataaaaaaaaaaaattattaattgattaatttaacagtgttagctttaacccgttaattaactttaacagaaaaatacaaataaaaaatcgttaaactaataatttctattagatagccacatttaatataagagaggtattcttagttttattttgattatgtgtatttttagttgtatttttttagaaaagctagaaagatttttttttttttttgtaactacaataggtaacaaagtcacatatcataaatattttctccattttatttttttaaaataaaacattcatagaaaaatatattttagatatgtatagtgatttttttttttaaaaaaaatgaaaatatttcttttagatatgtaaaaaacaataattaataaaaaatattttttaagtacgtgcaatagtgagttttgaaaaaaataataataaagaagatatttttttttagatatatctagtaaatttaaatttaaattacagtgt

SEQ ID NO: 56910 - DNA, 913 bp, Cannabis sativa
aattttaaactttataaaaaaatccaatttaaaagtttgaaatattcaactgatattttttcaaaattttaaaatatatcatatatcatgatatttactttaagctgtacacttaaataattatatatatatcgcaatcagttttttctcaagatgaaaggaaaaacatcaggtattaatatttgctagagagcttcgtctacgagtgaaggaagttcagcaagtactgggtgatgctagcaaggattctgaacttggaaagaagtatgtatcacttgggaacttcaatgcctaacttaatctcacaattgctcttgtatcacacacatgcgaatttttaagcatagctattgatgtttttagtagtttccatgtaaaattcaactttattgaaaaagtttattgttctgttgctttctaatcttcgcacgtaatatggatatataataatatggttctttttttttgggacgttcgttaatatatgtttaatggcttttgccattaattttcgtttttggttcatatacggatggcatataatgcatcaatcagttttttttcaatcgtattaattgattgaatttttttattggcttcaatcctcttaggtatacatatatattgaattgattcgtaagttgcagtttatttatttatttatttttccttttctttattacttacttgctgtacgagttttttggcatatatatgtgatgttgtaaagtgatttattattaatatgatatatgacttgctgtatacatacatatatattttattaaagattatatatatttatatataatatgtgtgtaatatatatatgttacagtataaattgataaatgtatattttagttcaaacaattaaattcaaattttagtgttggtttataactaatatttt

SEQ ID NO: 56911 - DNA, 1456 bp, Cannabis sativa
  modified_base (204)..(204): a, c, t, g, unknown or other
atttcaaattgtattaatgttatttttttttgagccaaaaaattaaaattttattaaatcaaatcagctaccaagatagcttccaaaccagcagggacaaaacccccgtgggaaacacaaccaggaataaaatcagaagaacgagctaaaaagttagccgcctggttcccggaccgtttaacaaaactaattgaaataggaaanaaaatagaggattgcataagagcaacacaatccgaaatcaaaagccccaccagagacaataaccgcttcttttgttgcacggcttgcaccaacaacaacgagtccgagtccacaaccacactagcaggcacacccccctcaacccaccttcccttcacccaactgagcgcctccttcaacgccataacttcagccaaaacggctcattcttctgttgcacgacttgtattaatgttattgagtttgctcagcactataaaatacaattggagaaagaagctatttttttttacaaggctttaatgacttttttaaatgcaaagataaaataatttttttttcacttattaatgttattaagtttgttgaaaaatatgttgggattagcattatcttgtttgcaataatattaacatataaattgtcattaaatatttaattattttttataaataaataaatatttatttgttaaatattattaaaataatataataaataatccaatgcaagcaaaatattaactattatccccgattatttccttataaccattagatttattatctatggctataaaaacttctataccatagggataaaataataattcttactatagacatgtccaaattttatggtatggttggaattattgttttgtccctattggtggggatagttttataatcatagatgataaatctaatggtaaaaaataaataagtccatgataatagttaatatttgagatgcattagattatttattatatatattttaataaatattaataacaaataataaatatttgtacaaaaaaattaattattgtttctctctcttctctcctcgctcttgattatatcgcttataacggtattttcttttagtgcttcttctttgttcacttgaataatatttgtttaattataatatgaatgaacaacagttgttttaaaacaattaccgaatgagagttaagatttataccccttgctcaaaaaaaggttacgctggagaattgggaatgggaaaactgttagaatctactatgacacctggatatatcccaaactgccactttctttccccgtcccagaattctaatcagactcgtgtctccagccttatccttgactctagaaattggaatgtcaatagaattaaccacctctttaccaaggacattgcacaagacattctctctctgccacctcccaacattcaaagacctaattctctcttttgg

SEQ ID NO: 56912 - DNA, 1194 bp, Cannabis sativa
  modified_base (431)..(433): a, c, t, g, unknown or other
tatagtttccctcatgaccgcacccgtcaagtcgcgaaactaggcacatgtgttatagtgagatttttctcacctagaaacttgagaccagactcctgtttggaggacaggtgtactcgatttccccaagcaaaactgagatgttaatgagagactcctcgagtttaaacctcgcctgaactagactcagcgagaagatgcggatatcaccaagtctagccgcatttgtacgactcgcattttgcagggccaaggaatggatttaactcgcatatactaagatatatgtgagtatcccctctatgatgcgagttggtcccgaagacccaacagcctcgataaaccaatatagactcgcatgtcttggttctatcagctcgttatacgatgtccgtacatgtgaggttataagaacgcagacatcttagacnnnactaagtgttaggtgtattctaagtccacgagcttatgcaagaatatgaacaaccaactcgcacattagaagttgcatacgttgccgtatttagtgaatagaaactgttcttcatttattaatgtttacgttttttagcttaattattgtaaatcaatgtacgaaaggattgacaatgcatgcaatccttgtgtaaatgatcagagacttcctttgtatataaaggagtgatccaccgtgaaatgacacatacagaatccttgcaacagtggactaagtagatcgtgatctaactgaaccactatattcactcgtgttctttgtatttccagtttttgttaagtatttgtgttcccagtttgggtactcaccgttctaggttgaatactcgcacttattcatcatattattattatcattatcattattattatttattttggtgttgtaaaattccttcaacaacacgtagtgacttacatcaatgctatttgatctaatctgatctcatagcttaacatgaaataaaacaaattgcagaaataagagattgtactttaaatggtggtcatctgatctgagtactttttctcctttctcgaaacctttaaattgtggtcgtccgacgttgtactttattggtagtattttcttaaatgctccccattccaataccggggtataagaacaagttgcattttttcatcatacttacctaatttgtatgctctggattcaagaacttcgaccacttgatatgg

SEQ ID NO: 56913 - DNA, 817 bp, Cannabis sativa
aatttgttaaaaatttataaataaccataaatagctactacatataactatataaaaaataaataaactaaaacatttttttataccgaaatagcagagagagttttaccaaacaactttgctttatacatttccttttgtcttttgacaatgacaaatttttagttggaaggataattataatttacagaaagaaatatcgaatggagaataatgatttgattgagattttttatatttttcttttgagtgaagttataattattggattgaatactgtgatgaatgataaagttttaggtagaagaagtgcaagtggaaaatattattaaaagatagaagaagaaaataaaaaagaaagtatgggaaagttagatgaaaaaaataatagttttctatgtacttgtcggcaagggtacgaggtttaaaagcctttgtggtgacgtggtcgcttcccctcctttcatactaaagtttttcatcttgtttctgtccttttgcccatccttttccctttatttacaatattacccttcctatttgttttccacacgtgttgattaacctagaccccacacacagtgctatagagtgtggtttgtaaatttatactgggtgatgttgacaccctaaattggctaaggtgaattcatatcagttgttctttttatttgcaatatcatttggtaagggaaatttgacattacatgctaaaaaaatagtatgtggtgttttaatatgctaggttaaaaaaagtaaaaaaaatacccttcaattaactttaatcccaatattatcttccccatttcaaaattcc

SEQ ID NO: 56914 - DNA, 1086 bp, Cannabis sativa
taaaacacaaagcagaacaactcaaaacaacagtagaacactagtaaaacaccagtagaacatcagtgaaaacttaacacagtatactgcagcgtgaaacttataaagaaacacagtaaaaaaataaaaaataccgcctgacagtatttttgtaaaaaaataacgaaagttagtatactatctaaatttccctataaaaatttacacaatacaatagcaacgatgaaaaatccttttatactcatatctatgttgaaagattttatctgcaatacaaatatatacattcaaattagccaaagaataagtaaatctaccatcaataaaataaacaatatttgcatctcatatacaaaacaatacataatagcttctccaatgttaaatcttgtatgaataacaatatattttaattctctctctctctctctcacaaagtattctaaacacttttacacaaaaatccaccaatatatatcttttttttttaaagctatatatttatatatctaataagatactaaaaagaaatcatataccagctaagagctagcttaatatattatgagagacttttcaatacatgaattagagaatgaattattatgtagatgaaatgaaaattaattaaaaagaataaatatttaattaatactaataatatatttacttatttagtctttggtatacaaatatttcctttttttgcttttgataaatcacaaatttatttacattaaaaatggtgaaatggaaaaggtaaaacaatgcataaaatggtatgttgtgagagagtttcaatatttgcaatgttgactatgattttgatattttcaatcaagaataaaaaaatttaaataaataaaaaaaatattattagctgtataattaaatacaattttaagttacaaaactagagaatgaaatttcaatatttgcaatgttgagcttaattgattttgatatttttattgtgagatagagtgagtttatgtgtatagaaatgaatattaattatatactattttctaagaatattattatagctttacaattaaatactatttaagttataaagtaatcttt

SEQ ID NO: 56915 - DNA, 2253 bp, Cannabis sativa
tgggaagattcaaaagccagaagtgaaagatatgaccaaatggtgtgaatttcatagcgatcacaaacacaccacaaccgaatgtataacactcaagtttgaagttgcaagactacttcgtcgatgacaactatgagatttcctttctgataaaggcaaagcaaccgtagtagaaggggataaaagataagagagtctacctaacctccttagaatgcgaggactgtgaatgtgatctcaagaggattaaaagttagtggaattacttattcagcagctaaacgccatgcacgagaaccaatcaacagccaaggaaagccgagaaagccagagacaatcgttggacagaccatcagctttgtcaatgatgaagccacatatttgctccaccctcaccatgatgtgttagtcatttcatttcttaatgctctcagggatatgaaagttgacgagtcaataatcacccgcaaatctacagtcttaatcgggtttagtggtgagcaaaatcactcgattggagaggtcaacttgcatgtttgggcagaaggagtaaaccttcaaaccaagttcatcgttgttgaatttccttcttcatacaatgccatccttggccgaccatggatccatgagatgaaagttgtgccatccacataccaccaagttatcaaatttcctacaccatggggaataaagcagatattgggggcacaaagagaagcgcgggagtgttatcagagcaccctaaaagaaaaacaatcaacctcagagcaactacatcaattaaatgcaatgattgatccagatgagcctaacatggaggagctaaacaaagtgagcattagcaaggaattcccagaacacaaagtacaaattagggccaagctcacaccggaactttgagcaaagttgatcaaatttctcattaggcatcatgacaactttgcttggtctcacaaagatatgagagttatagaccttaacattattatgcataagttgcaggtagaccccaatttccctccagtcaagcagaaaagaagaaagttcactcccgaatgcaacaaagtgatcaatgaagaaattcaaaagctcatcgacattggatcagttagagaggtcaactattgaatggttggccaatgtagttgttgtccaataaaagaatggaaagtggaggatttgtatcgatttcacagacctcaacaaggcatgccccaaagattcattctcgctccttcacatcaacatgcttgttgatgcaacagctgggcatgagctccttagcttcatggatgcattttctaggaacaaccagatccttatgcacccagatgatcaagagaagacatcattcatcacagaatgagggatcttctgttacaaggtcatgccgtttggactaaagaacgtcggtaaaacatatcagggattggtaaatcagatgttcacagacatgctagggaagtcaatggaagtatatattgatgacatgctcgtcaaatcgctagcagtagcagaccaccttaatcatctcgaacggtcattcctagtattggaaaaatataatatgaaactcaaccctgccaagtgttcttttggtgtttccttgggtagatttctaggatacttggtgacaaagcgaggagttaaagcaaacccagatcaaatgcgctccatacaaaacattcaatcaccaaaataaatcaaggacatccaacgccttactaggaggatagcaatactaaaccattttattttaaaatcttctaagcgatgtcacatgttcttctcaacactgagaaaaacaaaggactttaagtggtcaaaggaacatgaagatgcacttagacaacttaaagaatatctcgcctcacctccgctcttagaaaaacctaaagatggagaagcactttacatatacctagcagtctgtgaaacagtagtcagtgctgtgctaatcagagaagaggaaggcaacaacctgtctactatgtctcaaagactcttctagatgcagaaacaagatacaaccaacttgagaaactggtactagcacttatcacaacaggacgcaaactcagaccatattttcaatgccaccctattattgtgttgacacaatatccactttgtagcatcctacacaagccggagctttcaggaagactcaccaagtgggcagtagaactcagtgaatatgacatcacattccaactaaaaacaacaatcaaatcttaggtattagctgacttt

SEQ ID NO: 56916 - DNA, 961 bp, Cannabis sativa
atatttaagtgtcttgaataaaaattaacttaaatattaattttgtacttaattaaatatgtctagaaaaataccaaaagtctactcaaaaaataaccatctagatatttaattactaattatttattttctaattaaaaaataatatattttagtctatttattttaattaatcattaatgcaaaatttactcgatttaagttaatctaaaattaatttaaaataattaattttcaactctaatccgttttcaaaaaaaaatcaaaatatctacatttaaataatgcatttcaaaatttaatgagataaaggataaaaaatataaaataaaaagaaaggcgtgcgagtttctctctgagcttcgtccatggcgaagaagcgcagggtggtccgaaagcctattttacgagaggctagtgtggaatcaaatgctaagggtgaggggaatggtcggaatgttcaagaaactggagaggaggcagttataatctaggaggctgcgattgatgaaggattgaaggaggggattgatgacctaattctggagaaagatggctatggtttaggcgaaggggacaaactggtcggagaacaaacgtgggcagatattgtggataatgaggaccttcaagctcaatcttagagtatttggaggaagtttccagtgagcaagatccaagatcaggaatcgagattgaaatttgaagaacctctgatcaaggaaggtgttcgaatcgctcaaattgatgcagaggaggtagaagttcaggctgcttgttggaatgctacagtcatttgtatggtgttgggggcaaaaaaccaccgtttgcagtttttgaaggattcctgaaaagaatgtggggaaaactgggaatagctcaaatcgtgcgtatgaatggtggatacaccattgtcaaattcaatgatgaagctactagagatcatgtgctagagcatgga

SEQ ID NO: 56917 - DNA, 1945 bp, Cannabis sativa
tactaactagttactcattagtaactagttagtaataaattaactacttaacaactattttttttctacagcgtcagttatttttaactcttttagcgtcacctggaatagcgtcggtagcaaattttaccaaaaccgacgctgaaaggccttaaaaacaacctctaaagcccaattttatagtagtgccatgtctggtcggccaaagggtgtacataggccgactaggatttgagcacctactggccgcccaaaggtgactgtcaaaccaagaaggggactgtttgaccaaggaagcctgacctttgtacgaaaagttgtacaaaggctgaccaacatatgttaaaggtagccaacacctactaaggttggccaacacatgctaaggctggccaacacttgcaaaagctggcaagcacttgaccaccagatctcgataggaacatagtcggtcagaccctggcaggaacttaacatgtcctgccagaacctggtaggaatatggctggctagaccgtagcatgagcagggctggctagaccctggcaagcacatggtcggcaagaccccagcctgcacttagcaggaacttggtgcgcagccttcatccaagacaacaagccaagcgatgatttgggcttcaacatccacgaaaataggagagaaaatattagctattcccctgttcttgagggataattgacctatttactatgcattatttgattatataaataatactacgtagttcatattttttagggttattaggttattatcttcatgtgagctctcctatatagagagcattagcctaaccctaattctctaagtcctaagtctctaagctcactaaagctctgaagctctatgtctaaaatgcaactctctctctctctctctctctctctcccttctctctcataggccataagcatactctctcgctcacttgagatttgccaactcgatgctcacattgtaatctgaagagattcactttggattccacaacacatgtgatccgagtggtattatctctagtattaaacaagcaaacggggagtaggtcattactcgcaaactaagggggtcgaacctctataaatcttgtgtctcatttactttcagttcttattgtgtaacacgttgcaagcatcagtaataaatacgacttcattgtcgattggccgaatctaaatttaacaacttggtgctttcattgagagtgagttggaaatttatctaatcaaacgttgtggttaatgcaaggagaactctgactacaacttatccctcatcgggtgttcctcaagaccctatgaggtctgatcctgatattgttccagccaaaattggaatcaccacgaacccgacagatgtggccaatcatgccaacctgacaagcacaacaaacttcatcactcgagccttatatagacttgggagaaaatctcgagttagccagacttagagaggttgtctgtcaagtcagtcagactgaagaaccacacattatttgttgtgatgcatttgcataagagatacacgaatttctaagatggatgaatgacaaggagtacatcattcaatcttaccaagcagagctagatagccgtaacagagaagctagcgacctaataaggtttttcaatgaaaaaattgtcggaagaggataagatctcattagtgatcctctttaagggagactggttgatagatcggggaaggtctacagacaaattatccaaccaggttcttctggatccaggacagaccttcccctacccgaaaggggaaaatccttgccacaaacacttggtggtgagaacaaccagatcccgacaaccagcgattttgggggccagtcagggatctctagcacaacaacaccctcgattgaccaacctttggccagccagccagccccctaatggtgcacctt

SEQ ID NO: 56918 - DNA, 771 bp, Cannabis sativa
  modified_base (743)..(746): a, c, t, g, unknown or other
ttttttccttaatttaaaaattcacaatattatcgttgtatagtgtgttaatccactttctatatctatttattttgtatgtagttttcgtccaattagttgttttttttcagatgcttcttgaaggtggtctcgagttgttttgtctaaatttttgagataacttggtcttatataagtcgctttgtagtgactgatcatattctgactttgtatatctttggttagataattagtttgttgactggaagtttctctgcgtcgacgattgtcatagtgtgattttgatcactcttatttcaaaaaaaaaaaaaaaatagccacgttcatttctttttattttcttttttgaaatatagatataatatattataatggtatgtatatatatagttagttatataatttacaatgatcccacacatatttcaaaaggaatgctaaaaaataaactttcctaggtaaaatatatttatatatatatatataagtgtaaaatgctttgaatctggtgtcttttggactatgaaccagttctgaaaagataagacacaataaagagaatattggtgaaacttttaccttctatgaactaatactctttgatataaattataatcttatcaatcacattacacccccacaatttatgcagtttgacgcggtgttacgcaaataagctgtgtgcgtacttggtaattcataattgttatattatttataataatataatatatagattnnnnatgtgtaataaactaataatatgta

SEQ ID NO: 56919 - DNA, 768 bp, Cannabis sativa
cggggttggtaggcgattgatgagaaaggcagctgtgtgaaaagcatgccaccaataggaaaagtctaatcctgattgtgctaaaagggttagccccatttctgtaacatgtctatgcttacgttcagccctcccattttgttcactagttttaggacaaggatgtgtaaaagagattccttgatcacttagaaacctggaaaatggtctgtactctccccccagtcggcttgaactctttctattggtaagttaaattgtttttctaccatagccttaaactttaaaaaaacatcaagggcttgagacttaagtgttaaggggtagatccaaacaaacctactaaaatcatcaagaaagtgaatatagtaactatatccatctttcgatttgatatgtgagggaccccacaaatcggtatgaatgagttctaagggttgagaggcatgagaactagatatgggaaaaggttatttgtgactttttcctaatcggcatgctttgcaaaatgaaagctggtttatggtgccagtgtggggaacaacatgtaagattttactcaaggtggcattggagggatgccccagcttattgtgccaattagtaacattagacatgtagcagacactattaatagtaggagtgcaatttgacaaaccaagagtatgcaatttatttataggaacatttgtacatgatgaattactgattacattgtcaaaggtagattgactagaatagatgaaagcagaaggtgtacaaacatag

SEQ ID NO: 56920 - DNA, 1589 bp, Cannabis sativa
  modified_base (983)..(992): a, c, t, g, unknown or other
tccagtgagaaactttcccactaaacaccatctatcatcaaaagcttgctcttcttcttcattctcacctgttatgagaacaccctcttcttcctcctctagttgaatctgttcatacctattcaccaaatcatcaccctgcttactacttgacgccatttgatcgatcaaaccaatcagaaaaactagtagccagaataacaaatgtacgaatacactttcaaaaacatgtcacaagacaagacatacagtgtttcaaatttgtgatttcattccagtctgttctgttaaaacaaaataattcaagcttcaaatcaagtaggacccataatagtcttcaaaccttatttttagcattataatatatacgatgataaaaaaaattaactaaaaaaatattttggatgttgaaagaaatagaaatcctgctaaaataattctttaaagagtgaactacagacatacgatatatccaggttctatgaattgctacatataaatacttaatttattttattccaatagattgagattcgatacttgggaagtaacttagtgactctatgatgaccattcaattctgatgatctcttatttaatttgcttaattaattaaataactactttgtgtagagacacactgtactctactgtcctttctctttttaaccccgttaataattttattggtgtgcatgtgatgtgattgatggtgaatcgaatgtctaagactcaagctataatttcctaaaaaaaaaaactcaagatataataagtcactttttatgtttacccaaaaaaaataaaaaataataataatacaaagtacaagttgcgtgttatggttatattatattattttgatttttttttttctctaaattttaacatctaccaaatcatattttttgattttttttttaccgttaaaaatttcttctgaactattgagattgttagatttaaggatttttgtctaattnnnnnnnnnnttactattttagtgattgtttatatattaaaccatactcttcagactttaatatttaccaaatcatgtctttcgaactttaacatgtactaaatcatgtcccctgaatttttattcatgttagaatttttttttataaaaattggacaaaaatccttaaattcaataaactcaataatttaaggggtatttttaacgaccttaaaagttcaagagacataatttgatacatgtcaaagttcgagcgaaaaaaatcttaattaacctattatttttttatataactaattagttctaattatttattgttatatatatatagaaattttgtatggtaagaagtaagaactcttattttgttcttagtataaagatattttcttaatcatacatattgtattaattgtagactttttatattataaattagttattatatacttgtagaaaataaaattttattaataaaaaaaaattgaactacattgatactccaaaaagctaataaaaagtatatgtttcttccactaatatggacccatgccattaattttggggtaagttgagaaatattttttttttgtattcattaataaaa

SEQ ID NO: 56921 - DNA, 1198 bp, Cannabis sativa
aaccaatcacattttcagaaacttattttcaatcacaaaattcaaattttcattttaaaatcacagtatttgaaaatacaatttttaaatcacaaaccaatccactccgctcgtacttctaaaaattaaataattttttgttgacattaatgaaaataagaatgagaacgaaaatatgaataagaatatcatgaaataaaatttattaattatataaattgacaaaaaagtaattaaatatttttgaatatgtaatttttttatataaatttaatcacaccaaataaaatttatttgattaccaaaactctatcatggagttatggcttagtaggttcttggttcaatatggaattttggagtgcactttttttgccattttaaaaaagaatagtcattttaacaaaatagtgaaaaaaaataaaataaattctaatgtttcaaaatgcaactacacaaaagactggaatgaaattaaaatcatttccattccattattctaaccaaacatacatgttctcaatgtaactccaaccaaatatttgtgaagtaaaaaattaaatggtgaaagtgtatttccttccaaataattgtttagaatttattaattatattgtaagagcatgtaattggtaatgtattgttaaaatataactcaattttccaaaaatttgttttaataattatgtgccaaatttagtacgaagtaaaaattgcgtcaaattttacacaataaaataaagcacatgattcaaaattatattacaataaatattatacttttatataatttatattgtgctataattatgtagttgtaataataaataattgactatttatagtaataaaattaataataacattattatttatatactgaagggtaatcaaatataaaattttgtattaagttatgtaaattagtctttttaattatcactaaataatatagcacaattttatattttcaacttgagatggttaaagactgacaatttttatttatttggttatttataatacttgtattatgatgtttttaatgtttaatgttattatttgttttacttaatcaattatagtttatatgtataataaatgtttagaataacattatattataaatatatcaattaaatttatatgtgcttgtgcataattataaagggtgatttatttattaaaaaaagtaatt

SEQ ID NO: 56922 - DNA, 632 bp, Cannabis sativa
tatatatatacacacatgtgttaatttcctatattagaaacattgacattaaaatatagtttatgtatattgtcatgtgtaagtgtattgtttaacaattaatagaactgattatattgattaaaagaaaatcaattgaaatatcaaacagaatggttaagaggacaactataacaaataactgatgaaatcataattgtaattaaacacattgagtatttaaaacagaaactaagaggtttggagatgtataaacaagaacaagatactgaagttgctttattagaatatgatttgaagtctttattatttgtttgtacagctgttacaaaagagcttcaattcaaagtgagacaatttattggagcttagtattcctcctaacattgaaaaaaaactgagatatatttttttaaagtaatttaaaaactggttgggcagtaagtatggtgaagcagcagagatgatgttgcttgctaccagaaaggttcaagttctgtgtaaacattttgtttcacaatttaggaaaatgatctaacaaaaaataatatttccctatcaatggggatagttgtttaagcttttagaatctcatgtatagagctgaagcttctaatagatgattatcaggc

SEQ ID NO: 56923 - DNA, 686 bp, Cannabis sativa
gattcatgctataggcaagatagaaatggagaaaaattctattgggattagtttgatacgtcgtattacaccgtattgtattgtattatattgaattatattttatacaatatttttatgtaaaattatatgtaatattgacttgtatgaatacataaatatatgatattttagtataaattaaagtttaacatagcattatatgaaaatgtgatatataatctaatttaatataatacaatacaatacagtataatacgacttaatacaacgtaccaaacgaggcgttaatgatttattttgtcctttgtgtaaaacctataacacaaaaacaactctaatattgggtcacaactctaatattcttttttcttctccatttttttcctttctcttctgtctctttctcttttcgtttttaatggttaattttttatgtaattggtttgttggagttatttttataagatcgacccgtctatgtgtgaaaagattttagtggttgttcatgggctattgcatgcaatatgaaagcttgaagaagaaatttcaaacatttcaacatcaaaatgttaatgaaccttattatctaaacaatgtgaaaaattttaaggagcgctcttctataccccaagatcttgaacaatgaggcttaggttgatacacaatatttccttaataatatg

SEQ ID NO: 56924 - DNA, 656 bp, Cannabis sativa
tttgaatgttgttttactattatttacatctaattttcttattattttgataaacatgtaaaaaaaattattaaaaataataatttatgtaaattattttcttcattttttaattatttttcttcattttttaacatatgaatttataaatataattaaatttgattttttcttcaaaatttttttagttagtttaaattatgtattgtactttgttagtttgattttttaagatatgtgtttataaatttaagaaagtttgaaaatatttttttaggaataatttagatttttttaaatacacttaatatttttaattaatttactatttttattaagttttaaaatttttttattaattatttcagaattaatagagtattataatttttaattttttttttcaataaaagggataaattttgtattgatcaaaattcagagactaaaaaagttaatttttaacggtaaaagaaaaaaaacttaatagaagggacataattatgtaactattatattttaggaggaatttttaacaagagatatattttagagagcaagattaaataatatcgaaagttcaggggtcaaaaatactaattattctaaatattatttaatatttaatataatttttattagtgccttaaaaaaaa

SEQ ID NO: 56925 - DNA, 633 bp, Cannabis sativa
aagagcactgttatcatgagcgtctgtagtgtttaatacctctaaatatatcattttatgattagttagtgatattctttaaaagttattatattaaaatatataagacttaatatttaattgaactaataagaatattaacatataaaaaataactaaacactactggtgtcttctaacattttttttttttttaaaaaaaacatattcattaatcaccacaagataaaaaagtgtggggtgtgttccacgagggtattaataatgccggcaattaagggttaattggttgcttgaataattaaaatagttttagtaaataaattgattattcttttcatatttatagtcaaagtatgtctgactatttaaatttgcactacatttacatacacaagagccaaatcctaggccatggttgaatccaaaggagattaacacataagtacaatacctacaaattaatagaaagaatatatttagcattcatataattgtttctttaaaaaaaaaaaaattgtttcttttaaaaaaaaaaattgtttctttaaacgtatatatatactaggtgatcattacgtgccaagccacgtactattagttttatttaatattttagttttttattttaat

SEQ ID NO: 56926 - DNA, 1228 bp, Cannabis sativa
aattttttaattttactcattcatgggtagtacccattaagagtgcacccatataaatatatattaattactctgttttataccatttttctcctatctgcagattatttgaattttatttttggcgttataaattttttttaattacttaaaattttataaaatatcttaattttaaatacatacacgattataaaaaaaataaattaaaatattctcaatactgaaataactagggggagggatgtaccataaaatttttctatttttttatattaaggtaatgataatatgtgttcacgacacacacttatattataagtaattctaaatcatttttagttaagatgagtcctatttttatttgttaaagtgataaaaaaaagtacatacatttaacaaaaaatatatatatatatatataaatgataattaaaaagtacataaatttaatttatatcaaaataattttatacatattttctctctcttgaagttaaatgagcacatacaagatatgtgctacaattgaatttcaaacccataaatatttttaaattaattaaattaaaataaatctataattttgttagacaatatcattaaatttggattgaaattcattttgctctagtaattcataaatatataaacaaataacacaaaaaattataacttgttttaataaaacaatttatgaagagtgacaatgtttggttaaaatatattaaaaaaaactaaatttaaataaagaatcattttatcaattcatgaaggaaacgaaactctatacaaataaatatgctaataaacaaaaaaaaaaaattaataccattttagattatatgttttataaaagttactgattggtcattctattttgttaaattagaaaatagaccttgtattttttaaaatagtacaaataggaccctgagtttaatttttgataattttttaatatagccaacttgaagacaatttctagcacgaacagatataaaaaacgtaaccagttttatcgtaatacttctgtatcgaattattattaaattttattagaaaattacccccatgtactatttttaacttttttttttttcacatttacggtttgagtttctcctgtagtttctatgtgggttgctatgtggattttggttgtaatttagattgatccattagttgctatgggcatttctacatagaattctataaaaatgcaaaa

SEQ ID NO: 56927 - DNA, 830 bp, Cannabis sativa
aaaattgattatatcacataaaaatttttttaggcatgaaccaaattatcataaactttacatacacacaaaattatataattacatcaatttaaagatatgtctcttcaactttaaagtaattgttgaacatcaataagaacattgtaatatatatgattaattatatatatctaagaaaataacaaaatataaaactatgataatattgtgaataatataataattacctaataatcacataaatatgtatgattagtaatcttgctcttgaatactaaataagtgagagtgttttgtcaaacaaaaaaaacgtgagagggagaggtggcagcaaagagttttatcaaaatcattattttttttaattaatataatttttttttaataatatgagtaactattttaataaaatttttatttttttacataaaaaaaaaaagatgacggaataaaaaaaatcaatggaataaaaaaattgttacgaaaatactaaataaaatgtattttctttttctgagatactaaataaatggtaaaatagttttaaaaataacttaattttttatcaaaatcaaaatcattgtgttaagcggtgatgtggcactctaaaattgctctaaaattattattcttttttctctttttttctaattttttaattatttttatgaatttactattattaattttaaaaattattcaaatctataattagatatttaaagaaatcactactacaatattagcctttagaggcagttttttcaaccctatttataaaaagggaagctaaagggtgtgaaaatacccgctatgttcgaaattga

SEQ ID NO: 56928 - DNA, 718 bp, Cannabis sativa
atgagactttgatttatgcatgtgggaacaacatgcattgtgattatattttatggaatgtgcattattgttgatttatattgtgagtaactaatgttaagtatctagttaggagagttatgtcctacgtagctctttttactaggcgttagctcacggatactctgtgtgcaggtaagggtaaggctaagcagtgagtatgaagagctcgaggggtaaactgcatgttaggaggctacagtattttagttttaatgtgtttttagttgttgaacattgtggacccagtattttgctttaactagttcttatttaagtttgcggattctaaaatattttgtattaaacaatgagatctcatgcttagttatttttcaataaaaaagtattttattgttttgattttattaattattttatatagactatcgtgcgtgacatctcaggaaatcggggtgttacaagtatgatcaatatctgaacttggatcttcttcagtggcagatttctacataattttctacactatcttgagtattgtcttgaattgtatggacaactcctcaatttactataaggttcaaaaatataaaggagagaagagaatttcaaaatacaagaggctcttttctatttttaatttttctgataaagagagactgttataaagtattagcttagaaaataagagcatcttattctatttataggatagttt

SEQ ID NO: 56929 - DNA, 1104 bp, Cannabis sativa
caatggtaatgggacaacttcccaaactttattgtcttgcataaacttattctcttcattcatgaatggatcattccatttttgagagttagaacttttcatggcctgatgtaagttgattggatcatcttccatcatttttgaactatattttcaacattgtaaactattcaaaaataaataaaatacctactataattataatataaattgtcatatagatatctctactatactagttttgtccaaaatgtacaatgcattaggtttatttttaataacatattacttttctcttcttaagagtatcactattttattatttttgtattatttatttaaaatttttattttaattaataatgtttttgaagatttaatatttaaataaggtaaaaaaacattaaaagaaagttgatatatatactatacgcgtaatcatatagtatatcctctaaaatggttgtttaagtacacctcttattagttttggtatttataaaaaagcttttagtctatttttttttttcttttataatcgtgtatattatatttatctaagacctgatacgaagtgaagggagtctcggagggtgtcatcccccacccccaaatttttttaaatattttaaaattacatgtaaaaaattaattaaaaataaaattaatttttttaatatttaaaaaaatatatattttttttatatgtattggctctccataaatttttgagctatctttgtcattgtttagaaccacttgtatatttgtattttttttcaaaaaaatataaatagtttacagtgccaaaataatatacaaatattttattcaatacgtaatttattaatttcggtaattagcttatatttaaggcaacctcttcattcactacaagggtgtcattgtttgggtaattagctttttgaatattaattttggtactataaacaatttaaaatttttcaaaaatttattaatgatcttaaataaagtttaaagtatataataatgagaagaaaagaaaatattagactacaaaacctttttgaatgttgaaaagcctaaaatagataacagaaccttcttttttttttttttttt

SEQ ID NO: 56930 - DNA, 791 bp, Cannabis sativa
gagctttagagttgactggtgtcaagttttctattcttactcatttaacagaggaagagcggactctagtagaccagtacactaagaggatgtctttcataatgccatcatcttctgatattttggcaagagccaagaaggccatgactcaaaaaactagttccaaagggcaatcatcaattacggggcctttaggcgcttttgcgtctctgaagggtgttgtcacttcgaaagccaatacgagagaagattcaaataagagatgtagagtcgacttggggagtaacaacgaagagggcactatgattccaagaaatgtttatgtgcactcaaatctgtctatgattgaaggacatgttgaggctctcttgagtcctctggatgagaggcgtttgcatgagcttggacgcactgcatcttttgatgactttgtctattcaatatattgagtaagtatctttttaaagtttctttcttctttaggtttttatttgctctaatgtttgtttgctcctgataggctcttttcgatgtgatttttattcgtcgagatcgcaaacagcttgacaaggagaacaccgcccttaagaagtttaacaaagtgcttcaggaggaaaacaagtgggtcgttgaaaagcttaacactttagaaaagaagattgaagagattgataaagagcttgtaaatgaaaaggaaaaatcagttggtttgtatgctcagctagatgacattgcatttaaagctatgtgtacagctcgcctagagtcgttcatgttgggttttatgccct

SEQ ID NO: 56931 - DNA, 1552 bp, Cannabis sativa
tcaatagttttgtaaaaaattccgaccacagaaaaattgtaaacttttgtccaaaatacagtatttttgtaaaaacctatttttttttattattattttttaattgatacccagttttatagatcatatctctattatgtgttttagggactctaattttgataaattatgtaacattatatttagtactttaattataaaaaagattatttatcaattagcaaatgtgtaggcttttttttaggtagccacatttctcactaaccttaattagtctttgttaaaaacttattagaaatttgcggtcttaatttatattgttttactataatgataaatatataaatgaatgttagttttaggtatagctaattgtagtgaatttgatttgagtgttgaaaggtcagagaagctttgtgcaaaagggaatgaatcaacaacaaaaaagcaatggaaagtagagaagagatgtggtcggccattggggttgagatttgataaagagagtgggaagttgtacattgcagatgcatattatgggattcttgttgttgggagtgaaggtggtgtggccactcctttggctacccatgtacatggaaaacccattctctttgccaatgaccttgacattcacaccaatggctctattttcttcaccgacactagtaagagatacaacagaatgtaagtaacaaaaaatttgtatactatatgtataaatacactataagaaatgttatttttattagcacagtttgcttatgcgttggtaaaagtaatttttaccagcgcattttgcaaattgctctggcaaaaaagtcaaagttttatcagcgcatatttgcagtggctaaatctaacttttaccggcacttttacgcgatgggaaaaattatttttgctagcgcttttattttgtgctagcaaaagttctaataccaacgttgattcgccaactccttttgtcaacacattagaaattttattttaccaacgcaatatcaaatttttgccaatacattagtcacatgtcttgtagtatagtaatacagatgggtctacctatagctttcttttataattcaacaaaagttatgttcagctttaataattagattaatttgttgaaatatcaaaaaatttatttttaaaaaaattaaagataataaaatatataaatctagaatggagaatatattaaacaaattgaaatatatattaagtaattgtttttcttgattttgttaagtaacaaaatcaaaagccagcaaaggtgttttcatgtttataaaaaaacaggactagtctcacctgtatattggggccattaaaccctatatgtttaaagaaaatttaagagataaaagtagagtgtgcaaaatgattttttttcgataaaaaaaatacaccaaactataacatggtcagggccggccctgacgattagttggtcatagaaaaaaaaattattttggacctttctttaaaaaaaaatatggtattttttaaaattagtaaaaaaaaaggtataattttaaaaggtaaatat

SEQ ID NO: 56932 - DNA, 1734 bp, Cannabis sativa
  modified_base (182)..(191): a, c, t, g, unknown or other
gacggtggtaaccaaacccgaaggagagaaagagattcatgttcaaatcttgataatgctctggtacagaaagaaatcatgggctggagatcttaaatggaagaagtcattatattccgctataatcaatgtaaggttttcttaaacccttatgtgcttattttcattattttagagaattnnnnnnnnnnatgttaattcaacatacttgttatagatcctggtaaaatattcccaagagttatttgtgatgggtgttctgattgggaaagtggagaagaccctagttctgccatttatcatgagaatggttgacgaccttgcttttttgtacgagtacccgtgagggaagatttctttcaactttctgaaagaaacttggagtaagaacttcgtagaaaagaagaagcatatggataggaagattgaaaatggaacgactcagaaggagtcgaagtactcggcctatggatatgttatagcactacagtattgggcttacaagtccatcctagagcttgttgaaaaatttatgattataaaattgcaccgctttcccagaatagtgaactgagagagtaaagaggtggcactcggtaaggatgaagtcattaaattattgcgaaaaaatataaattttttaattcattgtatttggtcacgtttaattatttatttcattttgatctaagtctaataatctttttattcttatttgcagttgaaaatttactccgttttatgtccacgacctaatgaggcggagtttttaagcaacgtcactggaggtgaggcaccactatttgtggatatggaagaattggttgttggtagtgatggacaatctactcaggccagtttgcatagccatgcctcgaagcttgcacaaacaatagaaaatcgagcgaaggaagctagaatcttcaaagagattacaccaccacaatctccaccatcagaggcccattctgttccaccgtctacatctatgccccattctgcatctatgccgcagtcagaatttattcccagaagttcacagcctcgggaactagtatcttttgccatattagcaagattagagagtgttgagagggaatagcttgctttaaagcaaatccaggctgatatttgaaaagggcagacaaagattatgggttacttgaagaccctattggcactcatgggagatccaagaaggcctaatgcaaaggcagagacatagccagaaccccgtctctacgagagatgagtttattcttcccaatgattacagacctgatgatgtggaagatgtactccatacacctcagaacatgtcaatcacgtccatcagagatacgcaagattttgaggtacaggttttagagactgttccaacaccggtggagaagagacggaagaagaggctgaggtggtttgacaagtacactaaaatgaagaagaagatgacgccatcgatagcacatgtgaatgttgacccacttcggcccgttaatcagaaactactacatagtttccgaaattggtcagtgggaaccattggaaacaagtatttgtgggatgtcttctctggtgtacatggcgtggcttggttctgaaagctacttactacaagagaatggctttctaacgatgtaagtttcttaactaagtattatttaatgttatctactattgttatttgttttattttctttaactaagttcagttcttgatcatactctacagca

SEQ ID NO: 56933 - DNA, 2003 bp, Cannabis sativa
ttagccactttagctagggcaaaacaaacccgtcctgccattgacgatcgaggaagatattgttagggacattgaagtccaagaagtggaggactagggcaaggtccatcatgctactccttctggtgccgaaggcgataaggatgaagggatagctcaggtgctgccattcggtggttacaatgatgaaggagaaccagtatctgaagcaagtgatgtcatggaggccggtcaggactacgttgttgaggagtatactgagtctcgtcctttgagaaggaaaggtccaatggaatattgatggatttctccaccatccgtggtgaccatgaagaaattgactaatttgttcaagcacagtctcttgaggaatgtcgaatgctttcttccctctcccagccaactggttactaaccctggagagggttattgtgcttggtcgggagctcataccaaactgggtgcaatgctgcccttacttccatacttcaaaaagatagccaattattaccacattaatccaacccaatttactctagagggcctcaagtatctgtctgccatgtttatgatatacgcctcataaggatggggtgagccatcccctcatgacaccaactggctgttcgatttgaagtcaagtcccatgcagaacaggtcggggtacttatacttctctcagatcgaggagtcgtggttgacgggcaccacataccccgaggtgacgaagataggaggctttgtagatgagtattacttaattaaggggatggacaccaattaaaccagtttctaatagattttgtcctactaccgccccctccccattcacactggaacttaggaagagggctcaaaaaattctccaactctctcatgatgaacgaaacatctctctcttggctactgacgccaactttgttaagtacaagctttattcgcctgattttgtaccaaaggctgaggaagcaacaagagaggttgtacacggataggaggctccaagcaagaagaagaagaagaaaagaaaggctcccccaaatagccaaatactcgttgagcgatccatccgtatcagagatggccctaaaagggttgctcgattgtctgccccagtggctggaaagggaaaagtcattatggtggagcaggaccagaaggattcttcaaacgatgatgccccttctttacttgttcggaaaaatgctcctacctacgtgcatggtactttaacttgctttgaaacttatttgcatttacttagatcatacttgttttgaccttcttattttattcatgtgcagctatgtctcagaagatgctgcgtggtttgaagaagaggtcgggcgatggctccggccaaacatctccatctaaacggtcaaatgtggatgaagttctgccaaaggacatggtcccaagcactctcaaggagaagagttcagctgtttctactattgaggattctgaggaagcaatgtcggaggattccataagaacgctgtagtcattagtcaatattgatcaatcatcacttcaataaaatgaagtcaaaattatctcctgtacaaaagtcaatattttgatcttgttcctatgtgtgtgttataaacacaatgagtaattataaaaatatgaataaggtaatgaaaagttaagcacacaagacaaaatatatcatatttaacatttgtatatttctatccaaaaaagaaatctgtgttgtgtatgtttgaaatagtcaaaataatattccatatgatgtgatcacgcaagggtgtcttaaaacataagctaaagccataccctactcaccgacaccctttaaacaaacaaacatttacatatacatccgtttgttttattttggaaactagtacttaccacattttcaataacatatactttatacaaactaggttccttataatttttgctcaatttattatgacgtatgcattattattgtggtttctattagaatatttctaattaaggaaata

SEQ ID NO: 56934 - DNA, 1866 bp, Cannabis sativa
  modified_base (1717)..(1723): a, c, t, g, unknown or other
tcttgacaactcaccttttgttatgtatctgatcatggggtccatccaacttggcccttgctcaattgcaaccaccgtatctttaattctgatgctcggctccgcgaggtggtttcaacgggcactacccccagtctctctatctcgttgtctgatgccaacttggccaaacagtctccatgaggattcttctctctgggaattctttccaccttgtactctgtgaactcatggagccattcccgaacaatagctacgtacgccgccattttttctccacttttgatattctcccgagacttgattgaccaccagctccgaatcgctgaagatttctacccttgcggcccccacgacttttgctaatacttctacaatcttaccctttactgacactctttagtgacccacatttttgtgcgggtcactaaaggattagggatgagatttagtgacacacacaaaaagactctaatacagctgtaattaatatatttttttaatttataaatgtattattttttggagaaaataatgagacacgcatgaatgccttattaatgcttttccttttttttttttctaagaaaattacactattttaatacataaatgaccctagcagctagtataacatgtttacatttacacgctgaaaattaaggacctttaaaaaaaataaaaaaaaaatagtaaaaggaaagaaaaaagagaatggaattagggtttaagttattagacttcctctctctttctttcttctctctctattccactatgcctccttcctctttttttttttttcgtctgcccatagccaacccaactccggtgactggctatctaaacgaacaacataaccaaaatcctagcccccaaaaacctctagatccgccactcacttttgcattttgtcggataaatctcatattcgcctccatctcactttttttgcgttcttcatgcctgtgtggatctctctctctttctctatttcctcaggtcaatgagggttcgtgtcgacggagctttgagttttaaggaagttcgtacacgacgctgttcgtggatgacgaagcttcagagcttcgagattcatggctattcgaaatcgactgagctattgggttcatagtggttcatcgtcgacaatggggttcatagctgtttgtgggtgacgaaaactgattgtgaaaatattttgctgttcgaggtctgtaattttgtaatgttgccttgcagatggttctttggttactgtaaagagactgaaaaaagagcgtacacctggtggagaattgcagtttcaaactgaacgatacgtgggttatgtgggttttgtatgacactaactaaatgattaaaattttatatattgtttgtgtaatttttctttaataaaatttatgctcaaatctattatactgtttaaaattttgtaatgttgttattgaatcattgatctcatttgggatattaatgtttgtatttgagatttatttgtaaagttctagtgtgtgtttaagtttaatcttttttatatattattttaattttttttgttataatatatttttttgattgaagtttattgttttattaaaaattaaaaattagatatttcttttaaattgaatatgattatattttacatttagttaatttaaattattattgttatatttaattgtatttgtatataattaatataaattannnnnnntaatatataaaatttgaattaaatcaaaataaatattgtttttttagaaaaatatttaatataatgacactttttgtgtgtcactatatctcaaaaaatattattaaaaaagaaaaaaaaagatatagtgacacttcatgtgt

SEQ ID NO: 56935 - DNA, 2491 bp, Cannabis sativa
gcacatctttaaaagtgctttaaaagtggtatactgatatattcctatctgtttcggtaatcgagagacaaaaacaattcaataatgtaaaagattatttcctgatctaccgagataatcataatatggattataatcttgtgagatattattgagttttaccgattttgcagtattattatcttttaacaattgtagtgattttattaaattaatataatattaaaaattaatataataatatggaatattttttagtgttatggttagagtagaaataatttttgacactaattttaatgatagtgtgacaccaaattgaatgtactcctcggagatgctcttagaatctctattctagttggaagattgaaagaatatactccacactataggagagtcgaagactggttctcaaagcttgcacgagaatcgaagcccataatatcctagttggaagattgaaaaaatataatatacactataggagagtcaagtattgattctcaaagttcacgatgcagagttgccaactagctaagcttggtagtttgttgttagaatctctatcctagttggaagattgaaagaatatgccataccttataggagagtcaaagactgattctcaaagctcgcacaagaattaaaacccataatagacattccaaaaaactcttgatttccaaggaaatattaataatgcataaccgcatcttgttggaatttattttaccaggatcttaacttattaattatgtatgtttgattattcatctataatctaacattctaaatatgaataatcctaaaacgataaataaatacttaagatattagaaaatcttacattggttgcaatgaaatataatatgtccttctattcagtactctaaccattgtttcaatctattgcagagtaacaacatgtactaaacctggaatctccttccttataacccaaaaagcgttactttttcataatcttctacaaaggacaaaggtctgagcatcaccttgaatagtgtggcctgatactcaactcacctttggaatatactttgagagagaaaaaggctattgaatttggaaaatataaagagaagaagagaggagagcttttcttgtgtcagatctagaaattaggttacagtagcattaccaagttctttccaatcactttctttatatagtcatcacttaggttaggttaaaatgagatggacttaaaatagaaaacttggacttaaatacactatagggccgaattccacttgagggtcatagagttaaattttgggaaattttcacaaatgcacaaaagtagtaaaaacaacaaatatacgtacacacggcaaaaagaacatatatacggtaactatatattaatttacataaaatacggtgtcatcatcttcgacaccttcaacactctctttccaggaaaaaaaatcagagcagccattgttccctcaacgaagctttctgaaacaaaaattcaacaataagtcaatgaaaaattcacaaaaaactcacctattcaaatattcaggttgaaaaaaacaaaaaacaaacatcaacaaaggtcaatcgatcaacaacaaaatctcatagaacaaatctgcttacaaacatgtatcaaacattcgaaacacaaatctcaaaaggaactgagtaagctctgtactacctaacctaaaattctcatttgaatgttgcagatcatacaataaatagttgagaaattgttgatcggagctccctactaaattcaaattcaaattgaaaacaggtattaaacatcagagccacaaaattcgaaatgaatagataaaaatctatagtacacaacatataattattatttaaatgttgcagatcatactagaatgagttgaaaaattattgattgaagttccctactaaatccaaattcattttgaaaagaggtatgaaaaaacagtcataaaactcaaaatgaagagagaaagatctacagtacataacatataattattttttaaatattgcagatcatacaagaatgagttgaaaaattgttgatcagagctccctatcaaatccaaaaagaaaataacaaggtattagattactgctgatgattgcatgctaacgattgaaacatttgattcaaaaaaaattttaaaaaaatatatagccgtgaatgtttattgttgtttaattgtttaatttatgtaaatcatttgatgttcaatttattcatgtataaaacaaacaaaaaaatgaattacatatatcttgaaacaaatagaagttgtcgatttattgttaataagttggaacaaaattgattttcttaatttcctgtgataaattttaaattttagtttgataaagaattaatttttctttaaaaaaatttaaaataataaagtttattgctgatttattggttaattaatgtaattcgaatattttcatacataaaaattcaaatttaattcaaatg

SEQ ID NO: 56936 - DNA, 1412 bp, Cannabis sativa
tcatgatttagaattggccgcagttgtttttgcactgaaaattttgtttttttttaatgatacggcgaccaccgagatctacactctttttttttttttttttgatgataatcggattaatgagtatttgttttgtgtttatttttgcacaagtttaaatacatttttcctaatgcaatttatctatgtaaatatgatttaatttgtcttagttatatctttttttgacttatatatcgaaaattattctgaattataatgaattaattggtggtgtccataatattactattttttaaaagttaatatatatttatttagctataactcatatttattttttctttttaatttcttcttttggttgagcaaaaagaaaagtatagtctataataggccacccttaaagtggtgatctagaacaaggagagttaactaacactagtagtatactcaaggctaggccttgtgctgtgttcccttctttgtttttaataagatgttcaatcaatgtatatatattttttcttgattaatgaaaatggcatcttttagaacaatttttttaaaaagtttaatgtcggttctgtaactatgtggcttatagttaacgtcatataatgattcatgaaataaataatgtatagttacaatcatttttgtttaggccaagttctatatatataaggggatgtatcttcataatgtataggataggagtacaagaaaccacttcagcaacaacctaactcttaaagttggaatacgtttattttgatcactttataactttctttcattaattaaattaaaataataacgtcagtagttaataattttttatattaaattacacaaatagttagtattataacccatcttaagactttattaataaacttaatacatatgccttttttatttttgataaataaaggatcaaataatgttacatgattatatgtattgtttgtttttaactaaattaagaacctatgactaataattatcaaaaactattttccagtaattaatttggtattatatttgtttaattgtttcgaatagaaatcagctcttttagacgataaattcaagtcgctttttaagaaagaatacaacaatacgttatagtatttagtacaaaaatgtttctttcccaatttgaattgcaccatctccaatgaatattatataatttgaattaaatttggctaaaaataacttaatcttacgtttagtttaaatttacaatagtactcaaggtgaaatttacctttctttgataaaaatgtgtaaaaaaatcaaataaaaacattaaagttttattagaagtctataaaatttttattaaatgtaaaaataattaataattacattaataagtgtcaaaaaaaaatataaaaaaaaaa

SEQ ID NO: 56937 - DNA, 2406 bp, Cannabis sativa
tgggttcgaagcaagttgttgagcgccttgattgtcacaccagatggttggtgtctgttgcagatggattccaatttcgttgagaacagaggttatccaaacaacctcagttgcagtggtagataaggcgcgatactcagattccgtgcttgatctagccacgacaatttgtttctttgaaccccaagtgattaagttgtctccaatcatgacacaaaacccggtagttgattttctatcatctagattgcatgcccaatccgcatctgaatatgcatcaatggtcatatttgtagcaggtgtgaagacaagacccagagttgttgtgccttggatatatctaagaactcttttgcaggcattccaatgtgtgactgtaggattttgcatgtattgacttagtctatttacagcaaaggaaagatcgggtcttgttaaagtgaggtattgtaaggagccaatgatgcttctataaagtttgggatcatggaatggttccttgttatctgtgtacaacttgttaccagggcacataggggtgctacatggcttggagtcttccatattggccttccttaggatgtcttgagcatacttagtttgagtgagatgaattttggaggcagatctgtatgcttgaaaccccagaaagtaatgtacagaacccagagttttgaggccgaatgtattgtcaagagcagagataatttgttgaataacagctttgtcatgacctgtgattaagatgtcatcaacatacaccaaaatgaggagtagatgacccttttgatttgagaagaagagggaattatctgaaatggagttggtaaaaccgcgtgagacaagggctgttttcaatttttcataccaggcccgtggggcttgtttgaggccatatatggatttttgaagcttgcaaacatgagtaggatgattactgtcttcgaagccttttggttgttgcatgtaaatggtttctttgagttccccatttagaaaagcattgtttatatccacttgttgtatgtcccaattgtttgttacagcaagagtgaacataagtcttaaggtagatggtttcacaaccggactaaatgtgtcaaagtagtctattccctcttgttgttgaaacactttagccacaagtctggcttttagcctttccaccgagccatcactgttgagtttggttcgaaatagccacttattttgtattacctgcataccatcaatatagggaacaagaatccatgtcttgtttctaataagagcataatattcagttgtcatagctgagttccatttagggtcagctagagctttcttgacagatcttggctcaagaaaattattatttaatctagttattgtagcagctaggagtttgggcttgtgtataccagacttggatctggtttgcatggggtgatatggtcggtgtgatcagggaatgatgtttgttgtggttgagtttgtgctatagcaggtggtgttgatattatgtctcgggtggggtctgagagtggtgcctgtggctgaatgggggttatatcagttggtgatgtggttcctgtggacctgtttgttgcagtaatggggttgggattatgatctggtggtggtggagtatgagggataattattggagagagaggtaagataattggttggtaatttgatgaggaatcgagtatgtgtaatagtgggaaataattgagaataaggaaaagttttctcatcaaatttgacacttctcactatgtacacacgaccaatagagtgcaaacatcgatatcctttatgataaggactataaccaagaaacacacacatagaggtcttgaactcaaacttgtgtttattgtatggtcttaggaataagaagcaagcacaaccaaacgtttttaaaaaactataattgggttgttggtgaaacaatgtttcaaagggagagatgtaagaatttctttgaacaggcagcctattcattaaatataggtgactgagacaaaagaatcccaccaatactttaaaggcatttttacttgagcaagcatagtgagcccaacttcagtgacatgtctatgttttcgctccgctctaccttgttgttggtgtgtatgaggacacgggtgcctaaagacaacacccaattgagctaggatatgtttcaatggtctatattcccctccccaatcgacttggaggcttttgattttgaccccaaattgtctttcaacatagttgttgaagaattgaaaaatagtttgggtgtcagatttaagtttgagtgggaatatccaggtatatttggtgaaatcatctatgaagattatgtaatatttgaatccctaacctcatgagtaggaatgtcaatggggcaggtcggatctgatccgactctga

SEQ ID NO: 56938 - DNA, 640 bp, Cannabis sativa
  modified_base (435)..(435): a, c, t, g, unknown or other
aaagtacatcacgggacaaaatcatatccctatatttatatgcttgaatatgatttaatttaatagtagtaacaaaaagtaccgaaatgtaacttaaaatatttaatccgtcaaaaaaatttatatagtattttttttttaaataaatatatataatatttaaaagtatataaaactaaaaatataaattatttatgccataaatatattaaatttcccctcatggattgagggctactattgtaatggctcaacttaatttattgtggtcagaatcatcctagtacagtaggtacgttttgtaggtgtcaggctacagaaatagtattgttcacatttcttctcacaaaaggagctccgatttgaattctgctctccattgtttaaaaaaattaataataaggagaattatttatatattatttttttaatttnttttttttttaaatttacgggttgggtttctaaagtggttgtagcgctagttgtaatatgggtttttgtacgattttttgttataatttaggttgaagcgctagttgcaatatgcgtttctctgtaaatttccgtaaaaatatataaaaaaaaaactgttttgaagtgtaaaaaatgaaaaatcacctaataataataataataa

SEQ ID NO: 56939 - DNA, 625 bp, Cannabis sativa
  modified_base (425)..(425): a, c, t, g, unknown or other
aatccaaagagcctggaatggcgaaagcttaaaattttattatcaatagtacgcgcattgtatcgtttgtactcgctgtgtatttatatttagtcaatttatctgcttaaatattctaagtatagggggtatataacccactcactttgtactattgattaatgtatttcttaaagaagtatgaagttttttcgaagttttgaaatttttttgaagttttgaaaaattttctgcagttttgaaaattttctactttaatatttattacaccaagctataattaaaccgcaatcaaaatgataaataaacagaaaaatgcgagtacccgtgtactgcgaagatgtcataacataaataaagatccccgaagggatgtcgatttgttcaaaagaaaaataagcataaatttgtctaagtacaaattncgagtacccttgtaccgcttaaaaaagtatggcaaaagtaataaagtaaaagctaagcattgggagcaatgggggcagttggagtggtagacttatcagcgactttgctggcagcctcgtccaggacttcctcagtgtcggcagcatcagcatcctcggggaaaagatttcctccacctccctgagtctgcgtgggtgac

SEQ ID NO: 56940 - DNA, 998 bp, Cannabis sativa
agttgtcatgtggttgtttttctagttatttttggttgttttatagttgttgatttatcattattttttagttgtattttcattttttattgaccaaagtatatttttgtaataaaaaattttaggccataaaattgtaaataaaacatacactcttctttatttggaattattagaccccattatcgaaattaacaaaatagtagtatgacatgtagtaacattatattagtgatatacgatagtaactattttattaatttttagaataaataataactaattaagtgaaaaaatcttaaaatataggagaaaaaacttcaaaattcactacaagaaaaaatatttacgattactgaaaaagtgtatttaaatgtattttgtaacattttagcaactgttaagacaacccatgtaattaaaagtattgacatttaattacctttttcacatgttattaaatatattataacattattttggtgttatatattataaatagttaacattaatttagtgttatagttcattatgttacatttattaataacattttcaaaatgtaattgaataggctttaattacattattattatgttatatatgaagaaatattacattattatattgttatttaataatagtaatttctaatgttatgattgttatatttattttaataacatttaaaaattgtaattatataattttaaattacattattattatgctatacattaagaaacattacattttaatgttgttataatttatttaccaataactatttattaatgttacaatctctcttaaggatacactttgttaatgttaacttttatattttctttcaacattttttagaatgaaaatattaaatcaaataatacctattatttatcacaaatgaaatctaatataatcaaaatttgataatatctaatataattggtatattaatcaaaatattcaatgaatataattgcctaatgagtctt

SEQ ID NO: 56941 - DNA, 1025 bp, Cannabis sativa
ttaagaattttgtattaatttctctatcatctaagccaaaaaaaagtttaataataataataatataaaaaaatcgaagatgaaatagattttgtattctctagctccttttgttataatttattacatataaactacaacatctttttaactttcatatagatttttaaatttctttcaataataacagaccgattgtcaaacattatagccctaagggcatctgcagtggtcgtcaacaaaattagttgcccacatgacacacttgtaaaatttaactaattattttttttgttttttttttattttagtgagcaccgatgcttccatatctgttttctctctctgtctctctcttgccacttcatacacatgtgaccaacttttttttttgcaacaatcttgggcaacgcccattggagaagccctaacaaaattttgattgaatttaaaaaagcccttatgtattttttttggtttatgtgtatatttctttaggtattttttggtttgtgactttgttttttttgaagtgattgatgaataaaatagtcaatggtagcaagaaaatggatttcgacattaggcaagataacaaaaattgatcaaaagacaaccaaatgattgaagtgatcaagatcacgtaccgtagtcttagattcactacaagaaatgtcactttaccaacacattttgtgttgacaagagtttggtattgcgctggtaaaataaaatttacttgatgtgttggcaaaagggattggcaaatcaacgttggtattagaacttttgccatcagaaatgaaaagcgctggcaaaaataacttttcccagcgcgtaaatgcgctggtaaaagttagattttagccactgaaaatgtgcgctggtaaaaactttttaccagcgcagtttgcgaaatgctaacttttaccagcacagtagcgagctgtgttagtaaaagtaacatttcttatagtgaaacctctttgtcaggaatgattaatggaggttgagggatgtgtttg

SEQ ID NO: 56942 - DNA, 938 bp, Cannabis sativa
ataaaataatagatgactaataataacataattaattggcttaaataaaataaaattaatacgagaaatattatcacatatattaatttattgaaaggtttgactaataaagaaatattatcacatataccaaatatataatataattaaataaaagatatgaatgaaacacaaaatttacgttattaaattgattatgtttccaattctttcttcaaacggcgaccatcacgcgctccaccactctccgcccaccactgtcattggaatttggaagcactaaccaacccttcatcacttccctgtcaccattttactttggttgcagtggtaatagattgatattagctggtgctggtggctataatatatagtgtgtcactatcactgtgccgttaaactcttctaccaaacaaaaaagaaatatgccaatctttatgtcactgtataatattatgttttttttttatggtttattacatattaattagtgaaacacaatttctttttttcaaaattggtttttaaattttgaaatatttaaaggcaacccaaacaaaaaagaaaaaacaatcactttccgttagataatggtcttttatataaaaaagacaatatatatgacttactataatatgtgacagataatatttttatttttagacttttctaaattaattatatacttaaaataaattaattttttaattaaaataattaataatttttttctcaaaaaataatatttatgtatattttttattttaaagaaataaataaaataaagttagtatcaagttataagtaatttattaattatttttaaaataattacaatagtttaataatgatctaacaactaaagtaaatataattatcataattatatatttaatataattatataaatatcttccatatatataaatattgttaac

SEQ ID NO: 56943 - DNA, 942 bp, Cannabis sativa
aaaagtaataatttttcgtagtgcgtacttacagagattcaaaaatataaatatttattcaactgagagttaaacttaagtatcttatacttaaataattacttattttaaaataataaatataaaactctaatcttaagttttaattttttttaatataattaatttaaaaacaatttatagtacaaatgtaaaaatataatttacatttttttttcatttttaattagggttaaaaataataattaataaaaatatagacagctgcggacccacctctacagcacgacaagaaagatcatcgcatgctcgccacgtgtccatgtgatcctccccactacatttcacacctcacatcgttttgcatacttaatttaatattaattttttccttagtgataattaatgttaaatttttactaataactccaattaaatgctaattatttcacagaaaaatttaaaggatgttttttttttttctattatcctttattttttaatgaaaaaaatactttagctcatgagacttcgagtctctattatttaatttttataactgtttatttatttattaattattatacacattgaaatggagattacaccacaataattcatatttcctatattttataccacaaaaaataataattcaactttaatttgactagttcaaacgaaaagagagtgggagtagttagttgtgtgatgtgttgtaataattcttttccagtgaatttaattattattacatttttaccttcaaattgataagaaaaataattctttaattaccaaaaaaaaaatagaaatatttttaacttgactaattcaaaagtaaaaaaaagaaagtgggattagtgtgtagaagtagtggagcaaaaaacatggacacgtggcacacttctatgagtaatttactacgtggcaagcatgcaa

SEQ ID NO: 56944 - DNA, 1158 bp, Cannabis sativa
ccttcaaaccatatattgcttacggcaccctgtttgctgtttgatatttttcattaattcttcataattttttttttcatattgttagtttgatttgaaattgtatataataaatctatacagacttatatgttttccacaataaaaaaatacatgttcgcgcctctaaatcagtaatggacctagctagggtttgttagtgtagaataaatagagggagggagttcatttgtgggttcgcagaaattgtaggagagaacaaggctttccagttccctggaatatcaatatcattttattttctcccactctattatttctttttcatctgtaaaaaccatttgttagtgggcaagttcctattagttttctttggttgtgaatatgagaattaggggagagagcttaagaatgatgaactcagaaatgtaaacccttcttttttttctttatttaggatcccttttgcgcaatagttattaatagctcttaagaaattaatgccaatgttatttataggttcttggtacttttattctttagcttcttgaaaacatgatccccttggtgtatgagtccaaaaataattcatgtgtgcttcaatccattaaaatggacattactcaagtgttcccttgcttagttcattttgataataaaacttgtcaccacctatagatggaatacttaccaaaattcatatattgtctggttattaaagacctaattgataactgtcaattccaaataagtggcagagttagttgagttatgttaagaatagaatagatagatacttgtttattttattggataaatttagaagttgtaattgattttaaattattacaagcatacagtcagtcagtagggaatgtaaagagtactttcttggaaatcattgagatggatactgtgaattttaattttacttttatactcgagtctcttaactcctatctgctaagaatttgtgtatatgtataagtatgtttttgaattttattccttttatgatatcttatacttgtttgaggttgtatttttgttcttatttttattattttttgggaaatttgcggcaaaagtctccaaaaagttcacgttgatgcagattagtccccaacctccaacagtagcggcaatagtcctcaaggt

SEQ ID NO: 56945 - DNA, 908 bp, Cannabis sativa
gaacgaaattcttaattaataaagttttgatttttattaaaaaaaaaatgattcacgtttagtaattagacattaattttcatgagaattttttttctgagttatattgttaaggacctactttttttagcaatatatatacacttactcttatatgtaaataaggcatttgtgacttcctttcatactttctagttcatagaatcattgattaaagtagtaacaatgataataaaaagactataaaagtaaaataaaatgtctatctattgttattatatgtttgttttttttttccaatgaaaattctttttctatgagtgatttgtgattgtaatacaaaaatatatgagtatgtatattgaaaaatttaagtgtgtttttagtattttggataaagttggaaattgcaatacttctttgataattttttaatttttttaaataattttgaatggtggaaatataataatctaaactgtttaattttgcttgttccaaaaaatattacataaaaagaaatatttgatatattaatttaagtaggttaaatatatcataaaaatcacaagaccttaaaatgagatcaaatattcagaagaaaaaaaagacatcaaatatataaatatatagggaaaattacatctacacactaaattatgatctaatttataaaaatatcgttagtcattatactttaagaaatataacgtaatttcaaaaaatatatatataaataacgtagactaaggtattgaatttcacgttataacacacacgagagtaaattccttctctctcttaatttatctcacttttactggtctttaattctttttattggtcacgttataacatttcatatatctcatatatatactaggtgattgttacgtgccaagccacgt

SEQ ID NO: 56946 - DNA, 790 bp, Cannabis sativa
  modified_base (520)..(524): a, c, t, g, unknown or other
aattatcaagataacttttttcctatctagtttgctcttctgacaaattcttactaggcatatagtgaatgacactgactaaaaattacaggtgccagattacctatgttgtaaaattacgctagacttattccgtgatccggtcatcactcctagtggtcttacatatgagcgatctgtgattatggaacatatctcaaaggtgtggtttttagttgtgaattgtgtccactagctttcgtgttctcgttcttctgtaaaatcctagttatgctctgacacttcttgtatattgaaattaggttggtaaatttgatccgattacacgtgaggctcttgatgaagaccagctaattcctaacttggccataaaggaagctgtccaagcctttttaagcaaacatggctgggcttatagaacagactgaaaaaaggttgactcatttggcacccgtggaattgacagtctttgcaagttcagcactcgtcttctggttgttcgattctgtaaagcatcttnnnnntatcgggtaaatggtgtctctcttctgtagtcttagatgtggggctttgattgcaatcatattcaaggtcatgcatatgtatttgtacagaatatattcttagaatcgattacctaacagcttgtacagatttggtgaactttgctatatgaggagttagtattataagatcatcatgcatgcaagtactaaagtttcagtttaattatacaccttctttgagatgttgttggcaaatcagagtgtaatcttaattatttagtaat

SEQ ID NO: 56947 - DNA, 856 bp, Cannabis sativa
taatatatattatatattatgatgatatatgatattgtaatctttaataatattgggtaattcaatgtatcgtatcccatctgtgtttcggtgaactccttccatctaggaactttgtagtaatagtgtacgttatactcatctaagatttagatggtgaataaattttaaaaaaaatttaaattgtttataattggtaaaattaatttaaatattttattatacttttttatacggagactgtttaaatcttattatttatattataaactattcaaaaaattttaaaaaatttataaataatcttaattatcaatataaataaagttctattaaaatactcttttagagactaaatttcctataatattattatatatcaaatgatatatctatagctaattataataatgctggctatactaattttgtgagcgtttaatcctgatgtgtattatgaaaataacatatccatatatctcagtttgaatattataatgtaatatatttggaagatagatataaatttatatggtacctaagggttttgcctcaatttactggtatatatgatgatctcttctttcatagttataattcactgtacacaatcaatcatatcttttagctttacaatactataaagaggaatttttggtttaattgattttaaaatgacatataaataatttgtgtcagttgaaataattgacgtattttttactttattttaaaaccgacacaaaatatttttttacttaagatataaaccaaagcaaagtgaaaaaacttttacttcggttcataactgaagcatagtagtatactatgctaatttattttttgtttcgtttat

SEQ ID NO: 56948 - DNA, 1414 bp, Cannabis sativa
gtaattttgcactcaatcttattttacattcaatttatttatttattttttcttttaaaaaatgaaaaattaagtaaaaaaaatataataaaaattaatgattgttaactattttcgctcctcgtcgaaatcatcttcatcaatctaaagattgtaaaaaaaattatcaaagtagattaccaattaattgaaattgttgcttttttttcacaaataagcataacagtaggaaaatagcaagcaaattattaaaaactaaggagaaatctaactgtagctggttgaataaagaaataggtttgtggcggagatgtaggagattgtattgaagtggaaaatcgggacaaactgaaaccctaatttttattttttttttaataaaggaagatgggtcaagcggttgttgcaaaataaaatatagatgtaatttttaaaaattaattaagtattcaaaaatttattttagaaggggtggaagtctaaattttgtaaaaaaaaaaaaataattttattgtaattattatagttaaatgatttaaatattaaaaatattataatagggacttaaatatatataaaaaattatttataaatattaattgctaaaaaagattttattaaatatttaaattaaaattaattattttagaacaattgttaattatgattaatttaattctaaaaaagaaatttttacatattgataatttgttattacaggttaaaagaaaatgtaactatcattgttataataaaaatgtaactattaagtaatcaccattatagtcatatttaaagtattattgtaatttagttaaaaagttatatgataattagatagttaagcaaattagaattattccattttaaattaatattgtgtcatatattagttcttattaggaaatgcataataaatttttattcctacacttaatactctatttattctttcccaccattcttatgctcgtatgtatataagaattattaactgatttctttttcaaaatcttatagatctattattttgcacaaataattattttatttattgattttttttttcaataaataaaacatatgatgaatcattgttcaaattaattatgcataaatcatcaatctaaaatttagagcaaacatataaatcatccatagtgattcacataattatgtgaatatatatataatttcttctacccatcacgatgaataatattgtagtttgcaatgtgtggtttaaaataattagaaagatcatttaacaatatatttctttatatgacctgtttatcaaaaatattaaataaaattttgaaaagtgtggtattgattgattgagtaatacaatgatacttatttatcaaaaatatcatcaaagccacctcttgatttgaaacatttaattcct

SEQ ID NO: 56949 - DNA, 885 bp, Cannabis sativa
gttagaatatccttactttgtttagaaaattttcttttgatgttagtcaactctcatgggttcgaccttgcacttacatgaacattatattccgaaacggttcgtgcacttgcgagtataaatattaaaacactcacctttgaggacaacatctggcatgcccagcccttgaggtgtccagtgtatgctgatgtggatgccacatcatgttgatagttgtcaaatcgtgtcctacttttgggaaaaataaagacacattaagtatttgattgtcaattactatctttctatacttggaagatatgatcttcaaacgagatcttgggaggtaagtcctgatatcgcgagatctggtaattaatagatgtgatacgaagctggatgtctggacgtttgctgactacttctctagacgctccaaatgatgccttccagattctcgttgtgctagaggtttaactctcctagacgagtcggctatccatcatcaagaaaaggtgacttcgttaatagatctgacctattatcttggttgggcctgaagtcattaaactatgactaactttagaaattacatgtgttctcatctagaaacacaaataatatttagttatattcttagtggttatgtatatttttagttgtataattagctttttttgttattcaataaataaaattattattttattaaaaaatatttaatttaagtgtatttataaaaataaaatattataatattcaaaatttattattaattatattcttaatttaatcaccgtaatactttgaattttatatataatacttttcactgtttttgaaatataatatactttttctaattttttaaaaaaataataatagaaatatattttttttaaa

SEQ ID NO: 56950 - DNA, 847 bp, Cannabis sativa
cctaacgtatgaaactatacatacgcatatacatttacataatattatcattttctcttatgcatgtatgtatgtatgtttatatatatatatgagtatagttgcatgcgtccaccaacatattattgggatgtgtatttggttgacaattccttttgtttgccaattttacaaaccattttttttacgaacttaccttgaaatccatagttttgatataatttttttttaaaagaaagtaattaaaggtattaactttgctcagcttaagtcaatgaacatcaagacctttctttcccttcttttttttttttattttgaaaaaaaaaaatacttttctgtactcaaaaagagattttatagattgttttctggtttatcctttcgacttgtttgctggtttttatatttcacatttatgctgtgcctcacaaactatgcacattatttattttttttcgtattatgggagaaagagggagtgaagctcaatttgagaaaaatctaaaataacaattgtgatcttcttacttaattctttcataggctcaaatcaaatatgggatccaagcatggcaatcaattgacttcttacctaactttgatgatgatggtgatggtttcagccttaagtgtcccagaaatatcagcacaaaatatatttacattaagtagttctgaacccacaggtgagcttagaaaacaagttttttcatgctttaatctcttgttaacatatactaaactatgttcattttatatttggtaatatagatataaataatatgcttgatacataacagttaaaacgtgaaacatgcattgactttctttaaatttgaaatca

SEQ ID NO: 56951 - DNA, 1749 bp, Cannabis sativa
ttgtcattggacatcattcatggcccaacaccttctataaatatcgtctcatgattagttggtaatattttttaaaaattattttattaaattatatgagattaatatttaattacacaaatagcaatataacaatattaaagatgagtgttaggtactaataacatcttatttgtatatacatataaataagttctcatttcctaatacataaaaatcttatttgtaccttaaattcttaaattatataagttttggcaagttaattcttaaattttattttttgataaattaattctaaactatatatgttttggtaaatttataaatggtccctaaacttttatcttattattaacattaaattctcactcttaaatattgatatttttattattttattacttactatttaatctattttgtgtattgaataatccccactcttagttttatgtagatatattaagtgtaatgatatgtacttaaaatacggactcaaatttaacacactaatgtggtagtttctacaatcaattataatgaatatttaaaatatatatgtctgaatataaaatatgtcacatatatattaatgtattgtgtgtaatatgtaagtatatattttaaatgtacatatgagtaatggatcacaatacattataattaacctccataaattaatactgatcaattaattaataacttataattaaattataattttgtccaataattatgactcaaaagaaaaaagtagtaatgatatacactcaaattacaaacctttatctcacaaaataatgtgtattaaaaaattaactttatatagttttaagtggggaaatcaatttaaattgtgtggttaaattaatatttgtgtatttaattatttgtttttgtatataatagttgtgttattaataattgctttcacttcatcaaaaataataataatctctttcactgcttaactaatttatttgacaattaaggaatatatataataattataatatttatatatatatatcatcatacaaagtatatcttctaaaattctactactcattatacaagaaataataatattcaatatatagatagaatatattattttctttaagaaaaaaataaaagtgaattaaataacgacaaaaatatatgtataatacactaatgagtacgtatagtgcactatgaaaaaattagactaaataattttttagatatcaaaatagataagcgtgcattagtgcatctatttcaatgggtgtattgtaaaaattttctactgatcaatttcactatacgtacgtatggacatatatgctttacattgaatctagccatatataatatatatacatatatggcatgcatgtgcatgtgtttcttctttctttcttttttttttcttttatttggataaaatatataataatttataaatctaggtgaaaagggtactagatagaattaggagtagtaggtgtatatatatgtgtattattaaggtaatattattactctaatagtaattaaaagtgaatgagaaattaataattagagtaatatataattgatttttacaacaaaagaatgtctctattaattaatttttttaattaaaatgaaatatcaatttcattaaaatttagtattcagagtacataagggtttgtaaatcagccggaacattataatcaataatgcttcaactagaaagaaatcgagattgcctagcaa

SEQ ID NO: 56952 - DNA, 673 bp, Cannabis sativa
tatgttataaatcggctgccctcacctgttcttggcaatgactctccttacaactgcctgtttcataaagaaccggattatggcttctcaaaccatttgggtgtgcttgcttcccactactcagaccatatcagtctcacaaaatgtctatgaagtctgaaaaatgcatttttattggttactcaatgcaacataaagggtacttgtgtgagagctcaactggcagaatttatattactcggaatgttcaattcaatgaggctgagtttcctgcacttgctgtccaaacaacatcacaagtaatctcccatcctcacaatgctgttcctttgttgagtttttgtactcctccaatttctcagtccactaatacattttctccatctgctactgagaacaacaatgctgcagcaacaactcagcaactccaacatgcacaacctgaagcaacccctgacccaccatcttctcctataccagaaacacatcaccccacacccataccacccaatcccacagcattaccttcagacccgtgtccaccaatactcccagaaccctctctgccacagtctctacctgcaaaccagcaccctatgcaaacaagatctaagagtggtattcacaaacctaaagcctacctttctacccatcatcctctccctgaatcact

SEQ ID NO: 56953 - DNA, 1545 bp, Cannabis sativa
gaaaaggtaaaaactgatgaggtgtatgttgttgttgatggtggtgcaaagcttaatgaacatgtagtagatgcatctagtacacaaaagtacacaaaaatttatgataaaatggtggttgcttcaggaattctttgtgatttgaacaaggtttgttttttagttgttttcttattgttttactgtttttgttgtcctgctttgaattttttttagttgtttattttattttacttttatttaattcttttttgttttattaagcatgatttattttctaatgatgatgatgattttattgatgctagtgcttctatggcttgtgatgttcaagctgctgagaagatggtattttatttttctattgttgctttaaagttgtttctattatgtttttttaatttatctctttttattgttttgttgtttttgacattagtattttactttagatggactcttcctctattgctgttgttgctggtcactcttctgtttcttctagttttcaaggtttggtgcaaaatgatatccgtgacattgttgtttgagacaccaatcttaattcctagaaagagggacatgaagaaaagggctatcttgaagcctccatttattgaactaggttcttttgaagctaaattagattcaatgtctaattcttctgatgattttgatttcaaaattgtgaaatatgttcatagataaattgaagagacaatgtgagaccaaagataaaattaaaattaaaagtaataaataatagtgaaaatttaagagagcaaagaatataaaacaaagttcatacaagaagccatgtcatcttgcttaacaagaggaatatattaatatattgatatagatgtttacaaaacaaaagaattaattgcggaaaaactcttaatactttcattttttcgtacttaacctccaaaactttttttttagtggtagaatttccaaaaccacattaccgttaacaatttgcagtttccatccaaatttaattgttaagtgccatgttggattgtccatgtagacacagtatacacgtcacacaatattattggtacacgtaaatatatattttttaaaaaataaataaaaaaaaatcattgaaaaataaaaattattttttccctaacatatcatatttttcatacatttttttttttcagttttcattcttcttcttgttccttcttcttctttcagtcacaaactgtcactaccaccaccatccatagccaccgaaaccaccacccacaacttctaaaatcaccaccatctaccgccactaaaaccaccaccacaacctattttcaaatccaaatcacacaaaaaaaagtcaaaccaaatttaaactaaatttaaacaaatccaaatctaaaatctaaatacacatatatatatacgaaaatttattcttcttcatcttctactttagtcatactctcaccaccgccaccatccatatttacggtaaacaccacccaccactatcgaaatgaccaccacaagttattttttaaatctaaatcacaa

SEQ ID NO: 56954 - DNA, 921 bp, Cannabis sativa
ctaaggcgcctgcctccttcgtctcacctcagggtcggccatgtatatgcatggatgattaatatatattgaaagttaaaatattactttcattaaaatggatcactcaagtcatgtactatatggttaaatatgtttatgtgactatttgtctctaagtcaaacaaagtgcatgcatataatgctaaaagtgttagagcacatggatcatgtacatgaaccaccttggcaccgcaccacaccacaccaccttggcaccaccttggcaccaccacgtcggtccctgaccaaagctactttgtcactgcttcaacgtgaccaatatgaccaacctaacatgaccaatatgatcaaaacgtaattaacatgatccaccaatatgaccaacgtgaccaatacgatcaacttgtaggggctatccctgaagacctagtgactcatactacgtaaagaagtacttttgtgctagtcacgtgccctcaaagctatccaagaatatctacaacaactatcattttttttaagatatattttttaaaatattattttatattttaaaactaataactcaattatagttaggaaaggaagtatatcgagttaataaattttaaaccctacaatgtaaatctacataaaagtggtgaaaagtcacttgtaaatagattcttctcggactctcactttctcacattctaaaatctcacttgaggattgaactcttagagaatataactttagagaagtctcatcaagcattgagattaataatactttaagtggactagtctattatagcacaaagagagtgaaccactataaaaattcgttgttcatcttgctcgtttacaatttttttagatctgttgataaaaaaccgcgtcaacaatttaaacgaaactatcattatttttagatatt

SEQ ID NO: 56955 - DNA, 987 bp, Cannabis sativa
  modified_base (511)..(513): a, c, t, g, unknown or other
atgttacaaaatggccctattgtgagtgtgccatatgggacagcacgccacatctaggagagtgaaattttggagcaacaattaataaagcaatccctgctcttctatatcagtgatcgcaacctcacaatctgttctagaagcttaggaaatgtgaaatacaagctttttgaagaagacacactttttgaagcttttttaaattatttaagtacgttattaaattaatcaatatatataaatgttggttttaatgagttgatacggtatgcttaaccttcttatttttctaagttcttttaaaaaatttagtatgtaactaataaacactattacaaaaatgatttttctcgatatttttaaatagtcgtttaaagtattctcgttggtttctataaccgtcgcctatatgatcccgtcgtaaaacggacaaaataggcgacagttaagaactgtcaataatgtggacttcctgagggtttaaatccgtcgcctataacagggtataggnnncggttttaaaccgtgccctatactataatactataaaattaaattagccgtgcgaagagcggctatattgcgtagtttaaaatatataagaatgtgatattaaattaatagtattgttttggtaattttgttatttcatattaaaaatatgtaaaagttaatattttgttacacctttgaccacaggtgctctatagtcattcttaattcaataatatatttgaaacttttatttgattattttttgccgacgtagctacgtacatgaaactgtgtgttcaccacggagctagacaaagtaattatttaaaatgatcgacatcgatcctcattatagattcataagatcaagccccaaaccgcttctgaagaaactcgaccacattattctctagcatgaatgccttagcgagaacatcagggttgattggtgggtcagaaccaaacacggcattagcaatggtaataactccc

SEQ ID NO: 56956 - DNA, 592 bp, Cannabis sativa
caaccaaattgcaacaaaaaccgtatagcaaccctcatagaaactaccagagacaccaccggagcaacccaaactataaatttgaaaaaaaaaagtatatggggtaattttccaaaaaaaaaaccataattatcttcacaaatttaaactaatcactatgtacattatatatatatatgcaaaacttagaatttaaaaaaaaaataaaagtgccactattgtggattgaacacataaccacaataccaacgtacaattctcctaaccaattgtactataaatatttcatgtaatatattaaaataaaattaatatattacatatttatttcgatatatataatattaattttcatattttcggggcctaggctctggccgctccaccctctggccggctctgtgttgcagcaagggttccttattctcggatggaccatattcctcttaattgggaatattaatttctttggtttcccttggaaggttgagtttttcatcttcatattccatccatgaggaataataatatgatcgacttgcgaggctagctggtactgtcatctttattcaagatctgggtattcctaaaa

SEQ ID NO: 56957 - DNA, 844 bp, Cannabis sativa
  modified_base (696)..(705): a, c, t, g, unknown or other
ccacaaatattggatatggtaatgacaatgtgatcgtgtccaacctgcctagttagcagacctatcataccatgggttgtgcttcacgaatacagccctaacttgtgtatttttcatataaactccccattagagggaaagggaaactaagtataatgcatataaacactataaatacccaacaaattcttcggattaggggttgaactctcttgcaatatctgttcaggcaaaaacagagaacatatacttattgtatttccatagacttttctggctacaatacataataacattaactcgttgattaaggctcgctaacacctcagccgcgtaaaaactctaagtgttgttctgtttctctctttgaaatatttattttttgagttctaattttttataattggtttttcaaaaatttcgataaacaattacgtgtaggtgttataatcatattgctgtattcatatatatttatctgttcactttaggttggttatatttaacaaaatagagagtatgattattaatttttacaaacataggtttgaaatgatatttactctcaaaaatatcaatttattaattggggctttttcatttttacactttaaaatatatatattttttttgcttttttacaaattctatatagaaaccctattgcaactagcgctgcaacctaaattgtaacannnnnnnnnntagaaacccctattgcaactagaactgacaccattttagaaacccaaactataaatttgaaaaaattagtatatggggtaattccccttattaatttgaaaaaaatagagaaaaatcaaactctttttttttttttttt

SEQ ID NO: 56958 - DNA, 1411 bp, Cannabis sativa
tgaattaatagactaagaattttatgaaattttttattacagatataccaaaaaattattaaaaaaattctaatatatattatgtagttaagttttcttcttaactttataaatatatattgtcttattacaattgtataattttaaataattagataaattaaaatttcttctgatttaaaaatctagggaggaagacttaattgatagtattggactaattgctatgcatcaattacgcatacttaattattatatattagtattagactaattaattttaggtatattattaatttttctaacatgtggtaatatcaaatttatagaaaaaaaatccttcatttttttcttactatttaccctgataaaaaaaatcttggtaaaattcaagatccaagcaaattagcctaatattaaatttggagaacatttttcttattcatttttttcttactatttttctcataagcgattttcttggtaaaatgcaagatccaaacaaagccttgggacctctcagcattgtttctgttttgtgtttttaaaatcgcgttttgaaaaaagaaaacattttttttgtagtaaaaaaaactgtgtttttattgatgttttaaataataattttttagtttttcttgaaaagaaaatgctaattaataggatattacataatatatattcaacagctaattaaagtcatggctataaaatatttttatatggtcaaaactttaaaagatatgctctgaagatctctcacgtctcttacaatatgaggaatccattggacacctcaaaggcttagctgttgcccgcaatgctctatcagctacacatcttttatttgcagataatagtttacttttttgtcaagccaatgacaggtcttgtgttgcaatagaaagagcattggacatctatcatcgggcctcaggacagttgcttaaagaagacaaatcggttatgtctttctctcctagctaatactcctgagcatgctcagcactccttcagtaacattcttggtatgccaataagtgaatgtcatgaaaaatatttaggcctcccagcctactctgagcaagataaaaaacatttgtttgctgatatcaaggatagaatctggaagttattgcatgcttggaatgacaagttattttcaattggtgggaaagaggttctcttgaaagctgttgttcaatccattaatttccacgtatatgctatgagttgctttttaagctttcaaagagagtttttgtataaccaacttgacacaatgatagctcagttttggtagggttcttcagctgataagaaaaaaacccattggaaaaaatggaaattcctttgcaaaactaagatggaagggggtatgggttttcgttcctatgtccattttaaccaa

SEQ ID NO: 56959 - DNA, 1422 bp, Cannabis sativa
aaaatagtaaaaataggactccgaacttaattttgaacaaatttcttttttaatataactaactttaagataatatctaataggaacagatatagaaaatataatcacatttgtataatatttttagatgagattattattaaattttattttgacaaaaattcaatccaggctcctatttgtacatttttagagaatacaatgtctattttgtcatttaataaaatagagggtcgaatttgtaacttttacaaaacacagtgtccaaaatgatatttacccatgtttattttttaaaaaaaaaattaagaaaataactttaaatttgaaaactaagttagtaaataactacttgtttcttaaaaaaaacctaaatataataaattagttaataaaaattataaaaatacatttattacatattattttttaaaaaagatatatataatgataaaatagtataaaaaaattataaaaatacatttattacatattattaaaaaaaaagttatataattttttagtattgcatattattatattgtaataaaaataaataaatatgttagattattaaatatatacaacagtatttgatatgtcatatcactaaaatttaatatatagtaataaaattgtatataccactattgaaatatgtatacatataaaaaaaaaattatgtataataaaataaaaattaaatattatcttaaataaatgatatactacatacaaaaaaactatataccatacaacaaaacatatatacctacaataaaaaaaatataataatataatacaatattattaaaaaaattgtatataccatattaataaaattatatatcagctttatttataataaaataaaaacaaaacatgcatgttctaaaataaaattatatactatacaataaaacttatataccatataacaaaaaccatataccttacaattaaaaaatatataataacaacaaataaaaataaaaatatataggatgctaataaaattatatatcatatcaacaaaagtataataaaaaataaaactcaaatattagttagaaaaaaattatatactatataacaaaaaatacatatatcgtttattaaaacatatatactaacaataataataataaaaaaaatatatattactaatatatatatatgatatatatactatactaacaaagttatatacaagaattaaaatatatgtatatcttgacaacaaaattatatactaacattgtatataatacgatagaaactaattaaatattatttaaaataaataatatatcatataaataaaatatataaataatataattaaatatatgtggcatgccaataaatttttttacatacattaaaatatttgtactgtgcaaacaaaattatataccacta

SEQ ID NO: 56960 - DNA, 1221 bp, Cannabis sativa
aaaatagaagttgtaagaatcatattctctgagaaactttaacgaatgaatcaaagaaactaataacatgaacatgagttcacgattactcaggatttaagccaatctactatattgatcgtcgttatgatatgaattaagtccttatagtaaacgacatgttagataaaaataacttcattcatatcgattatcatgtatatcatgtataatctcttataatctctattatatatattatatataataccttcactttgatgtcatactacatctgtaaccaaatcgaaattacttgcaccgaagaatgggcatcaagtgaactgtactagcaaccattaataaaagattctcaaaatttaatatgttgttgagtgttttatttatagctaagtggtcttagttctctgtacaactacaagccacaacctcatatagcaataaaaaaatttctgatatttaatataatttatccaataataaatattaaataatttaatattcaagcatatatcaaaatattcaactatttattaataattaaaaatgtctttacagactttttaggacataaacactaacacatgagccacacaaaatagtctttattgaactagaaaaccccaaagacaaacatggaaaacaaaatgaatacacattacaactaatttagatagttgtagccttttcattattttataaatgaggatgagaagaatgttgagaacaaagtttcatataaacgctaacaacatcattgacatagagatgaacagcattccaaggccaatcttcaacttgtactgtaatgtagtgagtctttcaatccttaaattttttgaagtgagaatataggagaaagctaatgttgatatgcatgagaaaaataatgctatttcttctaagaactttttttttggttttttaatatcattataaaaagataatgatgttgtgatcataattccgataaaaataaggatagaaatcataaggcataatttagttgtgcgtttcatccttcttttagcactttcgagaaaagggtaatgcattttgatgaatacatcttcaggcgttaagccatttgaatttttcatgtgtgcaaatgaaggcagcatattcctttgcacttcctgcagtggtgaatgtgaaaggaaaattaagtaactaagctaccgtttggtaatacttttactttttaattttttaatcacaaaa

SEQ ID NO: 56961 - DNA, 1122 bp, Cannabis sativa
ccttatgctaaagtgtctaagcctccaaattcacaaagtcagtctactcctacatgtttgccctcagctcatattccctctgctatgtctgtaccatctattccaactacatttggttcccaagaatgccatattgatcccttgatttccaacattaacagaactgttgatatacagcagcattgttttaatgaacaggttgcaggacatgtcccagaattaccaactgtttctgctactgtttccactgctgttaatgtctctccagctcctggaattgttcctgcttctgttactgatgcttctgcacacaatgatactcccacacaagtaccagctcagcaaccaaaacacaacatgcaaactcgatctaagtcagggatctacaagccaaagaccttcattgtgtccaaacttcctcagaacattcaacaggccttattgtatggacattggaacaatgctatgtctgaagaaatgatggctttgaagaaaaacaagacctacacacttgttaaattgcctcctggaaggcaagctatagggtgcaaatgggtgtatagaatcaaagaaaatgctgatggctcggtgaataagttcaaagcaaggcttgttgctaagggttttcaccaacaacctggtttcgatttcactgagacatttagtccagttgtcaaaccagtcactataagagttgtactaactcttgccctaagcaatgggtggtgtgtgagacaactggatgtgaataatgcctttttaaatggcaatcttcaagaagaagtttatatgttacaaccacctgggtttgaagatcccacagctcctcatcttgtttgcaaacttcataaggcactctacggattgaagcaagcccctagagcttggtttgagaggctgcaacaatgtttgaccagacttggatttgtctcatccaaggcagaccattcaatgttcattcaacacacaccaagttcaataatcatcatcttggtttatgttgatgatatattggtcactggaagtgatcaatctgctatcacatctcttataactcagctgcaaatgagttttctctaaaggatttgggtttgttagacttccttggcattgaagtgttgt

SEQ ID NO: 56962 - DNA, 1223 bp, Cannabis sativa
  modified_base (533)..(547): a, c, t, g, unknown or other
ttaagaacggtttggtttggttcaaaatcacggtttaagtataatttataattattcatattttttttaagtaattgtactatttttatgaagtttttaattttatttttcaaaatatatagagtcatttgcggcaaaacctcaccaactatcaatttacttgcaaaaaataatccaaaacactttaaggttggatatttttttgcaagtaaaattgatagttggaggaattttgccgcaaattactcttaaagtttttatttttattttaatttctcattttaatttttattttttaaaataatatggtcacgtaggataattttttagtgacctgtcattgccacgtgggcaaaattaagacttaacgaggctggacagacgacaccttaaaaatgtaaatggaacagtactttggaggattttcccaccaaaatataggttggatggttttttgaaagtaaattgataattgggggggttgtgccacaaattactcataaaaataaacattgggattatgccacttacannnnnnnnnnnnnnngtacttatgccactatttacctatttttttatcaaaaaaaaattcattaatcaaccaacgaatacaactagaaaccgaaggccaacaccaaccagccccaaacactgcctacaaccaaatcattttaataaaaaagaaattatttttctaacatgataagtaattattaatgaaaaaatatgggataatattatggtgctttcacatttatacttttataactcactttttattcatttatacaaatagaaacatcataacctcaaaatggaaataacttttataaaatgaaaacagcatacccataaaatagaaacagcataacctcaaaatgaaaacaacttgtataaaaataaaaaaaaataaaaaatattatatacatagcaattcccttagattcattactatagtgattttcttaatttatattgttgttagtaataatatgtttggctttgtgccttaaataaaaatatatttcaatgtaatcttttctattcaattatcaataaagaagcagatttaattttattacttgtttaatgtgataacatcagtgtatcttcgcagaacagtaaaagagatacaagcttaaaatctaaatcaagaaaataactaatgtatggaactcattcaatttgcagaaaccaatctcatgattcttgagtgagtgaag

SEQ ID NO: 56963 - DNA, 1227 bp, Cannabis sativa
attattagtactatatgactaattaagtagtaaattatgattatatcacattattatgaaaataagtcctatattaaaaataagaatttatgatataatttttcaattacggatattgttatacttattgtttagactatttattaataaacaagtcgaattcacgtggcataaataataaatcttataacaaatgtattgtggaataggttaaataaactcaggactcaacccatgaggtgaccttatctatataaggatcacaaggttcatgaagtgagatattttaacgttatcggggtgtgatttcgataaacattcaacatctcgtaatacgaagattttatagttggtcgtaatacaaagatcttgtggctggtcgtaatacaaagatcttgtacctggttgtaatacaaagatttggcatctcgttagattacacaattaggaatgcatctccttgtattacacagttaggtatgcatcttatcgtattacacaatcaagaatgcaaaaaatttagcattctgggcagtgacgtggacaaagtgcagtaagagtttttttagctgagtcagcgcagaggtggcaatcacttaaatctatgcctgctggttgatatgagaataagaaacagggagaaccaatgggccaaaagggagttgggatttctaattagggtaaatgaagtgtaccctaagagaataagagaaagaaaaagtaccaggcaccatatttacacacacatttttggagctatcattaatggaggaaatagttgcaagaatttagggcactaaaaatctaagcaagaaagagtgaattctaaagtgaaagaaggactcgagctcctagcttgtctcccgaccacggggtcatgaaggcaactccgttgaggcatccgaaatgaactctagattgtctcaggacaacgcactgtgtgagtgttcattcagagcattatagtggctacttcccttaaagtagtcttcagctggatcataagtgtgaagagaattgaattggttgctcgagttcaactcctctccatgtactcgagggaagtatttatactgttggccttcggtgccacgatcaacgtaacgacataactcgtccctttcatctcgtagccttcgatttcgaagtagcatatactactacttcttttagcttgagaagcagatgatactacttcttttagttgagaaagacttggtggaggag

SEQ ID NO: 56964 - DNA, 1962 bp, Cannabis sativa
tttattagttgccgaaaatctcggtcaacataaagtataataataatttttgtttctaataaaattaacatacgtgacttgacacgtaacatctatctagtatttatttatacatatacatgatatttgtactgtttttatatggtagtattgttatctaatttctttgtgtgagttgttccatactataattctctttgttagaatgaaatgagagtttattcatgatattatgaaagcacttggcttgatcgatcttcacataaataattttgcttctaaattagggtacgtattaatatacgtacatttttttcaaccctaaaaattagaaaaagaaaagtgtgtgtacgtattaatatacgtacattttttttgataatgatatatgcgtacgtagttattaacaccatatgtagtaaagtggagttgtctttattattcatttcacaataataaagacgtaaccttcccataaatataattactattttatttgtactaaatatttcaaatttaaattttggtattttttataataacatagactatttatatgtatacttttatatacatgatatatttatattattatatctagtattattatttaaaaaattatacaaaattattccaaaatttataatattttttattttttatttttataattttaaaataaattttgaaataataatattaagtgtatccagtgacgaattcaaaaaattttattttgtgggagcttatttattataaaaagaatatttatatatacctacattataattactattactagatttaattaatgagattatttcacaaatacacacaaacaacaaaaaaattataaaaatacggtttcacaaaattttttaaaatatttttacaatttttttttattttatttacagaaaatacggtcattttatgttgtactcttattaatttgttgttgattttttgttgttattttgatgttattttcatgttatttttatgtagttttcttgttgtctctataaaaaatcgtaaaaatgtaaaaaaaaattatttaaacgtaaaaatgtaattttttttacaaaaaataatgcattatgtaattatcctaattttagaagcttttctactattttggtccataattatcaaattaaaaaaaaaaaaaacttatatttaatttttgaaaagataatatttttgttagtaacccccacattaatatgagtgagcccgtctctgggtatatcaacataaatgtgttacatgtataaaaatgtacacataagaagtgataccttaaatttactaatattttagtaatttaaaagattttaccgttaaaatttaaacttaaaaaattagtgtgactgaaacgacaattaagaaaatttaattgtgaaaaactcaaatatataacattgacttttttaggccaactccaacaagattttaaaaactcaaatatagtgtgattttacattataatcactccaaagagacactataagttacattaattttgggtttgtttacaatgtcccaccataattagtgagcactatagacaacactatataattttttaatttttactttttaataattatataatacttaaagaaaaaattaaataattatatatattaatgaaaactttataaatgtatttgtttgtatttttatatttttaagtgtgtgaaaaaaaatattaaggatattcgcggtgcgggtggtgcagtttttggccattttttcaaaccaacccgcacatgcagttttttcaatttcctaaactgcatccgcaccgcaaaactaaaaaaccgcaccgcaaaaaatgtttattggatttaacaaatattcagtattaaaatattcttattatattaataaaataatagaataataaagaatataatatttagtgtaatttttagtgttgtggttggaattgaaaaa

SEQ ID NO: 56965 - DNA, 884 bp, Cannabis sativa
gagggtagaccatggcaatgacagtcgtgcatctactagataggtgaccaacagcaccacagttgaaactcactaaaggaagctttacaaatttaaattgaatccatctctttggcttgtccttcctgtcaagaaaaaacccaataatgataggtttagatatcattatttcaacaataaatttcatgtaacctttcctttgcatctcctcattacaagatggatctgtatcacacagcacccccacctaccgcaagaggaaagttagaatgattaaggcaagggggtggtaagccatgagcctaaaccaaaaaagaccaaagtcaaactcttccagatcccagataccatcctctggctattcacgaatattgagaagctgacgattcataacccagggcctgaaatgcaagaccttattaccgtcatgttctgaatggaaatcgaataacaaaataccattttggagttctttgatgtcctaggaattgagcgtttgccatacctccaccagaatattttttagaagacctttagaaaagaacttatgacccatgaactttcccaataccaattttttagagttaacttcttctcctaccttgacttcaaccagttcaatactttgggaaggatcaaagaaacctgaaggaggcggagcagaggaagaagcattcatagaaaataaatcttaaagacaacactaccaagagaaatagagaaatgaaggaatccgaaactctcaaatacgagagactccaacaggggagagaaaacaattcgtattggctgaatcatttatgaaacagaatgacaatgggaacaagaataagtagaatagaataaaatttaaaatgtattaaaaaaaattgataaaagaatta

SEQ ID NO: 56966 - DNA, 1056 bp, Cannabis sativa
acaccagaatattgaagcagtcagatcagagagttcagtttgaggtggagcctatggaacaagatcagattacagaacaggtggaggtacagtttgatgagcctgaggaacatgaagatgcaactgtctctgaatcagatgaacaaggttctgacactctggaatatcagttggttagagatagaaagagaagagccataagacccccagacagatttggctatgcagatgtggtgtactatgctttaagcatttctagtatggatagtgaggaaccaatttcttatgaagaagcaatggcttcagttgacaaaataagatggttcaatgctatgggagaagagattgtatctcttaagaagaatggaacatggatagtagtgaagaaaccagttgggcaaagggtgattgggtgcaaatgggtttacaagcataaagaaggcataccaggagtggaagaagccaggtttaaagccagacttgtggctagaggatttgctcaaagggagggacttgattacaatgaaattttctctccagtagttaaacacacatcaataagattgtcgcttagtttagttgcttctgaagatctcaagttggagcagctagatgtcaaaacagccttcttacatggtgatcttgaagagcaaatattcatgaaacagccaagaggctttgaagaaaagggcaaggaggatcatgtatgtcttctaaaaaggtctctttatggtctgaagcaatcccccaggcagtggtacaaaaggttcgatgattttgtacaaggaaatggtttcaaaagaagctcttatgacagttgtgtgtacatgaagaaaacacattctgtcagtgtctatctactcctctatatgtggatgacatgcttattgcaagcaagagcatgagtgaaatagacaaggtaaagaaaactttgaacaaggaatttgagatgaaggacctcggttcagcaaagagaattttgggcatagaaatctgcagaaacagagaaaggaggctgctaaagttgtctcaggaaagctataccactaaaattct

SEQ ID NO: 56967 - DNA, 1508 bp, Cannabis sativa
gattattattttaaagtttggaacgacaatttgttctagaaaacaaaggaatagactatatgtgctcatacaaagtgtgcaattaattttgaataatgaattatttagagtagctttgcctcaacaaaataagaggaaaaagatttttgatgaagatgtaatgtatttatggcatctacatttgagctacatcgacctaaatagaataaactagttaacaaaagatgttcatttgaaagaactaaaagttggaactcttctggtatgcaaatctttttttagaaaacaagatggctaaaagacctttttttttttctgcgaaaggcaatagagtcaagcaacaacttgagctaattcacattaatgtatgtagaccaattaatacttatgcttcaggtgcttatgaatacttcgcaacttttattgacaattattctagatatgtttatacttaactaatagccaagaagtctaaaacttctaaaagttcaaagacttcaaagccatggctgaaaagcaattatgtaaatcattaaagatacttcgattagattgtgatggcgagtatttgaattctaaattcaaagaaattttgctagaaaaatggatcttatcccaacttacaacacttggaatacctcagaagaacggtgttttagagtgaagaaactagtcttgttaaacatggtcagatcaataatgtgttacccgacactgccactaagcttctagggataaccacttctagcggctacttacaatttaaatgcagttccctttaagagcataagcaatactttgaatggaattatggaatgagactaaacccagtttgaaatattttcgtattggggttgtcctgctcatgttcttaaatccaagactgggaaaattgctcccagaattaaagtgtgtatgtttgtgggatattcagaggaacctcaaggtgcattattctatagtcatcaagacaacaaagtatttatctgaacaaatacaactttcttgaacatgactatatgaaaggtcacaaatcatgcagtcaagtggttctcgaggaactttgaaatgaactgatttttgagccatcaattgaacgaccaacaatggtcactactattccttaacaggaaactccagtacattgtcatagtaggagggttgtgagacaacttatcttctatgaacacgaagcacatgttctcatctctgacatagacaaggatgatttattaacttagaaagaagcaatggaagaaaatgactcaaacaaatggaacaattccatggattaagaaatggtttccatgtgcacatacaatgtctgggaatatgaagctccacctgtggacattacacccactgggtataaattgattttctagaagaagagaaatgcttctcgtcaaaggctacacacaagtagaagaccttgattatgatgaaaccttatctcttgtggaaatgcttaaatccattttcagtctcctttccatagttgccactta

SEQ ID NO: 56968 - DNA, 1073 bp, Cannabis sativa
  modified_base (205)..(207): a, c, t, g, unknown or other
ggtcggggaatgggaatgggaatgggtatgggaatggggattgggaatgggaatgggaatggaaatggaaatgggccgggaaatgggaatgggaacgagaaaggaaatgggaatgggatggggaatgggaatggaaatgggccggggaatgggaatgggaatgggtcggggaatgggaatgggctagggaatgggaatgggaatnnnaatgggaataggaatgggaatggactggggaatgggaatgcgaatgcaaatgcaaataggaatatgaatgggaatgggtcagggaatgggaatgggaatgggaatgggtcggttcaggggaatggcaatgctaatgggaatgggaatgggaatgggaatggggatgggaatgggaatgggaatgggctagagaatgggaatgggaatagaaatgagaatgaaaaaaaggaatgggaatgagaataaaaatgggattgggccagggaatgggaatggaaatgggaatgggaatgggaataggaatgtgaatgcaaatgagaatgggaatgggccggggaatgggaatgagaatgggaatgggaatgggccagtgaacgggaatgggaataggggtttggggtttgtggtttggggtttggggtttttcgagttttggcgtttcaattaccattccattgtcaagactattaaaattactattactcaaaagttccaaacgatatatatctaaatgtttgtttttgtcatagcaaaaatttctaccatttcaaaaaaattctatcaataactcattcaatattataaaaattaaatctgtaagaactagacaggtaaaaaataatacataataaataatccctaaactagaagacattattaacaaaaaaaaacaatcaagttttatattttcttaactcagaaaaaaaatggtggaaaaaatgcaaaatagggaaaaataataaagaaaaaaagtttacctttaaccgtttgatcagctgggtttgggcgattctggtatgggcgagatggaggctaacatgggtttgttgggcgagggtttttgggtttgggagggtttctgtcga

SEQ ID NO: 56969 - DNA, 1514 bp, Cannabis sativa
catttatggacctgatgaattgagtgttcaaagacttcctgaatgactttatgattgtcttcattgatgatatcttggtttactctaactctaaggagtcacaggagagacattttcagatggtattgtagcatctttaggaacatgaactctatgctaagtttaaaagtgtgatttctggttactccaagtaagtttcttatgccatggtgtaaataacgatggaattttagtagatccagtaaaaattttggcagtatgggattggccatgacctatgtctgctactgaagttagaagttttttagggttagtagggtattatagaagatttgtagaaaggtttgttaagattttcacaccctcaaaaaaattaaccctaaagaactgtaagtttgtttggactaataagtgtgaaagtaatttccaagagttaaagcagatattaattatgacaccagtattaactctgccgattagtgatgagaaatttgtgatctcctgatgtttctaaacaaggattagaatacattttaatgtatttctgtaaagttattgcctatgcatctaggcaactaaaggaatacgagtagtagtatcccacacatgagattgagttaggagcgatagtttttgccttgaaggtttggaatcactacttgtatggggaaaagtgtgaaatctacatgcatcataaaagcctcaagtactttttcactcagaaagatttgaacattaggcaacaacaattattagaattggttaaggactatgactgtgaaatcctcttccatccttggaaagcaaatgtggtagcagatgctttaagcaggaaaggtccaacataagtttatgagttgaagatgatctcaccaaaattggttgaagacatgactagaacaagaatcgagtttgtgattggaaaattagccaacattactttacaattcgacttactagaaaggatcaagacatctcaacaaagtgatccaatattactagagtataaagaaaatttcaatgatggttcaacaaaggatttttcaatttcatcaaatggattattgcgatacaaaggcaaatgatgggatcaagctggagattctagatgaatctcataccatacagaattcgttacacctgagaacaaccatgatgtatgaagatgtgaaaacactgtaccggtggccaggtatgaaaggtgatatagttaaatacatgtcgaaatgtctaacttttcaacaagttaaggtagagcaccaaaggcctgtgggattacttcaacctctgaagattcctaaatcgaaataggaggatataactatggattttatagtttgattactaatgacaacattattttatgattctatttgggtgatagtggaccgatatacaaatacaacacactttttaccagtgcaaactacgtataaagtggatcaatatcatgatttatatgtcaaggagatattttgacttcatggtgatccaaagtcaattgtcttggatcg

SEQ ID NO: 56970 - DNA, 1143 bp, Cannabis sativa
  modified_base (396)..(406): a, c, t, g, unknown or other
agtaataaaataaagatgaaggatataaatgtttagtttaccgtgtagtggtatttaagtaataaaattatcattttatatttttgatgtaaaaatttcttaaaagaattgttatttaattctaaaatattattaaaagaataaatttaccaataatctagtacattttgaatattaactatttatatacactcactaatttaccattagattaaatatctatggctataaaaatatccctacatagagacaaaactaatgtacctattatagacatatcctatatctatagatactaattattatatttatttagatccaatatgtgaaggcccagcccaagctcactaactattgtattgtgaaacttgaaattttttttttcatatttatttnnnnnnnnnnnggtatttttgacaagtgttgctcaaattttgttatatttgtgatagtttaattatttggtgatagtcctaaccgcagaaaccgcataaaccgtactgcaccacattgttttttgcgcgtggtgcaatttttgaagttttttaattttgcggtatgagtgcggtttgaaaaattgaaaaaaccacatgtgcaaatttgtttaaaaaaaataattaaaaactgcagtgcctacaccgagaacactctagttctacctaaaataataatatatatatatatatatttattggatagaacttttttaataacatcgtaaaataagtatactctacatattttacctattgtcatctctagttttttcacattgcattgagcagtaatatatataaactagggaataataccgcgctttgcgcggttttgtttaggcttattattttttgaataaaaaaacaaataaagcatatgtgtaagttaaaaataaaaaataattaatggaagtattatttttatcatatgagaattataaattaaagttaacaatttaatcttagacgttaagctaaacaaaacatcataatttgaaaattattctaaattttgaactataaaaaatataatataaaaattgtaatgaaaaataattaaaaaaatattttcatttaaaaaattataattaattgggcatgaatcctcaattatccacataaatactatgtaatgttattttttttt

SEQ ID NO: 56971 - DNA, 707 bp, Cannabis sativa
gaataaactgttcaacccaagctactccatgagacacatcctttaaaggtgtgggggtacggttgggggtaggaacccaaggatcgaaccaaatggaagtcttctccccatttccaattttcctgcagatgcctttttctagcaccatccgagcatctagaatggctttccacatggccgagtcatctctctttcggtcaagcagtagaaagttttggtcttttatgtattttgcatttatcaccgcactccaaacgcttgatcgatcagtgagcgctttccaagcccactttgtcataaaggctctgtttatcactcctccgcttctaaatcccagaccgcctctcatcttgggctggcatagagcattccaagccatgagatgcaacttcctcttttcattagtatctccccaccagaagtcccttaggcatttatccacagtgtttaccacattaattggtatcggatccgaggcagcgacataagtagctagggatgatccgactgagtggattaagcaggctcggccagctttcgataggagtctagttttccaacttttcactcgttgtagaacacgatcaaccaagaaccgcatatcctttgatcgattcagtgatctaaagaggggaagccccaggtaagaggcatccttcttcattctcttcatatttagcaggtccgcgatatctgttgcacatctc

SEQ ID NO: 56972 - DNA, 2321 bp, Cannabis sativa
cacaaaattaattaagatgcttatacaaatatttatgtatcttatttttttttttttgaacaaaaagtatttatagattaaaactaaatagatttagacttcacgatcattataagataatgtctagttaacaaaaaaaaaaaaaaaagcttaactatatcagtaacattttatagcaaaagcctatttagctacattataaaccgcaaaattataatttttgaaaataataaaaaaaaattacaacttaacgaaagattagagagatatttacatggaagcacatagttaccaataccttaactggaacaagttcccttcaactcttgacaatcgtctcagagtcacttttgatcaacacaaaagggtgtttcaataagaccgcagtctccatacctaacagacaggtcgtaacttctccaatgagagagtcagagaagttgagcatgttagtagccacccacaaaacagactttgtgtggtccctagccaaagccgccacgcacattgaaccgcaactaattttgacataaaaattgattttgacccaatcttcaagaggaggagaggaccaaatagaagcctcaacaaccttcgacgaaggaaacaaataaggaccataatctgcgtaacaaatagagatagggtcaatacaatatttaatgttactcagagaattatagtgtaccttaacgttgcaggccctccagatcgtatccaccacaatcgaagcataaggaacaactcctgaacatcgacccctttagacttcagactccaaagaaatttaatccaatcccaaacacgagctctagaatccataactgtataactctccagggggatgacctccaaaggtgaaaagcaaagttacaatagaggaaaagatgctctatcgtttcttctctctccccacaaagaggacaggaaacctcctcaatatgcattcttctagtgagaaaggaacgaataggcagagaatttgagagaatgctcaaccaaaggaccttgtgacgcttcaaaattttagaattctaaagtttgttccacaaagcgggagcaacattacacaatggggcacgatccaaagcttgaacaaggtacgcaaatttagtggagaacaaaccatttggctctttaatccatatccacttatctctaccctgaccacagggtctaccacctttaatgttgttattggttgtttccgtgtcaaaaagagtgtaaagtttagagatgtcccaattcccattgcctaaaagtaaattcgtaactttctccaaaccctcagaccgaagattattaggttgaggataaaaatcttggtcatgtataacccacgggtcatcccagatattcgtcttttgcccatccaaaataagcttgcatgcaccttgcttaagaatttttttagttttcataacattcttctagaatccagaatcgaagttcttaaagaaacaattcaagaaaggactacctcttagatacttggcacttgacaccttacaacgcagtgattgatcctcattaaggagagcctagccctacttagccagcaacgccttattcatttctaaagtcttccgaaagccaagctcaccttggaatttaggaaggcacaaatgatcccaagcctctaaatagataccgtaatttccttaactccaccaaaagtcattaaccataccatcaatttagaggcgagtttcttggacagctttgtggtttgcatagtgtaaactggtaaggacggccaaccaatttgatcaaagtaacacggttaactttgtacaaagatttcaacttccacatgtgaagcttcgagactaggttatcgagaatgaagttaaagtctacatccttattgcgagtcctaaacaacagtagccctaggtaattaatgttaccaatggcattgttgaggccaagctcctgctttatacctcgtttcatatcctcacgagtattattgctgaagaaaatagaggttttaagtttatttattcactggccagaccaatcacaaaatttctccaaatactgccaaacacccttagcttcctccatcgtggccctacctacaaggattagatcatcagcaaagaagagatgagatagtcgggatccattccatctcaacttgataggatccagtttccaaggcgttatcaagaatacgcgagaggatatcagcaacccagataaaaagataagggaaaatagggtccccttgtcttatgccacactcaggagcaaaactactaaccgtgccgccatgtaggaaaaaattgaatgaagtcataaagatacactggcag

SEQ ID NO: 56973 - DNA, 3122 bp, Cannabis sativa
caaaattaaaataaccacatcatatatatataaatatttacaataataaaaaattagaagaaatttatttttattttcaaaaacgaaaagaacctaaatatataatttatttttagtatgtacgtaggaagaggagtttcaatttacgacattaaccaatcaaaagagtactatatattagggttgtatataaatttttgtaagtcgcccaacttgaacaatccgcccaaatcaaatcgagataacccgacgaaaaatacaaatcagaaaacccgacgaaaatataacccgctcaaactttatattgggcaggttaaaaataatattaacctgcccaatcaaccctaactaactatatttatctcattatcataataactaaaaatataacaattgaatgtgaaaaaaaaaattaaatattagtgctcggtttggacgggttaactcgactaaaccgacgaattcattaggcaggttgaaacttcttttttctggttgtacttagatttttgtaactaaatctttacattaagttaaatgtaactacaagaaatgaaaaaaaaaatgagtgagtaactacaagagaggactccgtacattttccttttgaactttctataagattaaattaagctcaaataaaatagttaatacaacaataagcaggaagtttcgtaggatttcgttttattttttttctaatatatatgtcagccaccaaagattttttttaatgaaaaaaaagaagagattttttaaaaaataaaaataataaaataaataaacaattggtgagtacagaaggaaagcttccatatatagttccatgtagtttgactgtgattttaatcatagaaaaatcaatgtgttcaggagtagtctctatataaaatctacgactaatagtagtgcaagatattatgggaaacacttgaaaagattaatggtcaaattttcaatttgaaaaagggtctaaatatatggtcacaaattaaacaaccccaaacctatggccaaaaatcctagatatttcaacgagacccgtcaaatgtaggaccccaattatcattttcaataactaattttttaatggttcatctttaatattatatattcaataatttttaaataattaataaaacaaaaaaacaatgataatatacttgttaggtgctctctcttaacctacacaaaagtcagtttgtcttatatattgtttgtgttatatatatatgcttaaattaaaatatacttctgaacttagaaacttccaagtctatgtagctaatagcttgtttcgtccgcctttaattatgactattccttttcctttcattttcacaacttcgatttttaaaatagtcaataattaagggtcgttatcatgatctgattttttttatccagaattataattagaaaattagacccttcttatgccccacacaattgtgttctcactagtttttttttttttttttttgaataaactagttattaatactaagtttagaagaagagaaaaaaaatgattgattaataaatagttactcgaaaaaaacctattaattgtgacgtgccgacttcctagagtcaatgtccaatcattgtcaaaactcatttattttcagtaattaaatcactcattagcttaattaccataaataataaaaattggtcataatcacatgcttaattgtcatttcattatcaataatttagaatatccaaatccaatatcattgtgatttttatttccctaaagtagttaaaaatctatctttacatttcaaactctgtatttacctataggcatttttttttccatcacgtggttttagttgtaggactgaatagagcattagggtcgtgttaaaatctaagccgctgatttcatgattggttcctatcacagccgttcaacttgattgtgatgggagggatatttatgatgaggctaatcatcattggaaaagccaacgctatcagttcttttactataaggaaagctatttttgcaaaggcagcactcagaatatatataaataatataatatacacgaattcagcaatatatatttatataatacacatatgtaaatcaacggccaaaaagcaagagccttgtctccctaaccaacggttctaatttagccatgtcgccaattttttcttctccataaccaaaaaaaaagcccaaatctcatgcatacataccatgtcatgcacacaaaaattgccaacttcaatgtaacgactaaagcatgacatggatatcatggttattatatgatagacattaattaattaactctttgtacgcacacctgagtaattaaaaatccatgcccatgccatgatgatgatgatgatgatgatgaatgtcatggtttgatgtatcatgtatatattgtatgtatgggatggtgtgtgtggggttaagtcgaagggatggaagaggaaaaataatagtaatgattacaaatggggtcataaatggctcttaagaaaataaaaaagataaaaaaaaaaaaaaggtatttattttattttatttcgaaatagtttatgaaagaatcacaagactgcgcagccatagccgccattttttctctactctttactttttgctatgatcagtttgattttattttagtttgtttcattcatttatatttctttgtaatgttgttatttactagtactattatacaatccactagtcctattgctgtggagaaaaataaaaatatttattaaaaaaaaattagtaatagataaacgaaaaagaagagataaagacacaaaaggaaaattgaattaattagatcaaaggagagagaaagaaagcaaaaaataaaaaagtggggggattctagagagagaaggacacaaaaagaccccccaaaaaacaagtatttaaagccaccacaaggccactcgtaccactgcaatgatgaactactcaccacctaagaagcagaagaagaatcagcttaaaggccctctctcaccctaacctcaacttttttctttgattatatacatatatattcctatatatattttctttttctcgtctacccaatacagcaattgatcatttatgagctgggttcttt

SEQ ID NO: 56974 - DNA, 781 bp, Cannabis sativa
gagagagagagagagagaaataaacactgtaaacatttgaaaaataccaaaggattaccaatcttacctgtgatttggaatccaatcttgtaactcattgatcttgaagatcttatagtggaatcgagccaattttgaggcgagctcgaaagaggaagtacccatcaaaatttttggggaacctttataaaatctggtgcaatctctcctatttcttgcttttactgattgcttatatctatgtgtatagacctagggttctatttggtattctgggttgatagtagtcttcgagtttcttggtagaaactcaaagctctgctagggtttcgattggtttgtgtgtgtttgtgtaaatgacctaggtctagaaggtcttgagggttattgggtttgatcacaatgacattgcattttaggagagtcatctgtcgtatgactcattgaacagggaggcaactttgttttttgacttagggtgaaaagtcagtcttgtaatttttaaaatagtataaataagactctaagctcaattttcgataatttttttaatttaatcaacttcaaaataattcttgacacgaatagatacagaaaacgtatgttttgtcataatacatttacattaagttattattaaattttattttaaaaaaaaataatttaaaatactattttaaaaatataaaatttaatttatttttgaataaaataaaaaatttaattaataacttttggaaaaacaagttttaaaatagtatctacctttttcaaatcaagc

SEQ ID NO: 56975 - DNA, 2316 bp, Cannabis sativa
ccatccacaaaaaacaaggaactacgattagcatagaaaaagctacaactactaaaactttcaattaaatctaacactacacaagaaacattacaaaaattccaattaagaatacgcctacagttttccaaagtttgaatcaccactttggaatcaaagagaacatggacctcattctatttgttctaaattgcccaatacaaagccaacaacacagccttagattctgcttccaaagctgaggttgttgaagtctgttgcaacttatacatccacgagcaatcaaaaagattaatcatgaccacagccaccccccgcaacccctttagatcaggatgcatcaatcatcaaaaccactttagcttcctcccttatgggatcacgcacagtgtttcgattccacagataaaccaaaaccagcatttaccaagcaagataattcatgaaaagaaacattgaccttttgcgacaacttaaccaaatcagcagctccctttctaaacaccaaattgttgcaaatgttccaaatagttaaccagatggacgcgctcacctagtggaaaggagagacaagttttttacaaactctaacactgaagtctcaggaattctttcactaaagataagaaactcctcgcccaaccacaaagccttagccacactacaatctctgaacaaatgtaaacaagtctcaacatctgcaccacacaaaagacactccttgtccaaactgaaaggcaacttacttttgatggtaatagcttcgttgggtgaactttgccattccagagccacttccaaatgtttcttataggccgaatctcaaattttgatcaacacaatatgcgctctttacagaaaattttccattcaaattacccttccaaataggagggcaaactttgttatcacatttaagactctcaaaggagccataagattcgaattaactgagaaaattactttgaagtaagcactttgtcactagaccgctcactcaataataaattattttaaataactgactgttgtgaaatagtaagataatagtaatgtctctaaaacattattttttttacttaaataccatacttaacatgatttttttcatgtgttttggtatcaacaattaagtttgacttttgacgtgttaataacggtgttaccatattgttacttcaatatcataacacactatcatcaattgttattttaactagtatttgttttctccgtaacaagaagaggagagggctactaagtgtggctcttctatctaggctaaaccacgagagctccaaccccgctcacaaatgttcgtcaagaccctctgagacgggttgcccccacctacaatgaggtgcgtcacatgagccacaatcaagcactaggtgcatgagtgctcctgagatggatgccaagaaaggttaggaggacaaactcttttttaaagaacccaagttcattagaaagatcgatgggaatcacagggggatttacctccccttaaaaagtaccagaaacattgctagaagtcctagcactttttgctaaaccatccacaaaagataaagaactacgattaacatagaaaaagctacagctactagaactttcaattaaatctaacactacaagagaaacatttaaaaaattccaattaagagtacgcctacgattttcaaagcttgaatcgccactgtaaaatcaaagagaacatggacctcattccatttgttctgaattgcccaatacaaagccagcaacacagccttagatttcgtttccaaaattgaggttgttgaagtctgctgcaatttatacatccacgagccatcaaaaagattaattgtgaccacaaccacccccgcaacccatttagactaggatgcatcagtcatcaacatcactttagcttcctcccttctaggatcacacacagtgttccgattccacagacaaaccaaaaccagcatctaccaaaccagataatgcatgaaaagaaacatggaccttttgcgacaacttaaccaaatcagcaactccccctctaaacaccaaactgttgcgaatgttccaaattttagaatacaagcaacccatgaagttaactagctagacaagctcacctagtggaaaggagagacaaggttttttacaaactcttaacactgaagtcccaggaattctttcattaaagataagaaactcctcgagcaaccacaaagccttagccatactacaatctctgaacacatgtaaacaagtctcaacatctacaccacacaaaagacattcattgtccaaactgaaagg

SEQ ID NO: 56976 - DNA, 1021 bp, Cannabis sativa
agaagtccccaatcggttgtcccatgttatcacgaagttagcgagctctaatttgccaatttggtctacaatctagtgccttcacaaacatcccataaggcttttcgattgtctccaacggtgcttcaaacaatctttgatagaatttttcagagtggctagtaatgccacatataaagcaaaggttggtaccctttcatacttaaagttttcccagaaccattcatccttgttcttataaattctcattcttcttttaagaggcttgtcaatattaatcaacactcggacctgatattaatccctctaaattccattgaaatttttgggacaagaggacacatacttgctaacataagcacctgctattttcagtactctatttgatcgaaattcaacctgtaaatcgtacacctgaactcaaatctccatcgtgtttaatggtaaggtcctgggattttctccttcttgtagcctttgtataatgaaaggtgtattctattaaatgtccacggtgtcccctccaacaccctgttaatgtcgacctcgtgtaaaagttggaatagatacctgttggtttctaactccttagcatacatacccttgcctggcctcaaaagtgtcacattctttaggaatcataatcagcaggccaatttgtcaataatctacccaccaaacaccagcgtgaatcaaactcgtctcccaactcttccgatctgagtgaggaagtgttagtagttcattgtagtgtacattgttcgtgtttagacattgctctggttttcacagtcgtgggtctcaatggttgtttctacaagtaagtttctccggttcttcttttcatgttttttgttcttcactatgggtaatcaaaaatcaaatctttttttaaggaaatgtggtgtagtctatttttgtatactccattaatacaagtacagttggattaagttggtttttctctcagtttttgacagctctatctctggcagttagcatttctctctctctctctctc

SEQ ID NO: 56977 - DNA, 1049 bp, Cannabis sativa
catcttcaaagattttcgatggtacgtaatatatttatataataattaatattatgatttcttaattatatttaattaatcatagtttggattattaattaactaatattagtatatatatagtaatggagtggtagatgaaggtgatactgcttttactgcacctcgacgtagtgggcgatgtattaagggaccaagaagcacatttggtgagagaggctctatctatcgtggagttagtaggtataataatatatatatatatatacatatacatctcattttttttttattttattttatatattggaaattttttttggtgaagccctcagatttgatcttaatgtatgagtattttttatttttggtatatagagaatttataaacatatgatggtgttatagttatactaggcatctagcctcttttttttttttggaaattttgaataattttttgtgcagaaaatataatcaaaaaatattcaattgtccgggtgcatattttattttacaggcatattttgaattttatttttcgacactacaaagtattcagaattttgtaaggaccgacataatgcctattattattacctctaattaatatattagattatatgaagaattgagatttaatttcataatgaacaaaaaataagaaatgcttctacaatggtagaagtgaaagtgaaaagtttgttatatatagaccacatgaagaatatatgatgatatatattatatacttaccatgaaatgtataaaatatacaactaaatatgtaatgccctacaaaccacaactatttaatttgactagctagagagaggacccaaaatttatcaagagggtataataaaataaactttatgaaatcgctaatgaattatcagattcaccaattacaaatagcttaattaataatcatttgtaaggggactcaatagtgaaataatgacacaagaaaatacaaaatgtgagatttattaaagaatatcagctacttcactcatcatcaatgatttttcgatagaattacatat

SEQ ID NO: 56978 - DNA, 1137 bp, Cannabis sativa
  modified_base (969)..(984): a, c, t, g, unknown or other
tgtatattatagtaacgaactactaaaaaataaacaatactcacgcaaaatatagatgtaaaaaaaaaaaaaaaaagacaattgatctatagaaaactcataatataatttcaaaataagtgttatcatcgtatcttagttgtagtcaccactatttttaaagttgatattaatatcgtatattgttaacatcgcttctagccaacgacaatgagtgaaataataaagcgattgaataaaattaaaagagaacaaaaacaataaagtaaaatagataccaaattttaaagaggttcggccccgttagtgtggtaatagcctacccccttttattgtattgacttaagagaaggaacaaagtattcttcctcttgaagctcttacaactgatctttgagtgtgtttctctcttagatcactatttttttctagagtatatttctacagcaattctctcaatccttctcatagtaaggctaagtcactatttatagggacttaatgcattaaggatggctttccttttgcttacaatgcaaaaaataggaaattacaatgattctataattataatatatgaaatagaaaactagagcaagttgccatatttctctgactcaatcacacgattgtagggattgtcttcacgtttagacataacgagattattctgaagtttctatctcttgtaagttgcttggcacaataggcttctacctggtcgggtatcttttccacaactctgctcgtgtaatcgacaattatagatgctgacgaatcatgtgcaggctgctagggataccttatgttatcccaatttttgcactgtggcgtggcatcactcgatagtgacatgtggaatcgactgcgcgtatttgcttgcaagacacaggccgaaccagacacctcacacacttgcttagacgaggcagtgagaaacccgcgcagaacgacaaacacttagcgaannnnnnnnnnnnnnnntgagtcatcaaggaaatccctataactttgggatcggattacaaagatatagcaagctgtacaaatcccacgattgttgcattacgtatttattatgaaatctttctgcttatagcaattgtaaccaaaagggaaatacttccctcccaagct

SEQ ID NO: 56979 - DNA, 935 bp, Cannabis sativa
aaagattgtaaatgcatatcctgtaatcgaccttctggtgtcgatactcccagcataatccgagtcaacataccctgcaatttcagtttcaaagcttgcattgtctctgtataccaaaccaactctggctgttcctttgaggtatcttagaatccacttcacagcatcccaatgcaccttccctggatctgagataaacctgctcaccatgctcaatgcatatgccaagtctggtctagtacagaccatacaatacattaggcttctaacacaggaagcataaggtactgagtccatgtataatctgtcttcttcattgtctggtgcttgattctgagtaagtttgaagtgtgaggcaagaggagtagtgactgtcttggcctcactcatgcaaaacttgttaattattttctgaatgtaaccttcttgagacaagaaaacagagccaggtctttgtctcttgatatctatcccgagtatccttttagcttcaccaaggttcttcatttcgaattcagagcttagttgttctttcagcatgtctatagcctttctgtcctttccaattatcaagatgtcatccacataaagtaataaccagataggtgtcttgttgtagtaaacacaagggtcatactcacttcttgagtatccaatttgcaacatgaattcatggaatcttaggttccattgcctcggtgcccgtttcaggccatatagagatttctgaagtaaacacacttgatcaaccaccttgttcttaaatccctcaggttcttccatgtagattttctcttctagatttccatgtaaaaatgctgtctttacatccatttgatccatttcaagatcaaacatagccacctttgccatcatgattctaatagaagtttgttttaccactggagagaagatatcattatagtcaatacctt

SEQ ID NO: 56980 - DNA, 1691 bp, Cannabis sativa
  modified_base (33)..(39): a, c, t, g, unknown or other
taattactaaccaacacatggagggctaatcannnnnnntgattatatcaatggacactgtagttaaatcagtaaatataattttataattactaagagtgtaaatatttatagtggagtaatcatagaattaataaacaagggattatttggttgatgtgactaaataaataatctagtttattggagcttggaattataggtccatgtttcccaaatcatcaccttgaaacactgtcaagggtagggataaagagttgtataatgatgttcgaaaagaaaatctattttgaattagctaaatagtaattatttattttttgtaataaataaataaaattttcaaattaattaaataggaaaaagataaaaattgttaagataaaatttatcgagacaagatttgttaggacaaaagttttcaggacaaaagacaccaaccttgtcctaaatagacaaggtaggcacctaagttgttgtccctatccctatggattttatctttttgggttaattaattatttaattaattcaattaggtaaatatctaatttgaaaagtggttatagatatttcaaggttgttgagatattctcttaagtggttgagagattccctcatatatacgagttcagttatagatatttatttattcaaataattaaatatgatttaattgaagagatttaactactataaataggagcttgatttgagaaattagaacactcttcctgaattaatatttttgaaatatacagagagaaaaagaaaattatttttttttctctcaattgttcttgctcatgtgttgagaattcaacaagaataaaggttatacactttatcctaatagcctacattattctttgtgtgtggtggatcaatttgaaagacactggtttgagtccaaattgcatattcctcatcaattggattaagaaatacaacttacgagaagtttcaagaatacactgataggcttcaagaggtatactctaaacttattattttcatgttttaatttaatgtacacacatatggagatcctaggggctatggtacgatgataatcagataatatgaaacttttccaatgcgtacttgatttagtatcataaaaccaacaacattagactttggatgatatgcttggggagaaacattcggtagcttgtagaggatgtaatatggtggaggtgacattaagggaaaataaggatccattggcggttcataatataatagctttgatgaactcaaatcagcaactacaagtgattcaccctctaaggacactttttttttctccatttttcttatgacaatccacaaccttgactgtgatttgatcttcaataacttcttcaccgaggatgggtgttgcttgagtcaccaaattaaaatcatcacttgtttaaatgtacccaaatttttagttaaaaccacttcaaaggggtcttgctctttaattataggctcaatctcttctatgtgttcaactaatggtgcttccacattattcaaaataattctcataactttcattatttgagttattatccttaggacactccgaattatacacccttaaattatcacacagagatcttaccatgcccgccaagtgagtaatttcttctgcaagtgatagtgtattctcctcttcttgagatggtttagtgaatttg

SEQ ID NO: 56981 - DNA, 2047 bp, Cannabis sativa
taaatgatgtagaaaatatgtatatataagtgtgatatatgtaaacatggataggtaaaatagatgaagtaagattttgaagtggtaaaattgagaagttttacctctaatacgatccacaagtgagtgacctaatccatttacatattagaaaagggaagaaagcccacgagcccaacttttcacaatttgtaaagaccaacttttcacaatttttttgtaaagaccaacttttcacaattgctcactaataaaaaggcaactttacacacatgtggcaacatactccttatttaaaagaaaggaaaaaaataaaagtggaattgtttctctgttttttcttttttttttttccatacaaatactttttattttgaaaataattcaatgttatcaaattttctaactctttaatgtatttattttcttagtttaaacatgtttagtaggggtgttggcaaattaggtttaaaaaagaattatatataaaccctcaataaaaaataataatttaaaaatttaagaaaatataatctacaacaaaatttaatatttctttatacatataattttttttcttcttgctttaaattttttattttttgttttatttattttaatttattgttagaaatataaaataacaataatttattttatttcgttgttagttaaaaaaatatattttctaataaatatcaaataaattaatttgagtttatatgcgaattgaattagatctaaaatatgaaatctacagcagatcgaatgactataagtaaaataatcattggaaaaagattggcccaacgtgaatttttattattctatctttctttctcttctttctctgtttttctttttttttttcattttgaaactttaatacagtatgtttgtaaactcggtacaataaaaatataaaaatctgcgtgtaccagtatttttgtaaactttttctgattttctaatatttttgtaagttctctttatataatatatcatgtgaaatgggccagtgggcaggctctgaatgaaggagcatggtttggacaaagtcactgctattgaggttgatagtttcaccctaataatttctagctctgtttttcgatatgagtcattatagtattttaacacaaacgtgtgaactttgggcttttgattgaaaatagcagcccagtatctatagttgtaatcttccatttgtttcaagattgggcttttgttgtggactaggccgatggaaattaaagttagcttaatacatcttgtttgctgttttggttgttaacttcatgctcttccatctatcaattcaagataaataaataatcacaagaagaaaatattatagttaaattctcatgatgcatatcaactctaaggtgtatatatattgtttaataaggctctttttctcgtttgctttagtccattttcatcttcatatgtacttttttttccttctatcttttagtcctgtttcatttttaactattgtttgttttatcgaatcaatggcagaattcttccatatacaatttcagcaaagtgatagtgacttattaggggtctcttcaaaggaccactaaattaagcttctaatatttaaagatttccaagaaacttaaaattctgatgcaagttagataggggtacgagagatagcctcccgaccactaattaggtgtttagtcttggaggagtacgatttctttcgattctaagaaatgaaattttgttctacactctcttgataccaagtttatagttaactctagtaaaaattaaccaaagagaccaaatggctacgaatctcatgttggtatatgttcgaatttagtaatgttggattaaatctccacacatactgtcaagatcaacataatatagttacaacaaaattaaaacaagaaaaagaaactttacatcagaaagtggcctttagacttaactctcaagcaaaaccaaagttagttgcgaagtttgttaaactgttgcaactagctttcatgcttgctttgttgtgttttatgccctaaat

SEQ ID NO: 56982 - DNA, 837 bp, Cannabis sativa
ttggtagtacaattgaatgggagcataatcatagatatggacatctatagcttctatgtttgtctataagtaaaacgatagtttgcttagagcttagcaaaacgtgatagatagaagagatatttttcaatgattatattagtttactaaaatatcattgataagaagctaagtgttttaaggataaaagatattgaaggtataaatagtaactatttccctactcgacgtaaaccgtgtatagatgattattgattattgattattgaaataatggataatttatagcgcatctgtatctgatatataaagaattctatgtaatcaagagtaagattctgaatctataatggagtcaagaaaaattaataagttatggaattcactcagtaaatttcagatctacttattgggagcttgattttataggctcatggtccccacattatttaatttagtatcatcatgtagattaaactaattaatttatttaatcaaatgaaactcaaaaattgataatttcatatttgaaaatttttactaagtttgggttatttagagaagaaaagagaaataagagtttatttattaattaagacactctgtgtgtctaactaatatttttatttaataattatttataataataattaataaatttataaatgatcttttaaataattagatttaaaaagtggtaaagttggaaaaagataatttatttcacttaagcataaatgaaacaaaagttggcaaaaatttaaatcatgagctttctttgtgatttcggccatacgaatagggaaatttaattttctatacttacatatacctaat

SEQ ID NO: 56983 - DNA, 2003 bp, Cannabis sativa
  modified_base (1240)..(1245): a, c, t, g, unknown or other
cttattgatttcttaagttctaagaaaagtttcatgcatgttttcgggatttaaggttgttgtagatgttgttttgtattatttttttgaaatgttattgatgatgtttgagcagaattagagttaactgttggtttggttgtttagacagggtttgagctttaaaggtcaactttggtctttaatggtgatttgtgtatctgtgggtatttattggttttattgcatggactttgtttattgtgaggtaattagcaagtctggaaggtttggtaacatttgagattaaattgaattgtttagagtgagtttggtgtttcctgcactgaaccgaaattccagttcagggggacctataggaactggaattccggttgaacccaagaaagcccacaaaattggaatttcaattggggaacaggtctatcggttggggcattttagggaaccctagtttttcctctttttgcaatatttagggtattgccatgttatccatcaattgagaaacttttagtttcaagtttaagtccccataaagtgatttagcgtgtcactcatcagttttacgaataatgtgatttagggacctgtaaatcgtcgagcaggtgttccactcaggttggccgacacacctgaatttagaaacaagataagattagtataatgatatgcacatgtgtttacatgtttagcgtacatgttagttaagtctgttagattatattataatagcggtatcaatatatttagtagtatattggatatcgataaatgtttgttggcttaagtactactcgacaatatcacatcggtacgactagagtacgactagcatatcgagtatagcctgatattatggtggatagtactgtactacttgacagtatcacatcactatgactagagtatgactagcgtaccgagtataggttgatattatggtcagtagtattgtcgtacgaacattcttgactcattactgtgtcagacacggggatagggttatggttcggtgtatgggcgcctgattagaattcgggttatagttatgttattgattatgcttttcttattgagtctgtcgactcacagatattgtttgcatgtgttggtaagggcaaggctaaggttgagcagccgtgagattgagggaatgaagattgtacatgtcggggcagttaggcctagagcgtacgatctttgggacagctggacatattttgtatagtcgctaggnnnnnncttttgtactatgcactgtgaaacttttgtaaatattttgtaaacgggatcccagagttatataagtatgttactttgatatttataaataattaaataaagttttaattattcacaattttcaataaactcgttgattagcaatgagctgcacaattgagttaaaaatcatgttaacacgcctaaaccagtagggtgttacacactctaaatgaaagcaccaaaccattgtcgttagatttggccaaccgacaacgaagttgtatttaatactaatgcttgtcacgtgttacacaataagaataatgaagtgaaatagacaccaaattttatagaggttctgccccctgagtgagcgggtaacactactacataaaggtttattagtgtcatttttcaaatgacatatataataattgcgtcagtttgtgtaactgacgtatatacatgggatgcaaatagttactctattatgtcagtttgtaactgttgcccctgaatttgcccaatgtacgtggaccaaccagacaagaacacgtggacacaaagggtttagcacttaaagtaatagctaagtctttctgaagaaaggcattatcttggatatgcctcccgaagaaggcatgcaaggttttatatgctcccggagatcaagacagcatcaaagcatctctgggcggtgtcaggcttcctctaagcagtcatctcgcatttaataccgcatgggaggaggcgtgttggaactgccacacgcaata

SEQ ID NO: 56984 - DNA, 1095 bp, Cannabis sativa
catatatattatatattaatatatttatacaaggtcaatactcaacagagtatccaaatttgtttacaattcttttttatttaatttattaatttaattatactcatggatcaggatgatgctgtttactcggaatttattttactgtccatattgcggatcttcatcattataatattaaactacattaattatatttacatgtgtaagagaaagagactttttttttaaaagaaaaaaaaaaaagacttcttttttttcctcaatctaacgtcattaataatggtggtgtggttctggtacaaactctgagaaaagccattaatgaagatttgggttcttattatttcagcaaaccaagaactgggttcttcttcttagacatctcagtctttgtcaaactaaactttgtcttattaaaaggtacttgaaaatcatcaagctttgtcttttttctctacattttctaagttaatgtaatcatgatgagactgtttcttgtttcttgtttcttgttgttttaggaaggtgatggaggagatatggagtatgttttgtgctgaatctgattgcatatcttgcggtggttcttcattcgagtttttgactcatccttcttcttgtactagccacgctttgattatcttcttcaatgttgttcttttgtttatgttcttgatcaccatggttaaaaagtcttcctcatcaagaacacatgatggtgttatgtcaactctgcagatagtgtcagctgttgtaaatggttgtctggggttgtcgtttttgttctttggtttttggattctacaagagaagctcagaaaaaaccatactgctctgcctttgaatctatggtttcaagctttatttcaaggctttattcttttgcttattggcttaacagtaagtatcaaggtgaaacaactgcctagaacaccagttagattgttgaccattcttgcaaccttgtttgctggttttacatgtgttctttctctgttcgccgcggttttgaacaaacaagtgactattaagatagctttagatgttctttctctacctggagctgttcttttactcttgtgtgcttataag

SEQ ID NO: 56985 - DNA, 747 bp, Cannabis sativa
tgtgatgcttgcaaacttggtaaaacacataaagttcatcaccctttatcctcctcaagggcctctatgcccttagaattggttcacacggatgtgtgggggccatctcatgaaccatccaaagaaggctttcgctattatattcactttgttgatgactttagtcggtttacttggatatttccaatgactcttaagtctcaagccttccccatctttcttcaatttaaaaaactagttgaaaagcaatttagtactcccattaaaaaagttcagtcggattgggggggtgagtatcgcacatttgcatcatttctagctacacatggcatacactttcagcattcatgtcctcatgaccatgagcaaaatgggagagccgaacgcaaacatcgccacattaatgaaacagggatgactcttcttgcacaatctggtttacaactatcctattggtggcatgcctttcaacatgcaacatatgttatcaatcggctgccttcactagttcttggcaatgactctccttaccactgtttgtttcataaagaaccggattatggctttcttaaaccatttgggtgtgcttgcttcccactactcagaccatatcagtctcacaaaatgtctatgaagtctgcaaaatgtatttttattggttactcaatacaacataaagggtacttgtgtgagagctcaactggcagagtttatattactcgaaatgttcaattcaatgaggctgag

SEQ ID NO: 56986 - DNA, 693 bp, Cannabis sativa
ataacagagtctgtactgatgaaattgtagaatcccaatccaaacggggtcgcagagtgtagtatttctagattctaaaaacaaaatttttcatcaagatattaaaagaagtgttcaaatgtatgttctagtagtttaaagctctcagtatatttctctaattgtcattaatgtatgtattaactttatattatttttgtgtagtgctcttgagaggttctacttttattaaagaaactgacggtcagtagcagtaagcttcactgagtacacatgtccggagcaaccagatggcatccagtgtgggttttatagtatgagatttgttaaatctttcatgactaaaaataatcctacacgaaattttgaatcagaggtaaagacactaattattttcacaaatactaaagtttttaaatacttttattatgacctattaaattaatgatttgtctcatttattgcagtttaaaaggaacatatcatcctcttacactaacaaaaaaatcaataaaatacgtgacgaatgaaaaaactatgtcatgaagatgttggcagcaggaaaataactaataatgcagagtatgatgaccaatgatagaattgctcatggatgattcccatgtgatccaagaagacgattgataggttgacatcgatctcagttactattatcttatttttttttttaat

SEQ ID NO: 56987 - DNA, 901 bp, Cannabis sativa
gtttgaatttttcctaaacagcgctgtgtggtgcgatttgcagtttttaattgttaatatgcagttcaaaccgcatcgcacattataaaactaccaatttttatatttatttaggtccaatatgtgaatgttcaactcaaagcccactaattattgtattgtaagccttatggtatttttgacaagtgttgctcaagctttattatatttgtgatagtttaattatttgatgatagtccaaaccggagaaacctcaaaaactgcaccgcaccattttttgcggtttttagtttcgcggtgcggatgtggtttgggaattttgaaaaactataagtgcaggttagtttaaaaaaaatggtcaatacaacactacccgcaccacgaacatccctaaataacacaatgtttcgatgaagcaatgtattgtattaattattaagaccaaaatttttaatacaatgtaagttctattatttaatacataaaaaatagtctgtattagcttgtgttatttttacaaaggatttggggtcaaccctaatctctgacccgaactcgaacccgggacctgaccttgacctgggacccagactcaaacccggactcggaccccgtacctcagacctaaacctggacccgggaccaggacccagacctggactcggacccggacccagacccagacccaaactcggactcggacccagacccagacccagactcagactcggacccggacccaggactcaggaccaagacttggacccgacccaacccgtagtaaattttggggtcgagtgtaattaaaatatactataactttacacaatctattaagacaagccaataccaaatatagtattgtattaaataatactaatattatacaatacaattcaac

SEQ ID NO: 56988 - DNA, 1577 bp, Cannabis sativa
aatctagatcctgataaaatatatccaacagattttcacctcatggttgatctccttcctttgcatttacttacctacaccacataggacccatgagtcacaaggactcaataagaaaagtaatatcaacaatcatataatgtattatttgaatattatcatttatactcagacaatcagaatcaaacgatcacgcattactcataagatgattggtaatacaaaacccttatgccaataatagaaatcatattcatttaataatataaattatatgtatgttacctcataaagtaaccatctttattaaatcacactgcctaatcaggcaagtcgatgctttaatctgataatcctgtattatattgcctaatcaggcaagcccatgccatagcttggcacccatatatcgcacaattgcatcaccaaactaggtgagctcgtaccataatttaacatcatacataatatcattgtgtcacctaatcaggtgagcccgtgccataatctggcaccaatatatcacatcacctaattagacgagcctgtaccatagtctggtactcacatgtcactgcccccatacctaataaggtacgctgccaagaagaaacccaacaacgagtttactgtatgccatgacccgatattcacatatcactaccgaccgtacctaataaggtacgccgctgagaaaaaacccaacaacagtttcaatctattccatagcctagcattctcatatcactggtgcccgtacctaataaggtatcgttgacaagtatatcgcatcacctaataaggtgagcccgtatatcacattcatggtatatcatcacattatcattgcctaatcaggcaatcttttcattacataacaataaaaactgtatcttaatcccaatattaataaattctcaacaataataattgtattgcaatataacatgctatgcaatacaatatacttttcttacctttaatctagattcatgcacgtcggccaactcaaatggagaaacctgcccgataagtcggccctatgtcacaataatggtaaaccaataagtatttatctcaaaacactgcttaatattcccgtcaccatctagggtttttctaccaaaccctgcgacataaatacactaaaataatacttatattttagctctaaaacgtacactataatgtagatctcgtcgaaagcttcaaaatggtatatagaacacccaaaacagacacccaagtgaaaaattatgacaaaaatacaatttctgatctcctaggaatttctaaaaatagtctggcacaaaaattccaaattttgtactcaccgaaacaccccataaacctattcaaatcattacaaacttcacgcggcacatatacactacaaatataacaatccttacgtaacataaattaaaatcaagcccttgaatgaaaaataccattaatgttcgaacttaagatttaaaaaatttcaaactcaatttctaactcaaaatcacctcaaatttcgaaactagtcccatagctaccaaagaacaattttacgaagtcagaatctccataac

SEQ ID NO: 56989 - DNA, 1623 bp, Cannabis sativa
accttcatcctccaatctagccttttctaaaaagtgtggaaaactctgtggcatcttcatgtccctcccaaaataaagcatttcatatggtgtgcttatcatcatatcctccctacttcttcaaatctgttccataggaaaattatcccctcgcctaactgttctttttgctctcatgattttgacattgtcacacatgctttcctaggatgttttagagtaaggaaaatatggaggaaaaccaatctatctaacttctataatactcatcaattttaggatattaaagacttcattcttacaggttttgatggcttcacaaaagatcagatgtgtttatgtttcactattttgtgggttatctggaacaggcacaacttgtcactgtttcaatctaagaactttccagcaaaagaagtagaaagttatgtgattgatttcttgcaggaatactcaaaatgtcagcaacattctgcaatttcatgccctgcccccccttcatcagatcagcagacttcttcaccaccattaggcagttatactctttacactgatgcaaccctttctatgtcgaattcaaaaatgggatttggggctgttgtttaggattggaagggtcagactacatctgctatatgttcttcaaaaataggtgctctttctccatttctagctgaggctcatgctcttcttcaagctcttcaatggtgcaatgctgttaaacttcctttgcattccattcactcaaatttcttggctttagtaaataaaataaacaatcactggaaggatagatcttcattatcagacctgattgggaaaatcattgaatctttatcttcttttcctagtgctaagatttgttacattcaaagagaaaacaatgtaattgtacacactcttgctaaaaaggctctaggaacggatagagatttagtttggaattgtaatagtttcaattcctccttcatctgattttgtaacctaacttttcttcattaatgttacaaatcagtttcttcaaaaaaaaaataattaatgtatataaaaactaattatgaaacaacaaaattataagtaattaagaaaaattatcaaatgtataaaaaaatataaaattaatttttagatatctattaaatttaagcacttaattgagcaaaatttaagtattcaatcacttatataaaataaaagaaaaacactactactttttggacaaattgaagtgatcaataaagaaatgatttacttataagcctaacataatttgtaaatatgtgagatttttacttaaacaaattactaagaaaacatattattctatgtatacaaaattataaaaaagaaaaaacacaaactcactaaaagtctaataaaaatatatagtagaaagatagagagtttaagaatgatggacagtgatgaatagaaatgatagtaactctctttatatttgtttggtattgagatatgtataaaattgaaatatcaaattattatgttactaattataaaatgtatctttattttggatatatgtaaattgattgatatattttttttaattttatctctcatcttctcacttttattaagttatatttatttagttaataatat

SEQ ID NO: 56990 - DNA, 2287 bp, Cannabis sativa
gacgagctttgaatcgatctacagtctcaaattggtcatatttaacctacagcctcaaattggtcatatttaaccttatatacccatttacaacctatggctttttgcccagatggtaatttggcgattatccatgtgtgatttttttctaatatgattgtgtgtcggtatccatggctttaagccaatgagtgaactgagaggcttcagcatagtttttgggctcaacttcagaataggctgctaatattgcagccctaaactgaggactaagcttgatgtaagagatgaagggctcaattgggtgagccgtggaagtggtatgacaaacatagtcttggagatgagatggtttttttgtgatcctgccagattttatggagggttgattagggagatccgaacatggagctgaagttatgggattaaaaggtatgcattggataagtatgaccatgtgggaaacacaagtcaatattagagtttagtttttgtgataggaaggggaatatgttttcatggaaaacaacatccctagaaatataaatttggttcatttctatatacaacaaggtgtaggctttcattacatggggatatccaatgaatatagatgcatggcatcgaggggtaaacttgtgtattttttaggcgaaagtggagccataagcaaggcagccgaatgtccttaaatggtcatatgatggaggcttgttgtgaagaatttcataggatgtaagcccccttagcaaaacagatggggttctgtttatcaagtatgaggcagtttgtattatgtaagaccagtaggatagcggtatattagattaaaagcaaagtgcacgagccgcatttagaatgtgttggtgctttctttcttctaccgagttttgttgtggtctttccacacaagaatggtaatgttagatgcctttagaggccaaaaaaagaactcatattaagttctttggcattatctgaacgaacaacacagtttgagcttcaaattttgttcttagcataagtgtagtgtatatcttgatttatcatcaacaattgttaaaagataattgtagccttcaacactaattatgtgaaaagggccccatatatctatgtgaagtaaatcgaaagtgtgttgtgcaaagttattgttagaggagaatgtgagtcttttttgctttgctaattggcatatagagcaatgatatttagattgaaatgtaaatgaagagtcaatctttttattgaatatgtttgaaccatacaatgagggatgaccaaggcgattatgccattattatgaaaaataaaaggggaagattgacaaacatgagccatagcagcaattttttggtgcagcagatataacttgccacattgtttagctatcccaatcacccgattcagataaggctcctggatgatacacatatcaggtttgaaagaaaaaagattagtggtgtaattaacataggcagtaacagaaaagagattgatcttgaaattagaaacatataggacattatggagaaagatttctggtgttaattgaacatttccaatggcatggacaaggatattagtattattaggtaaagtaacatgtctaggaaatggaattttaaagaaagaagtaaaatgacctatattggagaacatgtggtgagtagcaccactatcaataatccaagatttagagagtagtataagtgttaccagccatattagaagcaacagcagggatgtgagggtctgtggggggtgcattctgattgagttgttggctaagaagtgatatcagttgctgacattgagttgacagatcaacttgaatttgagtagccgaggtgtctgtagaagtaagattgtcagaagcttgatgagcagaggttttgcctttgtcgtttttttcttatccccataaccaggaggaaagccatgaatgaagaagcacttgtcaactaagtgacctggtttgccacagttggagcatgatagtcttggtttcttggttcttggaggattggtggatgaagatgggcgaaccaaggaagcaagggatggaatatccgagttgccaagggtcctttgacgctcttcttgaacaatcatatagaagactctagacaggtttgggataggctcattaagaaggatttgagcacgagcggatgcttaagattcgttcaaaccagtcaagaattggagaacttgactctgattgtgatagtcaagaaatactttcattgcaccacaagtgcatggtgtattaggttgaaactct

SEQ ID NO: 56991 - DNA, 808 bp, Cannabis sativa
tttttaattgtatcacttttaaataatatagaaaaaaaaactaacataaaatttaatatacgtgtctcgcacgtactttttgctagtatatatatattgaaacgaaaactagactttcatcctaaatgaacatgaacgtgtgtcaaaatcacacctatcaatgataatcagataaagatctttcaataaaaattagatagaaacaccccatttattattaaaaatatttacaataatattatgttattatttattttttttatgaataagagagatgttgtattactaaactttatgaatttgtaaaactatgtagcaccaatagaaacggtcggccaattaactaattagatttaccttaaagtttattaaacaatgaaaaaagcataactcaataaaacataaaaaataaatctgtctcaaagtttaaaaaaaaattaaaaataaaaaagataactcaaatataatattttagtctcataacttttaagtctgcgaacatattagaaagtaaataaagatgaaactaagaatcaaaaataaaatatcttcacacttataatctacaaggatcaacagttcactatcgtcattagatcttcatgatttaagcagatgatatataattttaattatggatgataatcaaaataattttaattatcaattatatatataatatatatacaccttaaaaataataaagaaattatatatatctatatcggggtcagatatgatatagatagtattatcccgctcccgctcccactcccacctctttcccgtttcgagtattaaaattatc

SEQ ID NO: 56992 - DNA, 641 bp, Cannabis sativa
atggaattaataaacaagattatttagttgatgagatttaacaaatgttatagttattggagcttagaattataggtccatggtcctcggattgccaccttgaaacactgtcaagggtatggataaaagttgtatattgatgtttggaaaaatctatatttatttttcaaaatagtatttatttattttgtaataaatattttattttcaaatttattaataaaaaaattgaaaaaaaaagttttttggacaaaaataccaccactatctagctaggatagaggtggtgccactatcactgtgttatgacacagctataggtgcctatggatagggtttgtccctactagattttcttttagattaattaattaattcaaaagataatatatttgaagattaatttgaaaaatagttagaaatatttctagtttttgagatattatattctctcaacttgttgacagattccctcaatcggttttaagaaagaaatatctataacatattcggtcataaatctttattcaaataatttaatattattattttataacttttgattcatggcttgatattttttcaatttctatctgacaagcataacataatgatactacctgaaaaaaacaataacataa

SEQ ID NO: 56993 - DNA, 1090 bp, Cannabis sativa
aaatataatcaacaaaataaagttacttgtaaaatatattctaattccgttcatatatatcttatgaattagattaaagttttacccattaaactaattgtataatttacatcagtagtttaattatttaataaaatatatagataaaataaatttatatattaaaagataacttttttttttcaatagaaaaaagaaactgatatttaatatttttatatatagtgaagcttaatatcatggctatatatattaaatatatatgcctctttatggtgtaggtgcagtcacgtccatacagcaaagatattataatttataatataagtagcaatattatatatatacacacaaaatatcatatataaatatcataattaatgtggcaaaacttatcacagaaaacaaaagtttgattgatcctctggtacaatagtttttataattttttgggaacacattttatcaatttctcaattatcatataattaaactcaaagatatttcaattgaattattgaaccgattatataaatatcatatacctatagaaaattattagtaagagcttgcaaagctttataagaattcgttcatctcaagtccagacttgcttgcaaagctttagatcatatgagattggtgacttttgaggcctgccaatgaatttggcaaccaacaatatcaattaagctccaatcgtgtgacttctttatagaaactagaggggaaaaaaaataaaatctcaattacaaactaaatttcaacaaataaaaagttcttgaataaatttcaaatcaaagaataaaatagaataaattaggtaagtgattaaataatgaattgattgaattgaggaatgaaaagtaaaattgaaatagaaaaaactatgaattaatctattctttttatactttttttttttttgacaatctattctttttatactttttaataagctttaaaatttattttcttatttctcctttttagcagccatgatttctggtgtttcagcagttagtgaaactctttcttgcctcttgttccttctgtttctcctacaagtcttctcgatttcaggatcaac

SEQ ID NO: 56994 - DNA, 1150 bp, Cannabis sativa
ttgctgagctgaccacggaactgcatgacacgccatcaaccgagtagctcgaggctgacattgcttctttgtctcgggacgttactagaattcaagatgaaagagagggtctccagactcttcttcgcaggttggaggattagaagaaagccatgtaggaggaactcaaggctgaggttaagtaccagaagttgaaggtggcaaggctcggggagaaggtgaatgccttagagacaactggtgtcgagatattttatgacttttggaaggccaatcccaaggaaaactttaataattcgggcgcttccaaagatatgtttctcgactactacgctactcaggcggcctacgaggaacccgaggcaaccacttcaacctctcctactaatcagaatgttgaggctccctttgcccaaaatgatgatcctccaactccttcaaatctagctgactcgtacgaggagcctgggactccggctgtttaattgctttccttttactatcttttttaatgtctgttagtccaatatgcattcttttaagacaaggtgacctgccaagcagtctttaaacttggaatattatttttcattttttgaacaactggctgactgggcagcctttaatccaaggttttaatgcttttgttatccaatgaatttcatcccttgtttataatcattgtgcaattatgttcgttttgtttttgttttttaccaaatgctttgtacaagtataggtgccccccaagtcaccgagcagacttgtgactcttggtcacttgtttttgcacaggtatgcttttttgtttgttcagggttttgggtacaaccagaccttttgtacgcactggatggtaaatttttaacatgctaatgaactcgactcaatttgaatttaaataaacatcttcatttatttattagtcagaaatatgtctgttaccgttgtaacttacatcaaagttattatattaatctgatctgatctttagcttagcataaacaaaacaaattgcagaaaataaaaattgtactttcaaaggtggtcatccgaccgaagtactttataattttatccaaacctttgggtttggtccgcccagaaggctattcacttaagagcaaatgttcttttattttgtacttga

SEQ ID NO: 56995 - DNA, 1064 bp, Cannabis sativa
ttttttttttttttttgatcaagatgtatattattacttgatcttgatcggtatgtgtgtatatattatatatatgtatgctacacgattattttcttaatcaattttatttaaattatatgtaactcaagttgtatattattactttatgagtacgagtgtatatatatgtgttattctattattttttataatcaattttattttttttttcatacttttgtatttaatatttttattcttgagtgattttcttgatagaaccaatctatataatagaaaaaatggtctttaatggaacgatagaaaaaagaaacgatttcttaattttgagtaagtaaatatattattctattaaataattataatgagttttatatattttttttacttgatagaagataaatatacaataattatagtttgggggtaaaaaaaagtcttatttattataatatttatgtatagtaaaaaaattagttaaaataattttatcatttttttgcatattaattttgataatgcttagtcaatatcttcgataccggtgatgacaacaattttgaatgtagtgtctattacaagtgagatacgatgacaacaagtttgaagaattataagtgagatatgatgataataaaagatttgaatacaatagcactacaagtgagatatgatgattaaaataactttgaatatagtcacgattgcaaaataagatacgatgatgacaacaacttattttttttttttttgtgtgtgggtttcaatttacataactaaaatatagttttttccttaaatatattataaattatcacatgagataaaattttatggtttactataagactgaacatttcgagcgggttcgacccgaacccgagcaacccgcctgaacccgaaccggtgaacccgcaaattttttttaaaaaaatgtttgggcgggtcggattcgcgagttgagtttttaggagtactggatttcgggttgaatccaccaacccacaatttaaatatattgtatatattttttttacagtttatatatatatatattaaat

SEQ ID NO: 56996 - DNA, 828 bp, Cannabis sativa
ctgttcacctccactaaattggctcggccgacaaggattaggtcatctgcaaagaatatgtgagatagagtcggcccacctcggcttagcttaataccttgaatagaaccctgatcaagcgccacctgtaaaagtctagataacacttctgctgcccagatgaacaaatagggtgagagagggtcaccttgccgaagcccacaggaagggttaaagcttcccacttgacccccatttagacagatgtttagcgtagtagtagtgatacactgtgaaatccacaaacggaatctctgagggattccaaagcactccaacacatggtcaataaacttccaactcaacttatcgtaggctttgaccagatcaatttttatggcaaaaaatccctctttacctttcttccgattaaaggaatgaataatctcttgaataatcacattgttgtcatggatattccttcccgggacgaaggcagcttgagtcggacaaacgaacgagggaagcagcggtttgatcctgtttgctaaaattttggagatgactttgtaaaccacattgcacagagaaataggtctaaaatggtttgttcgggtcggattcgggaccttcgggatcagcacaacatttgttgcgttaatccctctgtgcatattacccgtcacaaagaagtcactaaccgcatcacagaagtcagctcccactgaatcccaatagtgtttgtagaacagaacagacatcccgtcaggtcccggggctttatggttagtcatggcaaacagaacttttttaatttcatcaggactcgggccactaaccagggccgcc

SEQ ID NO: 56997 - DNA, 1805 bp, Cannabis sativa
aaaaaatttggtttttctgcttatagtttttttttttttttgggaaaagtactatacttcagctactaaaaacaagattttaatattatagcacgagatataaattttgattggttcttgaaacatgacacttcaacttctgaaagggaagcgatccatctctaagtaatgaaatcggactattatatataaactgcatagtctaatctcttcttcttcttcttctatttatacaaaatcctctcaaatactttttcctctatcaatcagttatggatactggtacatatatattttcttcacatttaagtcatattgtgttatttaagttatttctttttataatatttgtcttgtgttattgattttgtagaaatttcaagatgtatgagaaatattccaccagctcactatttgatgaaagttaaatcgtttagtttgctctcaaaatcagagggaaaacatgatagttctttttttgaagttggaggatacaaatggtaacaatattatgaaaattactacaattatttcttttgtatttttaaaactgtcttttgggttaattgctatgtgtgtgtgtatatatatataggagattgtcattttatccaaatggagacaagagattaatcactgataacaactacatataactctacttgacaatatgtgagacagaaactcttccaaatggttgggaagttaatgttaacttctcattgtttatctataatcacttacacgacaattacttgaccttgcaaggtaattaagtctgtataatagttatatataaaaatatatagttatttgttatttctatatatttatgtgggtgcattgtgttttttttgtttgttgtagctacgaggcgttttcataaaatgaaaaaagaatggggttttgataaaatagtgtcagttgaaactttcaaaaatgtatccaatggatatttgcataatgactgttgtgtatttggagctgaagtttttatcatcaatcctactccaagctttgaaactctttctgtatttactcgtcgagacataagtaatcctatttttcgttgggagattaaggagttttctaagataatggacaaagataagaatttagttctggaggagctaagtggtatgttgatacatatggtcattcaaagagtactgtgttagttttgctttacatttttggttaaaatcttattagtttttctgtttgctgtttttgttctaggtatttaaggatctacccgaacggtgatagaagtactgatggaaaatcattaggagtgtctttaatgatagtagatgatgacagctttctgaataactcaacagtttacgagtaattgatcacaaagttagttctaaacacaaaaagcgtttatttattaggatatttttttaaggatattgttttcatatgttataaggtgttcataacacctatactgttgtaagtgagctttctaagggtattgttatttgaaaacttacagttttatgtgacatactctaatatcgccatgcaaaacatcaagtggtgtacctttagcattattttattatgatcatcattaagtagagtcaataacaaaacaatggtgattaaaagcttgatcattgattttataattttcatgttttatgcagtacttcgtgactgtttcatatgtggcaaaggtggttggggatttcctaattttatattactagaaaatcttcacaagtcttcaaatggttatgttgtaaatgatactctaattgtggaagttgagttctaccttgtatcacagacta

SEQ ID NO: 56998 - DNA, 940 bp, Cannabis sativa
acaatataaaatgtaattaaatataaaatgtaattactcatccaaactaaatgaaaatacaaattagttcgattagatgttaaatgtattggatttttaggcatcccatccaccatccgatctgatccaattggatatttaaaaataacatccaatctaatccgatcataattagatattcaatgtttggcggtcggttataattctattgatcaggtctcattagattggatcgatttatgcacacccctgattaaagggaactatttttgtcgaaaactatatatataaatgtgtatatttattaatgaaaattattaaccactggaaaatatcgccacaaataatgactcgcaagttgcttgttagcttggtacccccagttttatttctctaccaaacaacattaagaagaaaaaatatagcaaaaaattggacaacaaggcaattgaataaaatagaaaaagaaagttcataaaaaatgttactgtcaattttctattacaactttttagtgtgttttaaaaatatacgttaaagtattttttattttttaaatttttttatgacggtattcattatacttataacatcagccttgtaaatttttacaatttttcgaatagtttaaagtatcaaaaatacatttaaagttttttgaatgcgtgtggtaaactaaaatatcaaaaactctatttttgatattgtaaattattcggaattttttaaaaatttactgagatgatactgtaataataacgaatacaatgtaatttcgagcatagatatcgattaagaagttgtaataaaatattgtaattagtactactaaaaaatagaaaaagagaagaaaatctcttgtttggttgtgttttcagttttcagtttttaaaattgtgtttttaaaagtgagaatagaaaacagttttttgtcatttta

SEQ ID NO: 56999 - DNA, 5003 bp, Cannabis sativa
aaaaaaagaatattaaaggtttgaaaaaaataataaataacagtaataaatttttattttttagcttaaaagcattaatagaattgaaaatgagctttgggaattagaatggaagtgactaatgacaaattgttagccccttcaaaagttcattaaaaaaaatattgggcattaaagaaaaaatatattgggtcctttatttttttaggtcttgtgcagtagcccaccttgcacaccatcatggccggccatggttatcgggtcttcctataaatctaattgtctatttttttgaggcgccttttaaaacttacttgccttttaataaaattgtttcgttttctttcaaaataaatgacatcttttatgacaataagatcaaatttgaacttggaatacctttttgtaactatataataggtctaaatacaccaaaggtttttgttgggattaaaactttgttattaatgtatataaatgattttttttctttttacaaatattttttgagtatttaatttcgagaaaataaatatgcagtaaaaatgattcttatcattagcaagaagctggtggttaattagaatattggaaatattatcgtattttgttcgtacgtccttatatattattatacaatttttgttgaaactcctataaattgaatctctactttagtttgttccctaggcaaagatatgtttgtatatatacataccatgttatataaatatttacttcccataaatggatgcatagttatataaatatatgactatataaaataatttttatatgcccaaaaaaaaatagaaagaactatatataatatgtattttttatttacagttactattctatatataaaatattgataggcatttgtactaatctttccaacccttctggaattgaggttttaattaagttatataaatatatatatgtataatgtaattaattattaccatgcaactttatatgatcagtattatatgatcagtatgactgtaattccacttacgtgtgcttcaaggcttatcctctttatatatataaaatatcatgcaattaaacttgattgaaaatttattaatgcaatttggtaaaaaaaaaaatattagtggcttaaacttaatcattataaccccagaaaaccaatgtttaaatttacaataagaaattaattaaagggatattcgaatagggcccaaaatataccccatttctattatagtctctctcttttttttttctctctaacaacccatttttattatagtttaattatgtacactaaaacaaacatgttgtggccagtcataggacactaatgtaaatcaagttcatatatattacatatatatatatgtactatatatcaagaaaagaaaaaatgttgacattattaattggtatacatttatgaaagacaatataatatatagattatagtaacgtcaaaatcaaacttgattggatccaatgaaatcgtagcaattcattttggcctttcaaaaaaggtagggatcgatatatataaagatagaacaaattaaagtcgtcttcttctcttcttcttcttcttcttcttcttcgtaataattagaatttttatccttgaagaacctaaagaagtcaatgcattgatatgccattaattaatattcttgatcatggctgcatgcacaaaatgggtcaaataaataaagtgaatcaggtggaatacacacaacatttactgtggccacttataccctaataactaaccaattaagtgccaaacaagaagtagtggttaaacctaattttggccaacacacatctacatatttgctaatatgtgactcagtggtataccttaatattacagagagaacaatatgaaaaattctattattgatatgttatgataagagaacaggtatttatacatctaactcacacaaagttagttacaaccaagaatagaaaataacagacctaacaaccaagactaacgacctaataactaacataaccgactgtgtaacaaacaactaataccctctaatactctccttcaagatgaggtgtagagattgacaacactcatcttggacaataagtagttgaactgagttggaaagagagctttcgtcatgatgtctgctatgttgtgtcgtgaaggaacatgagaaagtttgatgtgttgttttatgatctgctcgcgaacaatgtggcaatcgatgttgatatgttttgtacgctcatgaaagacaacattctcggatatgtgtatggcggcttggttgttgcagtagagagtggctagttgtatgtgtttgattctaaagtcagactcatacaagatgtgaatgagccaaagtatctcgtaggttgtattggctaaagatctgtactctgcctcagcagagaatttggatacagttgtttgtttcttattttggcctaggaagatgcgaaagccagtaagggaccttcttgtgtcagggcaggtgccccaatcagcatcagagtatgcctttaaatgaagtaattgatgcacagatagttgagagttgtgattagattgaaaaaagagtccttggccaagagtacctttgagatattgaaggatatgatgagcagcctgcatgtgtggttgcctaggatcactaatgaattggttaagccgattaacagcatatgagatgtcgggtcttgttattgttaagaaaagaagcttgccaattaggcttctataggatgcgggatcggatacaggtggaccaacatctttgctaagggagagattagcttccataggtgtggaaacgacttttgatcctaggagaccagtttcggttagaagttgaattgtaaatggcctttgagatgtggaaatcctagatttggacccagcaagttcgaggccaagaaagaatcgtggggaaccaaggtcttttagttgaaattttgagtttagaaaaaaatttgaatgcagcagcatctgtagtattgttactggcaactagaatatcatcgatgtagactagaagagcaagaaatttgttgggggtgatcggatgaagagagagtgatcataggcagattgtatgaagccatgttgagttaaggtggtacttagtttggcaaaccattgtctagaggcttgttttaggccatatagacttttgtgtagttcgtaaaccggattgggaggaagctccccctcattcacatatcctttaggaagagacatgtatacttcttcatctaaatctccatgtagaaaggcattatcaatatccatttggtggagagaccaattatggatggcagctaaggcaaggaagagtattaaggtgttgaattttgcaacagaggtaaatgtttctgcatagtcgatgccctgttattgagtgtattctttggcaaaccatttagcaaaagaagttgcaggtgctgtatctatcccaatgtcggcttgattccaacatgccttcgcaaaataataatccaccaagcaatgccacatgccttgatctgagcctagtcttcgtgggtaggcaattggtggcagcacgccacaacaggtccttaacctttggggtacactaagcttccaaagggtattccaaaaaactgaattatcatcctaagcacttaactctttactcaactgcaagtacctgtaagcggatttaactgaaaatggcctaaattttcccaacaccagtaccacacatcatgtatacgacttaaagacaaggaaatgctaaggatcatattagcatctcgttcattaaacaaatcacgaaccaaatcgacatcccaagccaaattgcaagttaccattaacgcctgaacattttgatcaataagagcatgatggacaaaaattaccctcagattatcatcatttggcagccacgggtctaacaacacactaaccatagagccatcaccaactcttcatttggcccccttaaatactagctcttgtgtttcaaaaatactacgccacacaaagctaggattgttatccaatgtagcagtcaaaaagctaccattgcgttaataaagagctttaaaaatccgactaactagggaatcgaaacgactaaagagtctccagccttgtttgcacaagctaaaatatctaagctttcgaaaccccatgccaccttttgacttatgaatcgtcaatttgtcccacttcttccaatgaatacctttaaaacttgcacatcaattgctccatttcattacaagtttccactagaagaagaaaaacattcatcgcataaattggcagtgattgagctacaatttttatcaacaattccttccttgcctttgatagcagcctaccttcccacccttgaattattttcctcattttatccttcaagaagccaagcatagcagttttattgcacccccacaatgtttggcaaacccaaataagtgtttccttcccctgcttcactaatacccagtattttgaatatttttgcaaattaacttgctgtcccgaagcaatttgaaaagtgtttagaagttctaacacattaacaacactttcctcagatgccttgcaaaaaatatagcaatcatctgcaaaaaaaaatatgtgtgatatcaccgggggccccttgcaaccttacaccctcgaatttttcccagtctctcataatctcttatcgacggcaaaaaaactttctgcacacagtataaaaagataaggtgaaagaggatcaccctatcttaaacctctagtagggacaatagggccaatctcttgaccctcagtagtaatactataggagactgagctaacacaattcataatcaacttaacccagtgtttagcaaaacccatcctcctcagcatggcttgtagaaaaccctactcaacctgatcatatgccttactcatgtccaacttaagtgccataaaaccgtccttaccagcttgcttccttttcaaataatgcataactttaaaaaaaaaaaaa

SEQ ID NO: 57000 - DNA, 715 bp, Cannabis sativa
ttaattaatagttaatttttttttgtacgtatatgctttttattttgactaattgttttttcttaattttttttatatatttattagattttttctcaaatgttaattttatttattcagtttttttatccaaactattgaatattatcttaatgaggcgaaagaggctagggttttacactctcactgtacagtactactcatcgccaacactacgtcatcgttttcgtataatatactttatttatttatataatggccccttaattatttcatctttaataaaaaaaaataaaaggttagccaactaataagacaaaaaacatactcctaccaaaaccaaaagtttaatgaatatagatttataaagataaaattacaacaatctatttttctacaatgtatatttttctgagattcaaaagtttaattattattactttatatatatatgttagatttttttaaaaaaaaaagaagcaaaagaaaaaaaatctatagtactgagagagaggggaagaaatttggtggtttcatctttacatgtagtactacacgtacagtactataaaaaattaataaaaatgattataatatatatataatgcaacagttagttaaaattaattatatatgtctttaattaatattaattatatcctgtaataacacactgaatattctctctccagctagagtctcattctcattctga

SEQ ID NO: 57001 - DNA, 3082 bp, Cannabis sativa
  modified_base (249)..(261): a, c, t, g, unknown or other
  modified_base (789)..(813): a, c, t, g, unknown or other
  modified_base (1160)..(1161): a, c, t, g, unknown or other
gcaaataatcttagttcaaatcactgatgtagtgagatgtataagtgaaggtgttgtatttaatagagattatatatgacaaggaccgggaccgatatgaacaaaactttctttacctaacatgtcgtttactataaagacataatatatatcatactgatgattaattgtagatcggcctaaatcttgagtaatcatgaactcatgttcgtgttatcagtttctttaattcactcgttaaagtttctnnnnnnnnnnnnntcttacaacttctgttttgggaatctaataatgtggatgactggaaacatgatctacaattctagaatcctgactttcttaatggatcaaatgttgattccctttaagtgttaattctagaactagaaaggtttgcacaaactttagatgtgatgatctaatctaaattatacttccactaatgaaatgataaagaagtaattagaaaggtaaaacggtaatttgatcaaaactaattacgaaccaacacatggagggctaatcacttgaattgaatatatcaatggacactgtagtaaaactcagtcaatataattttataattactaagagttcaatttcatatttatagtggagtaatcatagaattaatacacatgattatttagttgatgaggctcaataaataatctagcttattggagcttaaaattataggtatatggtcactaaatcgccaccttgatatactgttaagggaagggataaagaatagtataattttgttcgaaaaaatctattttgaannnnnnnnnnnnnnnnnnnnnnnnnttgtaataaataaataattttttaaaattaattaaataagacaaaggacaaaagttgttaatacaaaaattttcaagacaatatttgttgagacaaaagttgtcatgatgaaagacatcatccttgtcctaaataagacaaggtaggtacctaccctattgtagagtgtccctattgattttatctttttaggttaattaattaattagttaatttaattagataaatatttaaatttaaaaattggttaaagatattttaaagtaattgagattttctctcaagtaattgagaaattctctcataaatatcagtatttgaattcgattatagatatttatttaaannattaaatatgatttaattaataaggattaactagtataaatagaagcctgatttgagaaatcaggagatgctttttcacaacataattttcaaaattaatagaagctttttcatatgctatttttgaaatacatagaggagaaaaataaaaatgttttctctctcaaataggttttactcatgtgttgagaattaatcaagaataaattatatactttatcttaatagccacactattccttgtgtgtggtggaacgattgaaaagactacggtgtgagtttttaatcaactaaaaggataaatatacgagaagttttgagaataccataataatcatccagaggtatatatttttatcttttattttatgtttaagtttaatgtatacacatttggagatccattgggctacggtacaattataatcagataatatgaaatttttccgctacataccttatttagtactattaaaactaacaattggtatcagagcagtttcatgaatgtatatacattaaatgttaagtgggttttttgaatttatatatatgatatgtatgtaaatggatggttatattattatgaatgtatgaaaggtgatgaatcactaattatatagtataatttggtataggtttatttttatttttttctagaaaataatgttagtcattatggggcataggaatttttttatgtaattttaattttatgaaaattaatttatatgtaaaatatatacttatgtaatttacattgcacgtgagctcgattcttaaacttgaaatccagccatgcacgacaaaatcatatgcacgtgagctcgggttcatggaggaaccctggccatgcacgatggccccaccatcttgggtaccgtgcacaagtaaggaagctcatgcattcattacatgcaaaagggacatgagtccctagccatgcatgaatgcatgaaccagttgggacacccttgcaggagcgggctttgcttccatcttctattcttctttttttagttgtagaaaactcttttgtaatgtctaggcataccacattgaaaacatcctcgccctttacacttacccagatgatgctttttataattgggacattccgggtatgtgtattgagttttagaaccaccctgacaattgccatgaccttagttccctcagaacctattattctgactcaaaccaccaaatgtagatggtgtctttctcttctgatcagtagttgagtcactaccatccctaccataataaaaggtaggaggagcagtggctccaccaacaacctgtgtccctcaggactcctgaatacactcaactgcgcctttagctcttagtgcttttcccaccatattagcataggtggtattatcatctattgtaatcatcaggtcgtgtttgatcttgggattcaacccatccaaatacttttctttcttgctgaaataagttggcacaattaccgaggccaacctagccaacctatcgaactgagtagtatattctgtaatgaatatattctctttttgagtcagctgagtgaattcttttcattttgtactatggaatatctcgttgtagtatttcgtattaagtagttattgaagctcttcccatgtaatagtagtgacataccaagtaagagccaccatatcctaccactctctttctggatgggtaagagccaccatatcccatgtaatagtagtgacatcccaagtaagagccaccatatcccatcactcaaattctaaattttatgggagtcactagcaattgccagagtggcttgtgcaacatttcaattgaattttatgtgtaatagcactacgaactagaattgaaatgttgcacaagccactctggcaattgctagtgactcccataaaatttagaatttgagtga

SEQ ID NO: 57002 - DNA, 1588 bp, Cannabis sativa
  modified_base (1531)..(1532): a, c, t, g, unknown or other
tctttgaagtgtgagtgcttacttcctcccgaagtaaggcttaaacaagtcttttcccgaagaccactctcttgttcggtcaagtcgttctaacaaactctacgactgagtaagaactgatatataaaacactagaacctagatgaacaactaggttctcacataacaaagacactctcctcacaaataagaaaatgcaaaaattgaatacaagaagagttgattcgaatggttgctctctagggtctatttatagaacatagaaaccctagagacaaccacaagatcgaatctacaactgtacaaaattttcctaagaaaaactcaatctgcagcattataatcggaatctgatgcagcaaatcagaccagaaaaggaaacttgccataaacgagtccgatcttctattgagtcttgattcctgccataaacagtttatatattctgattgtatcaagacacaatcgaatttaataaggaaaaagacaataatcaaagtttccttttaaaaccaactttccataagagaattgcttctcttacaagaagttttcatacaagaaaagttcaactgaaaaatgcatctttcctaacatagaaaagagcaataaaatccaaataaacaaggtaagataattgggtatgaatgcaaatcaatcttactataaaagaaaaaatattttgccatctaacttgccaaaaaaagactttacagttacacatgaattagctgcatacgtacttatgatggatggtgcgctaatttgaatggaggatcttcgatctcttttttttatgtactcaacactaatttttttctcaataaaattttgttcattgttaaaaagaaatataaaatattgaaaacattctaaattattaataaagtgtattttttttgaataaaaattataagatctattaattaataaattcgttcaaaataatagaacacacttcagaggaacagttctccaagtgaagcacacgacctgtagagaaacaagagtctcttgtcaagcaatgagccaacttatttgcagatcgttttacaaaacacaaattgtgaaggcattaaataccgctctgaatcgcttgtacacacaccaagctatctgtttccaatatgactctatcccacgaatgagttgcaatccaacttaatgcttctttaatgcctattatctcaacattttcgggttgaacacatccaatcttctcattcttaaatgcttctaccatagcaccatgatgattctgaactacacaacccatgccaaaagacaagactcgaaatagaaaaaactaaaggaaaatgactaaaaaaccatgtcaaaagacaagactaaagaaccatgtcaaaagacaagactaatggaaaaattaaattagtttaaacacataaacacgatcacaacatttaaattaatttaggaatgaactccttataattctaaccccataaaaacattaaatattagaattaaactagtaatagtaaattaataaatgaaaacaaaaatctgaaanngagaacgtcgttgagccgaaccaaaccacccttagacgactgctcttgaacccctc

SEQ ID NO: 57003 - DNA, 1079 bp, Cannabis sativa
actatcatgttatagcattaaaaaattttgtcacctaaattactatgaagtaaattattataatgtcaatattttacatcttatatgctatccacgtgcggagcaggtatagcctcactagtgtatgataacactaaaatataatatatttatgcatgtactatttaaataaaaatacaatatcaatatatgtatatatatttatatattattgagaatgttagaactttgtaaagctatatatgagagagtattattactgtgaatgctagaactttgtaatggtgatggtgtaactaaaagaaaaaagaaaagaaaaagtaaaccaatgatagctatatgtgtgagagagtatgttaaggtttaatattttgaattaaagttaagatttatatagattgtgatataaggtagggttagttaggtaaattttttatttgtttatttataattcattaggatacggtagttatatagatatttttaaaactttaattattatttaatgttagtaaataaagattttagattgtatataaatatattttttaattcatcaagttttataaacagaataaaaaattaaaaaagagagaattaaggagagaagagatgaaactattttgaattattttagagtgtaatgtcaccgcctcatatttctcctttatatatataagttaacaacccgtgctttgcggcggaagttttaaaaaaattaatattattaatttttatataatttttatttgaataatatgaaaaattaggtgtacaaatgggtcagcttataatatgtaagtacaaaatctctttgttataatggaagcccgacatggttcatataacactcttttgtatatctcaatcattcaaaattattctcattattgtatatcatctgttctcatcaccgtatctcactaactcgctatcattttggcttaccaaaaaataaatcaagcaatgaattaacattattaacttgtttttatataatttttctttgaataatatgataagttaggtgtaagagaaatagtttaagatatatatatatatatttatatatggaacac

SEQ ID NO: 57004 - DNA, 1030 bp, Cannabis sativa
ctgattttccatatgatccacaggctgctaccaccactacgttccctgaaattggagatgatgactgctggtatatcgacacgggtgctactaaccatgtctctgtcgacacctccaacttggatatggcagccacttacaatggaccagaaaccattgcagttggaaatggtaagcaattactaataactcacattggtcatacttcatttccctctgcattaccatctaaaccagttcaattgaattctgttctaaatgttcctcacatgactaagaaccttgtaagtgtttctcaattaactacggataatgatgtgtttcttgagtttcacaaatcatgttgttttgttaaggacaaacaaacagggacagtgcttctcaaagggagaactaaggatggcctatatcaacttggtgaagttcccaacaccacacttcaatgcaaccttactactctggacaaaaattctgatgtaaacaatgtttgtagttgtaattgtcataccagtacccctatatcctcttgtaatgtgactgatattaataaaaatacatgtgattcctttactaagtattcaaatcaagtgtttcatactaccaagatcaatgacattaacaattggcattgtaaactaggccatcctgcattaaatacccttaccaaaattcttccactcatatcatatactggctctttaaaaaatttgcacttctgtaatgcatgtcaccaagggaagagccacaaactcccttttacacaatccactagtagagccaatcaacctcttgctctcattcatacagatttgtggggtccctcccacattgaatctaaagaaggattcaaatactatgtgcattttttagacgattacagtagatactgctggacattcccactaactacaaaaaatcaagcttttgatgtgtttataaagtttaagagtcttgtggagaagcaatttcaagttccaatcaaaagtattcaggctgattggggaggagaatatagaccatttgctcgatt

SEQ ID NO: 57005 - DNA, 1044 bp, Cannabis sativa
ttttttttttagtgaaaattaaaatatataaatatatacttttggtaatgaaataaaaatatgagtatgtattgtatctatatatatgtgtgtgttggggtcactttttggagggaaattttataatcgtcggtgggattatcaatgttaatttattattaatttgtaattaagagctttcttaatcggatataaagaaaatgtgaacaagaaagaccgttacttagtactactaaatgttatatagctacattattaattattatgtgatatatgtaattaataataaggagaaaaaaaatcaaaaacatttgcttagtggggttttataagaaatttgatgtaatttaatttaacattattaattagttataattaatgaagagatataggtgtgattataggaatacatgcatgatgatttagtcaatatctgattttggaatctatatatattggtctaaaggaagtattacccacaattatttggggtccccttagcttctgtctttgacaccttttctctttaccaaaatctcataaattatatataatggtcccatgcactgctaattttgatacaacagatagggatgatttatatatatataatgtatatagtgtgattttcctttttttgatgccatacatatttatatggggtaaattatcggcggacctacatagatacgagatgcttaatcgtttattgaaaaaaaaaataagaaaaattatatatatattttttagttagtttacgatatatatttataataaaaagtaatatttatatacataatattaattttatagttattcattttaattaagtacaatatgattctaacaattatattaatttgaagaaatagaaaatatatatatacgtacctctttaataacatgcatggctaaagtgaggccggggtacgtacgtacgtactattattaatttcacatgcatgcatatatatatatgttatagtccataatataaatctttgaaaaattatctcttctaatgatcataaataattgtccccc

SEQ ID NO: 57006 - DNA, 3030 bp, Cannabis sativa
ccttttagttgtattgatactagagataaaattacttagatcattatagtgatgggatctaaagtggctctcttaagattactatatgagaaccagagttggcgaatctcaagtgaaagtaaggagtgagagagagagagatataagatgagttatcagacttagagcataagtcttagggtttgagattagggttttagggcttgactaacgctctttatatatgagagcttaaatctctaatatcccttaaaaatagataaataaggctttcatttagataataaataataaaatacaaatgactaaattgcccttaaaaatagggaagttactgatattttccctctatttttgtgggttattaaggtccaatacattgtttgacttgctatccaagaatgatagctacgtacgaaagcctgccaagccaaaagttggcaagccatgcacctacaaggtgtatgttggctgacctacaggtggttggtttgtcatttcatggtctttcctaagtacttagacctagggttgaacatcagcgagttgaccgagtttcatgtttgcgggtttcgagttcccaaaaggtctagttgacgggttggcaggtcacaggttaaccaagtcaacagattgatctaatcatctcttttcaaaaaatcaaatattattttgtcaaacagttatttcttttattgttctgttttctttttccttgttttgcggctttgaatgttatgggatttatttttctggggtataaatgtgtcactttctatagcatttgatttggtctacaatctactgttgtttctatctctagtaagagagaaaaagtgtctttaagaaactctctgggtggggagatgaaataccttcattatggtaggaaagggttagagaaaattacagttctagagtaccaattggcagagaatctattatactatgttgatgttacttttgaagtcggtatcaaattctagtggtagcagaaatgggaaagaaagtcaattgaatcagaaatcactttgatttatgggggtggagcaagaaaaatacaaaggagagaatctaagagaaatagttgtactgagctatgccaaggatatcctagtttttggttcttgctttgatttagtcattcaaagctaatgacatggttcttatcgttttgcaaattttaatgagaaattaattttttttgaaagttttcatgtggcatgtgggtgtggggttgtaattaaaaaaattagaattatatatattattcaccgagttagcgagcaggtttggtctaacccgaaacttggtgaacattaagacctaacctgcaaacctacctaatggagtaccgggttggacctaacttgcccgaacatttttttaaaaaaatttgtgggttgatcaggtggagtccggtcgggttaattgggtctgggtcaatccttctcaaaatgtttagtcctgctcggacccctcatttgctgaagtgctaagtagatgacttggccttcttgttgataagttatactcccacgtgacattgatgttggccacgtgggcttcccatgtcatgtgggcaaaaatcaggataatagtagtcctagtgatgtttaccacgtggcagttttgattgtgagttgtaatttgattttaccaaagggagcgatgttgactcacctgaaaccatacatgagctacttgcatggctttagatctcttagggagtgacccactctttataggctctattttgattagaatatttaataatgtttgatcattaactataaccttcgtcaccattatgtttgaaatgttgtagacactctgttaacttgactgctcttacccgcagtgtttatctcttagtaactagggtgaaaaactttaaagtttgtatgttgaagccattagctgtcgacaagatagaccactattgaggtgtaggcttattttttatgtgtttaatgatcaagcatgagttcactttatgatcataagggacatgaatcattgtcgaagagtagtgtagaaaattctgccaaatcatgtgtacaggggcgaaatcataaattgttgaagaacatagtttgatgatttaagctcatagaaccttgttaaatgttttgaaaaatctccaagcgaggaaatagaaaaagtcatattggactgaatttatgctaagtatagcaggccaaaattaggaggagtttagccactaaaagaacaccacaactggggcagcgtctcactccctaagggttttctttaatcaattcaaaaatctcttctagatgaaatgtcctgcttctagagagctttgtgtaattgatgatgcttttcttttcttttttatttttgtgattcgaggagaatcacttgcactagcactttagatttataaatttagtcgttatattcttccgtgacctaaagcatttatatcataacagtgcttaactctggcgtgcaactagtctgtatgtgcgcttgttcaacttaatgacttataaacactcacactagcactccagtattaagaaacttggttactagggataacgtcaacatttcattaagccgtagaaatactaacttaggtgtataaaatttttgaatgccactgcaacctctagctttcgtatactaggtgtaacgctccaatatttttccttattttacaaaatactaagtttgatgcattaattaaaaagattcaaaactgtttggaaatacacagcgggttttacaataaatatgcagaaatgtgaatgatcattcatattaaaaaacacaataagtagttgagtgcaaataaatttataacatcccaatgaactcaaattactttactataaaaaaaacaacaaaaccaaggctccacggacgttctagaccgtttgctcgtccatagcccctcgcagtatacataccaaaacttacctggctcatcaaacttacattcaatgttccctgtctattgcctgtagggagaaagtaagggggtgagctaaaagcccagta

SEQ ID NO: 57007 - DNA, 1063 bp, Cannabis sativa
ggtctgtacctttatcatacaatttaatttgtagcattttgaagttctctaggagacgagcttccgtaatcctcctaacacacgaatcctggtcctaatcctcggaatccgtgagggccccactttgcttacgtacaagctttgtcagagcagcaatttgctcttccaatcttttcgtatcattatttaggaggtcacgtctgcgggtcctttcattcaaatgattcctaaggtcattcctacgtggcctcaccaactctcccttggctctttcatacttgggatcaagacgcttttgaagttctgtagttgaccaactgtagtcagaatactgtcccctagtctcaccgtcctggttaatggaattagtggggcgatttttccttcccttgggcttgggtactttcgcaccagtccctctttatgcaacaagacctttcaaagcagattgcgtccacatctacaggaattggtggccttctgcgtttgtacaggtttgctagttggattcacgctacatgagctgccgagttctagatctctaaacttagcttggaggggagccattatatctccatcttttgagaaggcttctcttgatgggctagcttttctcgagtctcatgaaactccttgggtacttctgccacatcaagatcttgctcataatgatacccatctttgttgtacccatctttgacatatgcattgtcatcttcctcattaacctcgacctcacggtcttcactaacttgtttatggcgttagtctaagttgccctcttagagatcagcttctaatgtatccccttctcacacattgctcgattgagagtgttctaaagagagagggttcacgttatccatgaggacgtcgaaaccaccttgaggagtcttcttgacgacattttttgagtgaataccatggttatagtagcgttgtgggtttagtctttgtaacgctctaatctatagggacgccacgtgtgtgatttcataaactaatttaatactaatagattaattaattattaaaaatagtgctaatattaaaaacttgacca

SEQ ID NO: 57008 - DNA, 1359 bp, Cannabis sativa
taactcaaatataactcagaaaacaaccccaaacacttaaggttcagacaaaaccaaatcttcaaaagttgcatgctaagaccaaacttttacttttaaaataaaaggagaaagaatttctaggacttaccttagatttaatccttcaattctgctaggaatcactaagaaatagtgaaaaacacccctggtttccctttggtttctttagagccaaagtgaagagagagagaaagaactatgtgtgagtttggtttttcttataatttctaaagttatctagatattatcccataatcctatttaatttttaattatcaaaatcagctaaggcattctctaacattccactacaagacaagattaacctcttgggtaaaattccaataatgccccttacttcccacttaagttatctcaagacttaagggtaaaatggtcaaacaccacaaccctgtctaaatctgatattacaaatatcacacttatataccccgctaaaacaaaagttctaaaccgacccgtatgactgtaatggccaaaccgtcgcatctccatcgttaccgggcaaaaatcataaaaatataaatttttacatatagcttaaacaatgcactgaaagtttaataaaatcttcagaattgggaaattataatcctaatgcctattcttaaaaaaatagggcccacaatacataacagtcacatataatcataaaatataaataattaatgtaaatttccttattaatctatattctaagtatgcggtaattacaattatccccccgttaaaaggatttcatcctcaaaatctaacatgaacaactctgaatatggagccctcatgccaaactctaactcccaggtggcttcctccatctcactattcctccagagtatcttgaccaatgttatggtcttgttttgaagaaccttttccttcctatcgaggatttgaactggttgttcctcataggacatatctgactgtaatcctagggtttcataactcaggacatgaatcgggtctaatacatatttccccagcatcaaaatatgaaatatgttatggaaagttgataatgttgagggtgaggctagccgatacgctacttgtccgaccttctcgagtattttgaataggaagggcttaactttcccctcatcctatagtgctttacacccttcattggtgagacttgtaagaaaacatgttctcctacctgaaattctatgtctctgcgcttaggatcagcataacttttttgcatgatttgcaaagcaagcattcaagccttgattttctttattgcctcactagtctactatactaactcaggacccaaatatttccttt

SEQ ID NO: 57009 - DNA, 1065 bp, Cannabis sativa
  modified_base (36)..(36): a, c, t, g, unknown or other
  modified_base (215)..(225): a, c, t, g, unknown or other
aattataaagtgttactctttaaaattacttgaggngcatatgtgtatgattaaccgaaatttatctgaaaatacatgatatagtgaaaacccacaactttaaaatttttgaaaatttttaaagtttttgatcaaactttctaacgagaatggaggatcaaacaattatgaataaatttttgatttaaaatctgtctgacgagaaaggaaaatcnnnnnnnnnnnatgagatataactcataactcacaatgcaaagctaaatactaacggctcgcatcgtacaggaaagtgttaaacgagacatcaaggtgtcttgaaaaggacttaaacctagtgtgtgaatagacgatgtaactattcacataagcaatcaaaaatatacaaagtgataaatcattaaaagtatattcaagtttgcttgaaacagattacaactgttattgcgaggtagaattgataacagctcgcaaattaaaagcatggcagataataaacttctcgcgcatatagtagactattaactacttacatattattagaggaaaatacgagcaatggaaaggcctaaagtattttgcatttgatcaaaatataattgtttaaattgtgaataaaacgcaagtaaacaagtacatattaaagttcaagcataaaagtatgaagcattaaataaagataaaaaccaagttggccatccaacctggtaaaattatctttacaacaaaagtgccataaggggcgaaccattgtctcagccctagggcctttttcctaaataaaataaaaaataaataaaaaccaagcctacatagtaggagacctggacaaattttcttcttccactgcctcagcctcttcctcctccttccttgtcttctcgcaataagcaagaatttcctcttctttctcttccaggaaacttgtgtccatagtcggatttgccatccaagctcgataaagggtacggaggccaacattgtttcatcgttcttgggtttcggtctctttcacttcgagtgtcaccttggcaacattaagttcctcttcaagcttcttgcattcct

SEQ ID NO: 57010 - DNA, 1570 bp, Cannabis sativa
  modified_base (971)..(976): a, c, t, g, unknown or other
gtattttgggcgaattctggagcaacatagggttttgttgttcaattgttgggtgtttctagcaagcattctctaggatttttaagaatcaactcaaggtaagcttctacactcttttctctttatttttttttaattttaaattaggtttgttgcttgttttttgaattagggttgttgtacgagctggttaggtgtgtttgagttttttgaagtttgtgtatgatggttttagtgattttaacctgaattgggtgctttttattgtgtttgaacaaagtttgagctttagagctcaaactttgctctttcatagtaatttgtgtatatgagattattgttcagttcttttgcatgaattatgttcctaatgaattgaatatgtggtttggagagttggaatcgaattggggttgaattgaattgtttgtgaaatttttgggggttcttgcactgaaccagttgatcagttcagttttgcactgtagaaccggtctaccagttccctttaggcagaccccatagaactggtttaacgattgggattcggtttaccggttgaggtaattttgggcatcctagattttcgtgttttagcgatatttagggtatttccatgttatccatcgatagggaaacttttagttttgcttttaagtctccgaaaagtgatttagcgtatcactcatcaattttatgaatattgtgacttagggcctataaatcattgagtagcagttatactcaggttgaccgacacacctaaattcaggatcaaggtaagattagtataataatatgcatatgtgattacatgttgtgtatacatgtttatgattgcctgttagattacattaaaatagtggtattagtatacatagagttatattggataccgatgaatgtatatttggcataagtattgattaacgttatcacatcggtacgattagagtaccgagtataggctnnnnnnatggtcaatagtactgtcatacgaacgttctagactcaatacgcgtgggatgcgggatagttatgattaggtgtatgggcgcttaattataattattttatatttatttatgattatacttttcttactaagtctgttgactcgctgtttacatatgtaggcatgggcaaagctaaggctgagcaacagtaagtgcgagcagatgaagattgcagatgtcgaggcggttagagctaaagcatacgatttttgggacagtatgttgcattttgaatagtcgctaggcgacaacttttgtattttatattttgtaatacggttgtaaatattttaaatatgggatcccagtttatgaaaaagatatttgtttaatttaaagggtaatccaataaaattttaattaattatgattttcaacaaacccgttgattagcaacatattgcacaattaatatcaaattttgataacacgcctaaactagtagggtgttacattggtggtggaagggatttgttggatatcgtttgaagtagtgttggatctcggtttggttgccagaggtgggtggctttggggtttagtggtggcttctt

SEQ ID NO: 57011 - DNA, 1257 bp, Cannabis sativa
gaccaatagcggccgatctccgccgctaataccctatagcggccaagagtgggtgtattagcggtggagtggtccgccgctaatgatgtagaatgttgtagtgtgccagcatggcagttaactgctaaaaatagatggaaatggctaagtgctaacagaacatgagtttaaagggttttaccactaagattttggaatttgagattagttgtaataaactaggcatttatggaggttatatgccgcaaattactcttaattttatttatgagatttaatatagtacactatgatctttgttgggaattccattatatatatactagagaactaatttgttcttcacacaatactgaataatgtttgttatcttttttaaattttaagttgttgtactgaataagtaaaataatataaaatatgacattattttatgaaaattatgagaaaatttaaattaatataattttttttgaaagaatcattctaatacaaatatcacatacaacaattgaataagtaaaagactcaaaaaaattagtacaaatcagttaaacttaaatatataacaaattctttttgaaaaaaaaatgtcatcctatagtaaaaaaaatatatatatataacaaattacattcaccaatatgttacttacatagtcaaaaatgagtacaaatcgtctccaccaagtgtcatcatattttaattttaaaaaagatatatcatcggatagtaaataaattcttaaaattagctgtacttatgaagaaccataagtaatagtttaaattaattatttatgcaggaaaaaattactttaatattagattattctaaattaaaacaaattgaaaattatttttttaagtattttttaatttattttttgttagtgtaattgacgtaatacgttaaaaaaaaaaaaatagcctacacttacacaaaaaaaaaagcatccacaaaggttactgtttttattatatacactatatagtaatcaagtttttatatacatatatatatatattattaaatacataaacatactaataataaaatagatattattatagatgaattttaaaaattataactaattaactgagtaagaattatctaattaattacccaagtaaaataagataaataaaaatgacaaaagaaataatatatttatagtgtatattaatattaaaaggggaaaaaaaacagaaaaatattaaaaaggaaaaaaaattacaaaaatactttgggccg

SEQ ID NO: 57012 - DNA, 835 bp, Cannabis sativa
  modified_base (407)..(412): a, c, t, g, unknown or other
ctaaacccaaactcgaaccctgatcaaaacccagacaaagacctaaacccgaattgagactaggactcgaacccgaacctagaccgggacccaaatcatcacaataaccgggacatggacgcaaaatcatgatagggacctgggaaacagaactagaaccgggacctagcacccgacctcgacccgaacttgaacctagggtgcagctcgggacgcgccacaccagagactgggatccgagattgggatccagatctagaccgagggcttggacaaaacccatagtcggtgtctggatttgggacaaagtcgtggacccgaatcctgacaaggacccgaatccacacctggacctgaacctactcccaaacccaaaagtggaaccaaacccgtaccctgtgacccannnnnngaaccaaaaccggaagttgaccgggactggaactaggacttcgacttggaatcataattgaaattggacctagatccaaaaccgtaaaaggactaggacccggaatccaaaattgggagccgcactcgtatcccaacccaatcctagactcgggacccgaacccgaacttgaactcagaccgaaacatggaaccagactagggacacaaaaccagggtcgggacctagaaccgcacccctgtctcgatcctaaacccaaactcagagctgggacctaggacctgaacgagaaccagacctagacccgtgatagtgatcatgattttgactcgggattcgggtaacgggacctggaacagaccattagtcggtgtctagatctgggacttagagtaggactagaacccagatgaagaaccaaac

SEQ ID NO: 57013 - DNA, 808 bp, Cannabis sativa
attcaagatacagcaaatttgtatataataataatcagataataattaagtgagtatacataattgattgatccataacaattatcttaatttaataatacaataccatcaactaatcttcctctctaaatctctaacttaggagcatttttattaatctaattattaaaaatatacaattatgatgaaataatatatatttataaagttagggagtagacttagcaacatacatgctcattaaaaactttagttaattagattttacacacacatagatgttaagctcattaactgttgatcactaacaatatgggtaaacacagcaaaaaactatcgaatcaacccatattttattaaaaccaataaaaattaatataagttcaaataaaaaatctaacataacactgtttcgctaaacttttaattctgattttagcttcttcctgagaaaactactaaatataacttctcttaaaagagtattttagtgttggaagctgaaatttattagttaccccaaaaatactttcggaactcagaatcctaaaagcctttttttttaatttttttatttaagtgtttatatattacaatgcataacttgagactcgaactcaaaacttccaacatacacccaccgtgtcctatgaccacatgagctagcctcaagtagttctaaacatagcttttacttgctataatagggaaatttgaaattccatgcttaaaataccctataattttccctaaatgtatagtcattaaaattggtcatatatgaccactttactaattttcctaaact

SEQ ID NO: 57014 - DNA, 2883 bp, Cannabis sativa
tatgaaaattgtcaagccattgtaatcaatgctgtttttttttaatatttgctgcaaaaaatgtcaattcaatattatcacaaaaatctcagctagccaagatgaaatgagctgctattgtgaactgaatatttccttttgcaagtttctgtttcaccaaaaaggccatcttgttctattgaatgggataatttacatctattttagttttttctcaacaacatcaatcacctcttagacttgttctacgaaatcctgaaccataagaaatagaattttttaaagttagtgtgttcaatagacaagatgcaacctgctcaatgaaaccactatttggggtggatttagttgatgtgatagttggcaggtaagatatgttagctactattgcagtagcaataatggttggagatgcatcaaattgagtggtatatgtatagttggagtatatagtgcagtgacagagggaagcacataagtggcatgattgagttttaagtacccgtgtttggtaatggtgagctccaggtccatggtctagaaaggagagaaggataagactatcaatcccaattatacaagattggagacaaatatttctagtaacaattaaggttgagcaaggcaaatccaatcaaaaatacattttccacactaggaagttgagcattttaccccgaggcaatggcttagtgagatcaggaacagttcaaactctcgtgaaagtgcccgaatcctcatttatggaggcctcgacgtcaagataggtacctacctgcttcctatcacaaccaccatgtttcttgtctcagaattgggtgtaacattttgtacagtggttatcgagtgcaaaattatttggtgaaagctaaagtttgtcaaaacaaaagaatttggcaaggttcttccctacacaacattcagggataagatacaattcagaatggagatttgatatttcaacaacaaaactaccaggccacgtggttatttgctagcccataatgtatgcagtacagctgaagaactcttgcaagtaaaacatttgagaggtagactttggatttccaatatcaaattcagagtctgaaattgagggtgtcagacctgttgatcctcaatccaagtaggaaagttttccacctgtattgcccatgaaggatcaaaccagtacggaaaagattgtaagtttcagggaagtgtagagaagaagatggtggttatggaggaagaaaactaaaagcaaactaggaacaaaagaacggccgtggagcacctgcattattgattttcatatatacaatctagtcactatgatattacaatcttcgacagatggatggtttttccattggagagctagattctgttgtgatcaagttactcagttgggtagatgcaaaaacacctattgccctcaaacttgaggtgttattggtggtgcccctgttcaaatcattggggtttacaacaacaaccattttatgacccttttctattagtaactccaggacacgtccaattgatgtcgaacttgtaacaaatggtggttggcttctcatcatagtccaaagtggtgcatctaactgccaaaacaatgacaaaaacgaaaagactcatacatacaagatcatagggttggattggataaagcacattttcatatcataaaacgtttcaaagtaagtttaaagtgtcaggaaaacaaaatgaaaattacctttgtgcagtcttctctgtgcaggagaccaatgcagctacccctgtcgtcaatgataggtacgattggatccttgaagaaacgcatgataactttcctcaagtgcagggtctcatgaagtggttttactgcttcaaatggtatcatgaaagtactgattgggtcctccagcatcacctaaacagaatatattaataaacagaaccaatgatgttacaaatctagcagtgacaaacacaatgagtatacttgcaaacctttttaatactttaaatacctgaggaagtagatatggactcaacatagatttagtagatcctgacagtgcttctattcgtaatgcaatctgcattacaattgaagggatacttgtgcagttagtaaagaatgaccattgactactaatatcgaattcattttcttgtgaactcaaaacaaaattgcagacaaatgcttggcaggatatcaacggaatattttgaatgcaatcaagactttaacttggccacaattgaagatgagtcaggtgaaaatgttatgtttttataaaacgtcaatccattattctttaaagaaaaaaatgttgccttgctgtttaacattttatcgttacataaaaaaagggtaaagagagaccacataccatccctcctctacttgtccatgatattgttttccattttctaattatttttgaaaggaaacccattgcctgatctacctggaagagaagggtgaaaaatgcatcagcatcacacataggagcttggccaacaaattttatcttcatcacacatgcaaattacaatttttttgcaccaaactaaccaacattgttgaaatcagcatggtagaaattgagaaaattcatctcaatccaaaaataaaatttaatacaatagctaaagggaaaactacctggccataatttaaagctgcttccataagaagatgatcagcttcttcctggagagaaggataaattcttccggcagtatctggccaaatgcgcttatgtagacttcttacaatatcataatctcctttgacagcaaaggaacgcatcattgaaagaaaaagatgaggcttcggtcgcaagtctttattccaaccagccagctttagcatttctccaaatatgcataaagcacctaacattttag

SEQ ID NO: 57015 - DNA, 969 bp, Cannabis sativa
attaaacacatatagagttatagaaaaccttacattgatggcaacagaataatatgactccttccgttcagatctctaacccataatcctttctgtcgtagagtatgaccaagatctgaacctggtttatccttcatgtgataagaatactgcacaatcttccacactatcttgagtattgacttaaattttttaggcaatcattcatatactatagggttcaaaaattttagaagaaaaagaaaagaaattcaaaaaaaaaaaaaaattgaaagaggctctctttattttctatttgtttgacaaagattcaattaggttaaattattatgttagaaaataagagtcatatcattctatttatatatagggttgctattagggttaaattaagaattaaaatagaatagaaaaagataaaattggctttatttaaaccgttatggctgaattcctcatggcctattgggtttcaatttcaccagtttatgtgaaacttatctttcttttctcgaatgcccttttttaattctaattctataaatgtgaattctatctatttagtaattataattaattatcaaataaaatttctatttaacttatttattagttagacctttcaaagtctcttaattagtaaacaaaccctaaaatctattttcttctcaaataagccctagcttagtgaaaactcataaataagacatagttttatttagaattctaattgattaataaaatcaactaattaagtctacaagataatattattttcaactagtgtggggactatgagcctatataatcaagctccaataagtagttctagaatttattgagtaaattctctatcttattaattcctcctaactccactatagattcagaattgcactcctgattatatagaacgttgtataccaagtataaatatgctataaattatctactttttcaatccaaata

SEQ ID NO: 57016 - DNA, 736 bp, Cannabis sativa
tatatatttttttactatgtatatatatgtttttttttttttttttgagttatgtatatatatgttaattgtgttgagttctatgtatactatttcttagtatttaagtatgttaaggaaaagttgtgattttaatttaatgagtgattaatttgttgagcaactatttatgtgttataaaaaaaacgagaagaattttcagcttgaccttaataacgaaacaattaggatattctctcttctaattttccttatactttcgtagtattcaccttagtagtgattttatatagtagttagtttaagacaatgaatgttatattatttttgaattatatatttaatctaacattaactaattaattagttaatgattaaattatcatttaattattttaaaaatattttgaaataatttttaaatgtttttaactattagcatcatttattagcagcggatcctactgctaataatatttttatttcgaaactgaaataaatatggcgaataatagtgaccaactattagtagcgggctattagcagtgagatcccactgtctttaactgcgattttttgagttattaacaatgaatttttccgccgctaattatgttaaatgttgtagtgatatatgcgtatccccataaggtaagttaaattagtttattttaatgaatatacatattatcttctcaagaaaattaaactgtgataaaattaaaaaaaaaaaaaa

SEQ ID NO: 57017 - DNA, 824 bp, Cannabis sativa
  modified_base (785)..(799): a, c, t, g, unknown or other
ttgatgcctttaatggtgccaaggtccatggccttctcgagaattcgagagagaatgtccgcggcccaaataaagaggtacggggacaggggatctccttgtcgtaaaccacactcaagagtgagactgctaaccttactcccattgagaaggatgtttaaggatgtagtggtaatacactaggagacccacttacggaataagtctggagctttaaagctactaagcacttgatctataaaattccaactgagcttatcataagctttaaccagataaatcttgatcgcaaaaaagccttccttacccttcttgcgtttaaacgtgtgaataatctcctggaccaacacattgttgtcattgatgcttcttccggggacaaaagcagcctgggtagggcagatcagtctagggagcaccgatcttattctattagctataattttagagatgaccttataaaccacattgcagagggaaacagatctaaattgggatactttcttagggttggccaccttaggaataagaatcacattagttgcattgatgcctctatgcatgtacctggatatgaagaaatcctccacagcctcacagaaatcattacttactgaattccagtaatgtttatagaacaacaatgacataccatcaggacctcgagcctttagactacttatggagaaaagcgtttgtctgatttcttcatagtttgggacaactaccaaatcattttgctcctggctagaaagtgttggaaatatattttaccaggaacttannnnnnnnnnnnnnnatgttgatttaacaacctaatattg

SEQ ID NO: 57018 - DNA, 615 bp, Cannabis sativa
cttgtgaggagggagagtataatgaatggagatgatagtaactctactttgtgttgtttggtattatgagtaaacttggaggactgatttttaaaaaaaatactatatttttatgttttatttataattttacaatctaaagtttttagttacaaaaatacacttgtaatgttttaaaattacaaaaatatattttgttcagcaaaaaagaagaaaataactaagaaataatgagaaagcaaactcatgacaacttaaaatcaacaataaaataaattataaaacaaccaaaaacaacctcaggcaactataaaataacaacaaaaaataatttattgtttttactgcaaaagtatttctgtaaataaaataaattcaaagcgtaaaaataattttttttctgtgttaacgtatttttataattttttaaaaaatttttatccatgtaaatttttcttaaaattacagtgacatcatttttagtgtaaatatatgatttgggtgttgtgttggtcaattatgtattgaaagtaagattttgtggtgagcatgcatttgttagactggggagttgatatatgcctccaactgatcttctttccctcccttctctat

SEQ ID NO: 57019 - DNA, 1700 bp, Cannabis sativa
catagaataaccggggcatcccatccacacccagggccttcaacgggttgatttgcttcattgcttgaagaacatcagctgctgtgaactcagtaagaaggctttcattttgtcttctactaagccgtgagggaaaaaatctttggaggtgagccattaagtcacacttggggtcttgggctgtaaagaggtcttgaaaatgctcacaaatgatctgttctatctcttctttagaactctgccaattcagattttgatcaaaaagaccaataattcgatttttcttcctacgagaggacgccttttggtgaaagaatcttgtgtttcggtctccatgagcaagccaaatcgcctgactacgttgtttccaaaacagttcatcttttgcaaggtatccattcagatctttctctctttcttttaggcgaataaatccttggtgtgtgtgatcccgagacaaagtttctaattcttttttttaactctttaattcgagattggctctctcttttttgttgtttgttccattgccccaacacgtctccacattgatccaatttgtttcttaactcagctgccgaagtaattaaatggccctcctcccaactgtccttgatgattttgtggcattcttccttgtcggcccaagcactttcgtaatgaaaacgatgaccccaaacttttttctggttgttgtctgttggaatagctttgaaggtcaccacaagaggacaatgatcagaacaccaacgacttaagtgtttaacttttgcaactacaaaatgattctaccattgattattagctagtacacggtcaagcctctcaaagaccatgtttttctgccttccattacaccaagtaaagttgttgccttcaaaatctaattcccttaaagcacacatgtctatagcattattgaagtttttcattaaataaccaggtttctcaccccctccttgtttctcattcatgtttctaatttcattaaagtcccctccacataaccaaggccccttgaatcttctttctatacgttgcattaatgtccaagagtgttttcgctatgatggatcgggatccccgtaaaatcctgtaaaccgcgttaaagtcatcttccatattgatccaagcatcaatatggaaatcattaaaagacacaatctgaaccgaataaggagccttccaaaggagggctaaccccccacttttgccttttgcatcaacacaaaaacagccctcaaaacccaagtgagcacgaaccgtttccatgtaagcacttctagaacgagtctctgacagaaaaaccaatcccgtatcaaaatctttgacatttgtggcaagagccgagacagtccaagggtttccaagcccttggacattccaaattagggaattcattgttctcggcgaccctgggatgcagagttcgccgcttcagttttttgttccacgggtgaatcactttgctgtgaaacttccctagaaagtatgtcgtatcttgatcctgtgttcatgttcccttttgtttgagtcttgctcccttttggcacaaacttctgtcgcttctctcggactcctttgttctgattagtaaatccagtttcaaagacaattggtacatctatgagtgtccctgttgtaatacccggaattaagaaatggattagcaaaaccctaactaaataattatgtataat

SEQ ID NO: 57020 - DNA, 1120 bp, Cannabis sativa
  modified_base (39)..(50): a, c, t, g, unknown or other
agattttaccttatgcaaaaaaaatttgaaatgtttgannnnnnnnnnnnatttctagcaatggtgaaaaaaccattaaggtaagtggtatttaaaccccttgatacgaagttaatccttcatttttccctctcatttttattttctccattcccgaagctttcaaaggcaaaaaacgccccttttcaaaaaaaattttgttcttcatcttttagatcgtcaaaccttctcgagacgatcgagactatttacagagagaagcatcgaatcccaaggttagtctttcgaatattcttttggaatgtttgttttatgcttaaaatttaaaactgctttttctgggtttttggtattttgagggggtttaaatacatcatgcttcttgttgtaggaagaaatgtatatagggctatgtttttctatacaggactaggtaatcccagaaaaatagacctaaaattgcataaccgtgaactttaggaagagtgtttgaataatcgcaatctttatccttttgaataacatgcgggtattcggatgaacacctcgaatactcgcatgtctgctcatcctaggtttcacagagactttatcacttctagtcgttgtttaaaaccttaggattttgtacttatattttgttgcgagaacattggctaagtcttccaaatggtgagcgtgtcacagtattccaaagctcatacgtgcgatcgtgtgttccgtgaagtactgtgatacgcccagccatttgtggcgtgcgccaatgttccaatataagcgtactctttggctggcagatttgctcgaaacagtgggagtatcccaataacttcagggtcatgcttgggaatgcatgcttcttgagtaactgggattctcccacccgtttttttgaggtaatcgccagctggagacgcgtgacataatcgcatgttgtaattagttaggttcctcgaaacggtgggtgtttcctagtcacttcagggtcatgctcgaaaacgcatgtcgcttaggttattgggatacacccagccattttgttttttagacatccttctcctcgcacacctgacttttcgcgttttggggggctgattagttttcgcaagaatccggatca

SEQ ID NO: 57021 - DNA, 799 bp, Cannabis sativa
atacacatgcatctgaccatagttcaggaccttcaatgaaccctactcctttcagaaataatcaagacacaccttgccaacctagttcagagtttatgggcgagaatgtgtaggctatctatatttagatatctagttttctactacactttatactctagttctattttatgaatttgtatgtgttttgctcttacatttaagatttagtgatgttttatatttttttccataactatgttttacatagttttattttttaacaatttagtgtttattactttttttgtcataataaataattaagatatataataattaataaaatattttaaaaaatctaaatagaattaataaattaatatttatacacataatttaatctttacccacacatgtttatggtttacccacacttctcaattgacacgtggcacatataaataatgacacatcataccacgtaagttgccacataaatgccaagttggaacttcgtatccatgtgtcatgccatgtgccatgccacgtaagatgacatgttggcaaaatagccacatgtcatgccatgtcacatgccaagtcatcatccacatcatcaattatatctaacctagatactcacccacacaaatttattatattttccttcacatatgtgtgtgggtaatgacatatctattcccctcatataatgtatgtgtgggaaatgatatttatctacacctacttttctacacatgtctacactttaagtatgtgtgggtataaagtttaccccacacatagagatgtattt

SEQ ID NO: 57022 - DNA, 872 bp, Cannabis sativa
ttaacaaatatacaaaatttgattctagtatatccagtttattcattcttttattttcttcaggttcatgttgtatgattaattatgtaatattctcaatattaaatatatgtctattcaaaattttattttaaaattgattaatctaaaaccctccattagtcacatttagttgattttattaattaagataattagtaaactcaataaatctcatggctaatcaagtggaatgtttgtaatgaaccgtttcatttcacattctttcctgttttaaattacttgtcacaattaagtgattcttttatttaagaatacataactaataaaaatatttatttctcgtttatgaaataatatcataatgtgtatattcttcaattaattatctctctttaatcttaaattctaataactctttcaaatggattctcctcttgaatggtcttttaaatatactctcaatatactcaatactcccactaaattagacagttaatctatctgtccactatccttgatcaattaagacctttcttaatttatgatttgaaatgtattacttgtttaatctcattaaacaagtatttttaaattttaacagataaacaattatgatatttaaataatactttgaatatattcttaaattgtttattcaatactttaataacatccctaatttctatgttgtattattaaatctacatttagtaatactgtttattagtaattattaattacacatatccactactttattctcctaagaatatttgatatctaattgttgaccgaggtttttggcaaccgataaaataataagaatttagagagctgtaagaaaataagagagagatttttacgtggtt

SEQ ID NO: 57023 - DNA, 4262 bp, Cannabis sativa
gtcttggttttgggtctcgagtcttgttccatgtttgggtctgagttcatgtctgggtttgggtccctagcctcggttcgggtttggatttaggtttgggacccaatccctgggtgggtctgcatttgagttagggtcctagtgtagttacagttttgggtctgggtccagctcctggtcctggtcctgttcttgtgtcccgatctgcttctagttttggttacagtttcaagtcacggggtacgagttcgggtcgagtttgggtccgagtttgggttgaggtcctgatttgggtctggggcgaggtttaggtctgcattttggtctcggttagggtctgaggttgggtctgggtccaggtcccggtcccgttccaagatctcgatccggttctaattaaagttttagctttgcttcccgggtgtgggtctgggtgtgcgtatgtgtctaggtcctggtttaagttcgagtttgggttcgtgttctggtccaagcatcgagtcccagatcccaggtcccgaggtgggtcttaggtcgaggtttgggtgtggggtcatgtctcgaatcccgattcccgggtcagggtcccccatcaatattcaggtcctagttcctagtctatgtccaagtttgtgtttcggtttggtttcaggtctcgagtcccgatctgagtccaggtcctgatgtgggtttgggtccgagttcgggtcccagtcacagtgtgggtccgagtttcgagtcccatgtccggttttggttcttaggtcctaggtctggccctagtttttgggtgtgggtctgggtctgtgtcccggtcttgctcttggtcacggtctttgtttaggtcctaagtcacaggtcccggtctgagtccaagtcctagtatgggttctggtttgagtttgggtttagattttggtcttattactgtcccaggtgtgggttctagtcctggaccaagtctatattccaggtccgggatcgggtttggatcctgatctggctctgcgtacggatctgggtccgggtccttgattcaaacattgactatgggtcaggacctgaagactcaggtccagattcagatctcgatcttggatctcagtcttgttccagttcaggtcccaagtcttgggtcgggtcttaagtttgggtttggatccgagttcgaggttttgtcctgttagttaggtccttggttctgggtccagagtcaggtctcgtgtctcgagttaagggtcgagctttgggtctcggtcctagttttggggcccaatttcgagtccaagtcccccatctaggtccggatccttggtccaggtctaagtccaagttcgggtttgggtttggggcccaggtcccccatctaggtatggatcctaggtcctggtctaggtccaagttcaggttcgggtttggatcccgactttgggtccaagtctcggtccaaatacgggttcaggtttgagtctgggtccaggtcccaatttgagtccaggtccctgtttaagtccgggtctgggtattgatctgggtcccaatcaaagtttaggccgcggaccaggttttggtcttggtttggatccaggttaaggccctgagtctgggtctaggttcaagtctatatccgggttcgagtttgggtcctgggatccgatctcggtatgggtatgggtttgggctcgtgtccaggttagggtttatggtttagggttttgggtttagtgtttaaggatttagggtttacggtttagggttagggcttagggtttaggggtaagtgtaaagagtttaggatttacggtttaggtttagggtttaggatttaagggtctgcttctagttctagttcaaattttgggtacgatttaaggttccagtttttgtttaggtacgaatcctggtctaggtctaggtccgtgtttgggttcaggttcgagtcttggtcccaagtccaaacaccaaccacacgttgagtctagttcgagttctgatacaggttcgggttctagtctaggtcttggtctaggtccattcctagatttagaaatcgactatgggtggggtctaagcctcagttcttgggtcctggtttgggtctcaggtccaggttttggtctaggttttggtcttgggtcttgagtcataggtctgggtcccagattcaggtcaggctcctacgtaccagtctaggttagggtccaagtctgagtgcaggtctcggtcccgatcccagtctgggttctaatcctagcccatgttcaggtctcggtcgtagtccgggtctgggtccaggtctaggtctaggtctaggtgtaagttcgggtttcagtccgtgtctgggtcctggtcttggtctgactctgtgtttgggtctcggtccgggttctggtacgggtctgggttctagtccacgtcctgggtcacaggtcctgaatttcgggttatgggtcgcaggtcctggtgcaagtctagctccaaattcaggtctgggtctaggttcggttctgcctctagatccagttttgggttcaggtgcaattcctgttctagggtcttgaatccgtttcttgtttcgattttgggtctcgagtccaacggcgagggttttaaaccaggtcatgtataggtcccggtctaggttcaggtcccagatctcaggtcccagtctttgtcaagatctcggtccaggttctggtttgagtttgggtaatggtttcggttcaattctggtctcaggtctgggtcctagtcacagttccagttctgattctgggtccgcgtttggttacgagtccgggtctgggtcaaggttggggtcggcgtccgagtcttagtctgagtccgggtataggttttttggatcccaatctaggtcgaggtctgagtccgggtccaggttcgggtcctaggtttcggttccatgttcgagtctgggtcaagttccaagtctcgtgtttcgatcccagtctgggtctgggtttgtattctggtccaggtttgggttcatgtccatgtccaggttcgaggcccaatttaggttagggacttggtctgggtccgagatcgagtcccgagttcgggtttgggttcaggtttgagtcttagtcctattctgggtccaagattgggtccgagcccgagttttggggctaggttctagtctagttccaggtcccggtctaggtccagtactggatctgttctaggatcctagtaatgttctggttcaagttttggtttgggtcccaagtctgggtttgggtccatgtccttgtccagctttgggtccttgtctgagtcctagctcaagacatcgactatgggtcttttccaaggcccggttcttggatcccgtgacaagatctggatcccaataaaggctcctagtctggaatcggttcatgtcccaggtctcggtttgagtttgggtctaggtccgggaccgcgacatgagtctagttctggtgtcgatctcagttctgggtcccgagtcctgttcaatgttcgggtctaagttcaggtctagattccggtcccgagtcccagttcgggtttggattcaggttttggacccaatcccagggtgggtttgttttcgagtccaggtcctagtctggtttcaattttgggtctgggtccaggtccttgtcctagtcctgttcttgggttctgatctgcttctagtttcagttccagtttcaaagtcacggggtacgggttcgagtcgagtttgagtctgagtctgggttcgggtcctcatttatgtccggggcgaggtttaggtttgggtttcagtctcggttagagttcaaggctgggtccgatctgggttcgggtccaggtcaaggtccctgtcccgttccaagatctcggtctggttccagttcaagtttcgattttggttcccgagtgtgcctcttggtcttggtatgtgtacgggtgctggttagagttccatttttggttcgggttctggtctaagtcctagatccaaacaccgactatgggttttgtcaaaacatcgagtcccgaatcacaggtcctgaggtgggtcctaggtaggggtgtacgtcgctcagtttggtcgggttatagcatatttttattaaccctatataaatatcgggttgcaaatttttaatcgtagcccgcccaatgaaaatttagaaaaagttcagcccgcccaatgattttgttggtttggtcgggttaacctttccaaaccgttcttttttttttataattgttattgttagttt

SEQ ID NO: 57024 - DNA, 1217 bp, Cannabis sativa
tttgattaagtggctaattgcttaattttgtgttaaaagttttgatttaccgaaattagtataaatttccaatgcacccccctcttggaaacatatcttgggctaacacttatctccaaatctttgaagcttgtattggagagaccgtaactagatgaggacggactagcacggagacgaggatgatcctcgtatagaagttgaagcagatcctggtcgatgcgatgttcgcttccccaaaactcactagatttcatctacaaaaggtaggacacaagatgagcatttggccgggctaacgaacagaaacatgttggttgtactgaccaggtccgataaaaaaaaatcaaaaaatagaaattttgcatgatattgaggtttgcaatctagaattttaaaagtttgaattaaaggttgattttcactaaaccccgaatgggtaagtgaaagtgaatatcgtggagccgaaatcaaaacgcagttatgatctaccaatgtgattaagcatagtcaagatttcaaattcctaaacctaaattttctatggttttcctagaataagttcaagaactatcaagttttttgcagcagaaactcaaaaaatctaatattcaagcatataagaggaaataaatgaagaacttactcattgttcgaagctttaggtctgctcggatgacgctagtcggtgtttcttgagaattctttgaaggatttgaaagaaaaaggtttcttgctctaactcttcaaaaacaaaaatggctaaaagtggttgattaaggttttcagccctatttataagcagattagtgaggtaaagtggtcattacaaattttaaatacctcgagtttcccccaaaagtgtacgctgtgcactcaattacctaaaggacaaccgtcgaaatgtgctaattctgaggcgtggttcgagggacctattagtcagcattaatgagccaaaaattgaagagacccttggtcatagtcacatcggatcatcaaccgacacttcgaacacatgccacctgttttagataagggtccaaaccaagtgaagtccacatgcgaccacaaaggtcctacgcagacttggggggcaaatattatcctattttttgcactatgacgtgactgaaaacataagtgagacgtgtcctgcattcctcgcatctgggcggaaatgaatatcccgaacagacttcatattatacatctgc

SEQ ID NO: 57025 - DNA, 1109 bp, Cannabis sativa
  modified_base (652)..(657): a, c, t, g, unknown or other
  modified_base (1055)..(1064): a, c, t, g, unknown or other
tctcttacattaacattgagagtactccaatatttaaagagattagaatatagttgacatgtttagctaactaacttacaaaaataatcacaacttataacttgacaataaaaactaatcgactgttaaaactaatcaacttataagtttgtgcagtgacaaagccaccccaatcttttcctgagaaaaaaaaaatcttactaaaaatattaatgaaaaatataatttttatgggaataaaaattatatcaaaataatggcatggttacttagttagttgtacgtcaaaattatatcaacgccacatgtgtaattaatttaaaaaaataatttttttttaatttaattaattttacgtacgtaattttcttaatcattaattgatttttagtttaatcattttttaaaaatacataatttatatattttttttaattttaattatacacgtggcactgacgtgataattggttaagcagtcatgtcatcatcttgtttgccacgtatgacaaaacttgacagctaatttagaatactgtcaatagttcagagactatttataacgggttaaaaagttaatgcataaatcacaattcgggaggataaaaatcctaaatagctaaataataataagggtaaatagcggcataannnnnnaaagttttaagtttgtaagcgacataaatcaaatgtttatttttaacaacataagtacccaatatatgtaaagcaataattttcttccaatttcgttaatacatattctattttgaatttattaaaagaacatttagaaataattgattctacatatttctatctagatacaatgatctataatttgagcattttatttatgtgccatatttaagacaataatagagtctgtactgataaaattaaagaaaaattatagttttacaaacattaatgggcactaattatgtagctaaaaataaatattagttttgtgccatttacaaacttgaaactttgtgtaacgtccccgcttcaagcctctattgggtctttacacccacggaatgaatggctcnnnnnnnnnngtacgccactctggctgctttatgaactgatgactgaccctacaa

SEQ ID NO: 57026 - DNA, 1052 bp, Cannabis sativa
aaagatatatccactatttttttcaatacatactaactattaattatatatattaattaaaaaaggtatattatattgatttatgaatatagtattaaaaaacgttaaggatttaaatattttttggttaaaatattgaaagttgtattaatattgtatcataaaaatagtaatacatcaatgactaatgttttataatgtaattagggaactaagtcgtgcttcgcgcggtgtggcctaacttttataatttatacatatattgtactttataatgagtgatataatctaaaatataatatattacggtgtatgtattataaaataaattaatagtattaaacttaaatatataatttattatttttaaaatatataaaaaaaataatgattttgtgataaatattatcattataatcattaaaaaaaataaaatttattatgattattttttttttttgtattttttttattttagaaattgatagtttaagtagttgttaatatttttactatataagtaaaatattataaatcatgagcatctcttattttctacttattttttaatgaaagtataatagtctgttaattcttattctatcactttaatttttcttattgcttcatttaattattgtatgttattaatcaaaaaataattaattaaaactcacacatgaataattaaaaaagaaaaagaagacaatgaccttgattaagacatacccaaactttttttcttcttgagatgatacaaccacaaattaaattatatataatatacatatataagtaaaatatactaatttacaataagcatatccatactttcagtagtttcatggcaacaattttttattaaaaaactaacttaatcaacatcatgaagacttcggttgaacatatgtggtaatgatggacactacaacgaatcgagattagagatagcaagaaatgtgagaaatatatcacaatagcctttagagtatcaattagcaaaagaaaaaaatagcctttagagtatcaaattttgtgtggacactgtcacg

SEQ ID NO: 57027 - DNA, 783 bp, Cannabis sativa
tacatgtcaatcaacatccaatctacacaagtgcggattttgaattttccaatccaatttaatccgaacaagtgcggatatccgcactttgcggattggatcgactattttatgaacaccctggagttgtataaatataatttagatattatattattaccgctaaaaattaaatttaaatatttatttgtaaccgagaattaaaattaaatatttatatagtaatttatcttttgtaagaataagtaaccatttacctattaaaagataaaaaaaaagaaattgcaaaagagcaagtaaaatcttccactctcgttttcttctctcaacacccgattcaactcacatttccacctcgccgactcttcccctggacttcaccggccgccgacttcgtctcttcttcaccgacgatcttccgtgcgtgcgttcctcaggtaccgtggtttatttttatcttaataattcttttctagatctgatctgattttcgtgtatgtgattattaggtatttttgttgcacaaattaatttgatgttttcttgagaaaatttaagtgaaatgtagaatttttttgtcgaattatctggacaaagcaatcgaattcggtaatttgaagcatatcaacatgcataacagggcaattgtgtattgaatttgaaacgtaccgataggatccgcttttgtatatttcgcctcgttgatttctttagaattctttttgtgtttttcttcatttcgtcgattagacagtttcattctctttttcttctttttttttt

SEQ ID NO: 57028 - DNA, 571 bp, Cannabis sativa
  modified_base (27)..(40): a, c, t, g, unknown or other
aggatgttaatgaaacatacatggtannnnnnnnnnnnnntggtaaaatatttccaacacgatcttttgccaagaatcaccaaccagaattctttgaaaaatgaaggtaccggtttctaactctcttttgtcttatgagtgtgtgaatctgatggataggattgatgaccaccggattgaatgtgattttaagggaaatggaggctcgggttctaagagaagggcggattgaggggttttcctgaataaggatgttgacatggagcagaatttggggaagagaattaatagggaaggtcctggttttcaaaagaatccgaagttgggtattcctgaagttggggtgagtggattgagattccaatcacattcaaaaatgaagttgggggtgacatctcaggcctgaagggtgacaggagaaagaaagtagtggcccagaagaataaaaagaatgccactaagacaaaccctcaatctttggcaacaaaagaggtctcggcagaaggcgaagagagaactggggaggtgatggtactagggggcttttctaacttttctaatttggtctctg

SEQ ID NO: 57029 - DNA, 623 bp, Cannabis sativa
tatggtagggatagttgtgattccactgctgatcaaaaacgaaagaccacctcagcatctggtggtttgggataaaacaagcagttttgtgggaaccaaggcagaggtggacgccagggttattcttaccctgagtgcccacgttgtacgaaacatcatccgggagagtgcaaatagaaaacatactttcactatggcatggttggacacttcaagaaagatttcccccaggcaaagaaagaagagcagaagtaagaagcgaaacccgtacctactcgggtgtttataatcactcaagctgatgctgcagccagtccttccatggtgacagggtagcttcttgtcaacaattactattttactgtgttatttgactctagagctacacactcatatgtggaaacactggtaattaatcaattgggtaggctttatgactttattgaaagagggtttggaactctactacctagcatggaattggttatctccaataggaaaattaagtctacgccagttagaatgaaagatagggagttgagtgtttacttagtagaactggagttagcagagtttgatatcaaacttgggatggattttctatctaagtattcggccagtat

SEQ ID NO: 57030 - DNA, 2099 bp, Cannabis sativa
ataccatttattttgagaatgaatttggaaaactgtaccagctaaggtcacctatgaatggaagccgattctttgtaagaattgcaaaggtatggggcatgagatacctgattgcaggaagagagaaagtaagccacaagaatgggtgattaaaaaggattccaaaaaaaaaaaacagaaggaaaggctggtgaaaaagcgtctgagaaagaattcattcaagtcagaaatggttggaaactaaaagagaaagagcctcctatacaaacagaaacgactaacactttcacagtccttgaacaagctgatgctactgctatggcagcagagggggaattagttaaaggcaatcaagagcaaaacacaagagaggggggaggtccctctcttgttcatggatagaatcatttgttggaacatccggagaatcaatagccagcaaaaacaattgaatgtcaagcaatttattgctctgcaaaaggctggtctagttggtctcctcgagacaagggttaagtcttcaaaacttggagacttataccaaagaaggtttcaggggtggtgtttcacatcaaatttagcgtggcataaaggtggaagaataataatggcttgaaatccgcttctttttaatatcactatcatcaaatgtaccagtcaactgattcattctcacattgagactttaaacaataggtataagttctttattacctttgtttatggtttcaatgatgaaaatgggaggaaagttctatggaatgatttgctactatttctagtcaggagccgtgggttatacttggtgattttaatgatatactatccaaagatgagagaattggagacaaggcaagagttagcacttctacagctttcttagagtgtgttaatgactgtcaaatttcagatgttaaaagcagtggttgttttttcacttggagtaataagcaacatgtaagtgatagaatctattccaagattgatcgggtactagctaatcaagcttggataggtttattcacaagggctgaagctctctttcttaatgagggaacttttgaccatactccggttgttctgaacatatatcctgctttcccttgtggaaagaagccatttaaatattttcgtatgtggtcctctcatcctagctaccatacggaagtcaagaaaatttgggaggaaaagatagttggctccaaaatgtttcaagtggtctcaaagttgaaagcattgaagattttctttaggaaattcaatagagatcactactctgatattcaggcagcagagagaaaggttaagcaagatttagacgaaatacaagggctctttcaccaaaatctgcttgatgtcaatctgtagaaataggagcaagaagcaagagaatttatatgggaaaatccgaaaagattactcctctttcttacagcagaaatctaggataagttggctaaaggaaggggatgaaaactcagctctctttcactcaagcatctgagaaagaaggatctgtaatagcattttgtcaatctgtgacactgcaggaagaagaatggaggaacctgatgagattacaaatgctttcttgatatttttatcagaaactgttgggatctaaaactgaaaatagaagagttgtagccaccaaattaatcacacaaggagcttgtgtaacatagcaacacactcagattttgatggctccttataccttggatgaagtcaaagaggctgtcttcaatattcctgcaacaaaggctccggggccagacggttacaatagttcattttatcaagacaactagaaattggtcaaaaatgatatcttcgaagcagtcacttcctttttacatacatgccagttgctcaaggaattaaactcaataatcattacacttgtgcccaaaagcaaatgcccaaatgttgtcagtgactatagacccatagcttgctgcaatgtattatacaaagtagctactaaaatgatttgtagtcgcttgaagctgattcttctagatattgtagctcaaaaccaaggtggttttataaaaggccgctatattgctcagaacattatgatttgtcaagattta

SEQ ID NO: 57031 - DNA, 856 bp, Cannabis sativa
aaaacacaaccaaaataaaatttacctcaaatattataatctactgtttttatatgatggtatacaccaatacattgtagttataagttatagtagataatttgtgtgtcaaaaatagatgttctattttatttttatatgcgtacaattatttattttaaattttatttttagtattataaattatttaattctcttttatttatttatttttttttgaaaaaaaactaattaatatttcgtataaaaaaatgacacatgtttctccaacaacaaaacaaaacacacattaaataatatttttcaaatttataatttataatttaaaataataatatagggacaccattaatcttttgtactagtagagataggggtgtgcataaattgatccaatccgataggaaccgaccgatccaattacaaccgaccgtcaaacattggatatccaattgtgatcggattggatgttttttttaaatatccaattggatcggatcggatggtagatgaggtgtctaacaatccaatacatctaacatccaatcaaattaattagtattttcatttagtttggatgagtaatcagattttatattgttatacgtaacatctctatgtatatataaaattaacattaaaattttacttttttttcttagattggatggatccagtctaatccagtagatactggacctaaaatattaaatgcatccgatctgatccaaaaaatacttggtctaaaatattgaataaacataaattagatcaataaatatatatggataaaaccgatccaatgactgaaactaacactacaacatttttactcagtaccggcggaagtaatacc

SEQ ID NO: 57032 - DNA, 1011 bp, Cannabis sativa
tttttttttttttttgagatagtggtattcacatagttgaatggtagaagaattgcattagagttttatagttttaatttattattttaggagtttaatttatattttattgaaagttaatgtgagagataactttgtcaaatttaataaaacaaaaaaaatatcgttaaactaaaaattattgttacataaccacttttaatatatatatagataaattattaaatatttttttaattcataccaaaaattataagcacttacatcagttgttctactttaatctttaatataacttagagcactcacagtaacttctttactctatccttcaaaatacttcattaaaacttcactttatctattttaccttatacttttacatttacaccatacatcagcctatctataatatctttataatgatttattttaatatttttatttattttaaaaaataaataaataaatataataatttcacacatatatattacaaaatagtttaaaaatattaatacaatatttatagcttaataaataatacttttctacatgtagttaagtattattcatgagctaaatctcttaactataatacctcatttaatggagcaatatttttcatcactttttacctcttagctaaataatttaactattagagctttcccatcgattgaggtatagtagctaaataactaaaaaaaacagctaaagaatcctatattaaactacattagttgaggtataacaaaatgtaaaatagagaatactattttgtagctacatatacatgtagtgatagaatatatatatatatatatgtgaggtataattgttttaatcattttatgtcaatctcccttctttattaaatattttgtttatttcttttatattatttaattagtaaaaatatttcaaactagattatttaaatgatatagagaaaaatataaagaatctaatgtatggtgtaacgtaaaagtatgaggtaaaataaaaaaa

SEQ ID NO: 57033 - DNA, 975 bp, Cannabis sativa
  modified_base (928)..(941): a, c, t, g, unknown or other
ttttataaaattctacatagaaacccctattgcaactagtgctgtcacaaaataaaatttttaaaattaaatatcattatactaaattataaggtctaaaatggtataactcttttataattaagagtatttttgttatatatttaaaaatagaatatttagtatttttgccctcagaacttttttacattatcaagttgtgcctcctatagtatatgaatcattaataataccctttaaaatataacttttacggtaattaggtccttccatcatattttatttaattttatcgtgaaatgagtgaaacaatggatagtaattaaatagttttgactctttttatttgaatgattgaaaaacgaaaaatacaaatgtaaattattataaaaacaaaagtattttattctattattcattaacttaaaaaaaggtaatggggtaattaatttatatttatttatcaactattatccaccactttattcatttcgcgataaaattcaataaaatgtgataaaatgactatgtcactgaaaaaactatattttgagtggtattatttacaataccattcacttttattctttttcgaatttattttgagttctattcttttctcgggagtatggtatgggctacttcagcgtcgtagtgccttggtactagaacattgactcgagacattttttctaccccctcttaccctgaaaaaataggagcaccttgcgtccttgaaccgataactatctttcgactaacctagcctcctccgtccctcgggaccaacaaggggtaagacagtactataagatgtataacttagtagtgtaaaatattctagaagcaaaaatattgattatttttaaaaatattttaacataaaagtcttaaatgtatccttgattatttcacaaatacacaaaannnnnnnnnnnnnnacaaaaatacagtttcacagaattttaaacattt

SEQ ID NO: 57034 - DNA, 1484 bp, Cannabis sativa
aagtaaggacgtcaccatcaattaatttatgattctttttaatatgaagaaagagtctatatattcatcaattttataataatactaaattattgtttcgttcattgcattgcacgtatatttagttataattttaattttaatttttgttatgtgtatttttaaaattttataaattaaagaaaatcacttattaattaattttgtaatttttttaaaaaataatatttaaagttttaaaaaattaaaaaaaataaatataaaatttaaaaatattaaaattaaacatactgccaatattaaaaataacaataaaaaataataatattataaataatatattaatatctatatatttatttatttttatgatgtgaactcttcagcgaaattcttgtattggataatcgtaataatactaaaagaagacgaggatcgatctcctgataggctacaagagatattaactctctactcattatttatatttaatttatatttattatatgttgagatcttattagacttatagttcatattggataaaactatttttatcaaatctggttatgttttttttttaactttaatatggacaatactttatttcacattatttattctttgtatgtatatttatataattttccaaagaataagattctttttgagtattggtacgtagtatatatggtgtctagcactacaataaagtgtcactctataattatttaacaattttttatattatttattaaaataaaataagtgtgtgtcacccaatattgatattgaattggaacaataataatattacactttataaaggtgctaggcgcaatgagtatcctctagcatttctattttttttaggtgtgtttttggggtggtattaaagcagccaccaaacctagaaatggagagttgatataggtggtagtttccaagtgggtgtagagtacttggatctcacatcactaatctattgtcactagaattagggtctcaaccaactacattgggtttgggtttagtttattgattagcttgatgagaagtagctagattgtttggccttggttccaatacacctttagttgggtgaactctcaaagagggaatagaatagatgagcctagctatgtggtgtactactagttgactagctagctatacctatctcctcccaaatccaaccatgtatatgatgtattgatgggattaatctttcccaattaatatatagtttagtccacctaaaagaaataaaataaagatactaaggggcaattttatttctggtagaacatggaagtgtgtggttaagaaatataggatagatagaggtagtataaaggtagtgtacggtaataaagttttaactcaaaattatttaactattaaaaaaaaatagcttatgcattatatacattattaattattaatgtgagactctctaataattatttatagatttttttttt

SEQ ID NO: 57035 - DNA, 1386 bp, Cannabis sativa
gggtttttaatttcgcggtgcgggtgcagtttgggaaatttgaaaaaccgcatgtgcgggttggtttgaaaaaaatagtcaaaaaccgcaccatctgcaacgcgaacacccctactatttgggataagttcaaaaatactttttttatccatcaattaaaaataccctcttattatatttcattaaaatgtactcacttttattagtgggttgcccaatttaccttcactctccacttaagtctagtacataatttttattaacttaaagggtataatggagatatcatctataaaaatgggtatatctcaaatatagaaataaaagtaaaaattaaaatatgtaaagtaaagtgggtatacaatgtaacttctccttactattttggtaaaattttgtggtttttacaccacatgctgaaatttttaatttttttacctttttactgtggagcggaatgttttttaaaaatattgtataagttttatactgtgtattgtgttaagttttcaatattgttccacgattattttttagttgtttcattgttgttttaattattatgttttgtgttttacggttattttataaaaaagatagtatttttgtaaaaaattatgtatgatagtaaaattgtaaacttttatctaaaattcagcatttttgtaaaatttcctgaaatttttagagtttaaagattttattttttacattcatagggtattcataaaaataatacccagacaaaaaaaaattcacataaaaataataagaaaacaacattcaaataatatcaaaataacataaaaataatatacaaataacaaagaattaataattaaataacaaaagtacaacataaaaaaatatcaaaaaaaatatattttacgtaaataaaattttaaaaatcgtaaaaatatttaaatttctgtacaatcgtaattttgtatttttttttgttgtttttaatttttaaataatcccaacaaagaatcatgtaactcaataacacaaaattaatgggcaatttacatgatatttttatactttatacgcttatatttatatttatactgtctattttatatattgtatactgtatacagtatgaaattatttatattcccttttttgctatttgtcaccttaagaagtttttgttttattataaaaaaataataataaaatttgattttaattgggcttgtcatatgagaaaaaacaagacaagatacagagtaatttgctctgttttagagaggaaaaatgtatattaaactgaaaataaatgtttattacatttgaggccttatatataggcaatctattacagtagtctcagctcaagagagcaaccaatataacaaacttataacagaattccta

SEQ ID NO: 57036 - DNA, 525 bp, Cannabis sativa
aggggaagcccttttagtaacagagtgaatgtagctctgaaactcaaaggtgttgaatacaaatactatgaagaagatctgaagaacaagagtgcttcgctcctcaaatacaacccaattcacaaaaaagtccctacctttgtccacaatgaaaagcccgtagcagagtcacttgtaattcttgaatacatcgatgagacatggaaaactcaccccatcttgcctcaacacccttatgaaagagctcaaacccgtttctggagtcgtttcattgaagacaaggtaacaattcttccaataatcaactttttatgaaactcatatcttgtaccctctttaattttttgagcttcaactttcgtcgaacaccttatgtgtgtactgtaaagtaacaatttgacgttgaatatgatcttttcccagatcgtaacaacaataattaaagttgttaaggtgaaggaggatcagaaaaatgcattggaagaagtaagtgagtatctggagatcttagagaaagagttgaaa

SEQ ID NO: 57037 - DNA, 760 bp, Cannabis sativa
  modified_base (230)..(230): a, c, t, g, unknown or other
ccaagatgaacgatttttcagtttctcattaataatgtttttttttttaagcaaagaaagtatatagttattgtgaattttaaggtcataataaaattggtaaaattggggtgaaagtgagaagaacaaatgattttgaaggtggtcaactctgaaacaaagaaatggacaaaaaagttgtaattttgtatagtgctgatctgaaatttaaaataaaacattcagacttngttgaattgttattttgtctatgctctgcaccctcattgatttttgttctgccttcacttctttatgcaactctcttttatattttatttatattatatctataatacaaaaaactaattttgacactaattcattccaatttaatgtatgatgtcaaatgctagcaagttcattccaacacacaatttaatatgtgaaaaacacaaaattatatatttacaatcaaatatgtattctgatttttcaactcatcaaattaactatcatgaatacatcttttgaccaagttaattagacaaattatgggacaaaaatgacctaattaagtcactggtttttgggttacctttaactatgaaaaatgaacaataagagaaagttaaaagacctgagttgctgccgttagtgagggagaagatgtgtcgtcgttggggagggaggagctgtgtcgcttccgttgttggtgaagatgtcgtcggagacttagggaggagatggccgtcgtcgtcagcgagtaggggagaagatg

SEQ ID NO: 57038 - DNA, 973 bp, Cannabis sativa
acacaactaaaaataagctttagatgcagttttaggatcttcagcattaattttagcaaaatttactatcaacgctattttaagtgatgtcgtaggggggagcattagccgacggtataaggggagcctgtccccagttattatgcaataaccgacagcatagggagtcctgttgtataatgcagcctctatgccatcaactttttgctaataaacgacatcgtaatgttgtatcgtgtcggttattagcaaataaccaatataaggggttctgcatatttgtattttttttatgaagaattttctattttcacatatttatttttattaatttatttaaattaaatattaatttaatataactaaaaattaaattaaacataaaactaaatgtatatatacacagtattgtaagtaaatatatcacacaaatattttaaaattagtcagaattcttacaagttattatctaactaaacatagaaaaataagagaaatgtttttacaaattatctaattaaacatagaaaaaaaagagaaaaaaattcgtatacaattcaacatcattgcaagccttcgtgcatcactgtaagtttttgtgaatcaccacaaataattattctatccactatcgttgtaacagtacgactcaatttttgcatcgtgtgtcttcttttccccaaactgtaaaaagaaataaatatttttattagtatatagattatattatttattaataaaaaaataagataattaaaacttacaacttttacttcggttaagtatctgttaggatttgcatatgtgataatgtcactgttgtatttcaatacacaaaaatcacatttttagtttttaggttgttttgggtaatttgctactaatattcctggatatgcctcaatgaatgcatttgacctccctaacgtctcctatgctctatttgtaaaattatattaccaattcaattaat

SEQ ID NO: 57039 - DNA, 1928 bp, Cannabis sativa
caagaatgcgacattttgcgagttaaggtacctgatccacttccataatagtattaaatttttctaaatagtctatgggattagaggtacctttgtattttaggggttcagataactggaaccccttggggagtcgagcttgtcgcacttctgcactgaagggagaggtcccatgcagtttgtatatgggctttctttgctgctcgagcattttaaggcctgcagaagcataccttgatcgatattcccagctaggggagtattgacttgtgttgtcgcaggcgttgttactactacggcgatgtttgctgggatattaaccctagtagccgcagctggtgtagtaggcggattgatgcgattatttatacccggatcgcccattcggggatcacggggctcttcgacatcacgaggcgcctgggagcgcgctctgaagatagcgttaaggtgatcgcgtagatcgccccaatgaacatgatatcatcctccttgcggtgtttccaccgaagccgatctagtgtacttgctgggtgtgccaccatgcgaggatgaggaggcagattcaatgtcgttatctcacgactgaggtctgctatgtggattgcgtcgttcaaggccttccttagtctttgcctcctgattgaggtgtcttgcggattggtccctcgacgttggttggttcaaactaagtccctctgggttggccctccgttccctacgagtacggttattacatcgtctagagttagttacctaaggattttccgtgcgagtagcgggtactcgaggaggacgtcaagtcttgttttgtacatccacctcggcctgcagagcacgtagctggtcttggagtgtagtgtactgatcggtggttagttggataataccttcggacaccgccgctggagtaaaaggtgggaaatgtcttattgtggctgccggtgtagaggtttccccagcgtgagggccagtagtttcagggaataggttgagaggtcttacattaccccgacctattccgccgttgatgacatctacgggaggcactcagcttcctgacagtggaacgttcatcattccgatattgatggattcattgttaagacctctgtttgcttagtttccagccattgtgattctctctctaaattagcaagaaagtacttctcatttcccatagacggcgccaaatgttgttgaaggaatttcacaacaccaattaaataatagcaataataattataatagtaatatgatgagtaagtgcgagtattcaacctagaatgacgagtactcgaactgggaacacaaatacttaatgaaaactggaaatacaaagaacacggggggaatacagtggttcagtcagatcacggtctgcttagtccactgttacaaggattctctaggtgtcccatttctcggtggatcactcctttatatacaaagcaagtgtccgattatttacacaaggattgcattcattgtcaatccgtttgtacattgatttataataattaagctaaaaaacgtaaacactaataaataaaaaatagtttttattcactaaatacagcaacgtatgcgacttctaatgtgcgagttggaagttcatattcttgcataagctcgtgggcttagaatacacctaacacttagttgagtctaagatgtctgcgttcttgtatagtcacatttacggacattgtataacgagctgataaaaccaagacatgcgagtctatatcaatttatcgaggttattgggtcattaggaccaactcgctttatagagaatcgatgtccatgtttttcgcaggaggatcgagaggatactcgcatatatcgtgatatatgcgagttaaatccgttccttggtcctacataatgcgagcctcacaaatgcgattagacttggtcgtatt

SEQ ID NO: 57040 - DNA, 2438 bp, Cannabis sativa
tctcactctctctctctctctcttgtttttttttatatatgtctgttcggcccatatggcttcagaaaatgcggccaagcagtttttaaactttgaatatgtttttcacttttgagacaactggctgaccgggtagcctttaatcctatgtttacatgctttgttatctttaatgaatactgttccttgttatgatcattgtgcaactgcatttgttttgttttttcatgcttgttatttgcttttaccaatgctttgtacgagtatagttgccccctaagtgaccgagcagacttttgactcttggtcacttgcatttcacaagtatgatttttgcctgttcggatatatgggttcaagcagacctttgtacgcatttaatggtaaatttataacttgctaataaaatagatacaatttgaatttaaatagacatctttattcatttgttggtcggaacacacttgttaccgtagtaacttacataaaagctattatattgatctaacccggcctttagcttaatttaaacaaaaaaattgcattaaatagaaattgtactttcagaagtggtcatctaacctgattactttgtcatttcaaccgagctactttttgttgatgggctaccaactttaggttagatgcaactcctttttcttcgatttcatcaagtgattctgctaggagtgcatggtttgtttcttgatcataggtcagtcttctgtgagatggaggttctaattctacgggcagcatagcttcataaccgtatgccatagcaaacagagtctgtccggtcactattttctcaattgtgcgataagaccataatacttctgggagttcttctggcccgttccctttagcatcttcaagtcgtttctttaaagtgtctttaagtatcttgtggactgcttcgacctgaccgttttcttggggatgtgctactacagagaaactctttatgattccatggtttgcataaaaatcagtgaacaattgactatcaaactgtgtgccattgtctgagactattttgtacggtagttcgaattgacatattatatttttcaccacaaagtcaagtacttttttggatgtgattgttgccaatggtttggtttccgtccatttagtaaaatagtccactgcaaccactgcgtattgtactccccctttatctttaggcaattggccgattagatcaattccccaaatagaaaaaggccaatgactttgcatctgagttagttcgttgggtgtgcatgtggtatctttgaaaatctttggtatttgtcacatttcttaacgtaggcctttgaatcttcaatcatagtcggccaaaaatatccttgccttagtattttctttgacagactttgcccggccgcgtgattgccactgaatccatggtgtacctcagacagaagccgtgtatcctcttcttgcgtaacacatcttagtaatggcatagagaatccccttctatatatgactccttctacgatgatttaacatgcagcctttcttcttatttttcgagctttgtttctgttacttagaagttcctcaatgttgaggtaggctgctattggtgtcatccaattcggagatgtgtcagtcatcttaatttcttccgtataggtgatgctgggttattcaaggaactgaattgggactagattagccttataagttatattgctacttccaagtcaggctaaggcatgagcaattgtattttcttctcttggaatttgcttgaggacataactcttgaattgtgcaagaaggtcatgtatttttcttagataggctatctcaatgtgttcggcatgtaattcctgagcaagttttaggccggcaatgaggccttcatattctgcatcattattggatgctctgaacttaaatttgattcccccgtgcaagtgttgcccccaggtgtgacaagggcaatccctgcaccagacaattgatctgtacccgacccatctacgggtaatttctaggtaggtttgtcttcgttgttgctcgactggggttcttgtattggctccgagttgtttttgaaatgctttcttctttgcccgtacactcaactacaaaatccgttaaagcctgtcctttaattgttgtttggggtcggaagatgatttcgtactgacccaattccactgcccgtttgagtaaccatccagaggtgtcacgtttttgtaatgcttggcgtaatggttggtcagtgtacaccctaacaggatgagcttgaaagtaaggcgttagcttccttgttgctaagattaggcagtaagtgagcttttccattagtggatatcatccttcagcctcaaccagtcttttgctaatgtagtagaccggatgctggatatcgttctcttccttgatcatcacgacacttacaacatgttctgtaa

SEQ ID NO: 57041 - DNA, 1262 bp, Cannabis sativa
  modified_base (343)..(360): a, c, t, g, unknown or other
actttaatctatttttcaaaatttcaaaatatctgcatttaaaataaatgcaatttgaaagtagtgggaaaataattaataaaataaaataaaaacatattttgagaaaaaaaattattttaatttatgttgttctaaaatcaaatttccaacttaaatataactttctatttagttaaatttcttgaaaataactaatatttaagtgtctaaaattagaaacaaataattaggtatcttgaataaaattaacttaattatttattctaattttatatttaagaataatatactaatttaagttggtcaaaaattaaacaaaattaatttttaacttaaatannnnnnnnnnnnnnnnnnaatattagaaaatataatttagttactagaacttactatctagaatatatttcattaaactaagtatttttctaaattcatttaaaaaaaataatctaataataaattaattttattgattttaaaattaattatattgctaattcaattttaatttggttaaactaatataattgacctaatactattagttaaataaggtaaataggccttcaaaattagggtgattcatgtgaggaggggttgagtttagtatatcgtacccactactatggccccctaactctcacgaaaggcccaaaggagaggaacttaaccattaattaaatcagtattattcattgaataagtccaaaaataattgggcctaaataaaactatcaatgtgatatttttattttatattttagcaacctagtctgtttaaacgtttaaacataaatatgcttcctatatgcatctatgtccaaaagcaaacatataggcttacacaggtcaaatgatttggatgagccctatcatgttactagatttatcacagatgaaagaaattacaaaatttacctggtacaatttatttataagatctattgacaattagactatcattaaaacaatattagaagatggtatgattaaaaaaatattagaagatagtgtgacgagtcaagataatagaaagcgaggtgtttatctcgatagaagattgtatgcatgcgaggaagatcatctcgacactaggaaagatagttattagagttaaaacaacattagtatcgagaagccaaatgactagcaacggttcgctatcaaagttaacttggctccattctcggcaaggcgtccctatgagataaggcttaccctatatctttaattacgcgttcatctcggcccaataa

SEQ ID NO: 57042 - DNA, 1003 bp, Cannabis sativa
atcctacccacacaatcatgcatagaacaacacaaatcatccaattctcatactcatgcattcacaaacttaacaacaacaagaacatgttttttaagatttaattatcagcacttaaactcagcaagagaattattaaaagcttaccacaaattccaaaagcttcaagccacaaattacaccaattcatgctttgatttgaagatcaagtttcaagaaaatgagaaaggggaaggggaatggggtcggcgaagggcttagaaaatcagaaattaagtttttaattttacaaaaattcaattttgttgataatatcaaatatggtcaaatgatcaaaatgcccccaaggtcaaaataaacatacatactcatagagggcaaacttgtcatttcacccccacacacacataacatataaatttcagatttctcatttatccaaataatgccaaaattaaatcccaaaaatgtattttgggctccgaacccggttcgacccaaaatacctaattgtgattatactgcgccgacttgtcaggaaacacctgcagatagacagcataattcatatattaaattatataataatataatttctcattaatacacatttaactagttagggtttgctaatctaaattcttaatcttagggtattacaaacacttcctaccatacagcatctcatagggagacattcctacgtactctggtagctattattgtaggaaaattttatcaaaggaaagtatttactccatgaatccttaaagtccatgacataggctcgtagtaagtcttctaatatctgaatggttctctctgactgcccatcagtttgagggtgtattgtactaaactttagttttgtacccatagctctctgaagatttacctagaattttgatgtaaacattggatccctgtcttaaacaatggatttaggagctccatggagatgaactatcaccttcacgtatagctctacatactgatccactgt

SEQ ID NO: 57043 - DNA, 1240 bp, Cannabis sativa
  modified_base (401)..(401): a, c, t, g, unknown or other
atatgatttttttttaaaaaaaatcatatttttagtttgattgattagataatgatatatttagtggctttactttttatgccatatttattatctttaatattttccccatatttttgattttttttttcaaatgatagtgtgttatatatgtaagcatcctatatgtttttgagaaattataaataatttacaacataaaaataaagtttaaaatagttaggtgcactcgtataaaataaaacaggatacaactttatttgaaggggttttcataaaaatgctaaatcataagtaaaagtttataattttgctatcatacaaatttttttttacaaaaatactatgtttttataaaataatgtaaaaaaacaaaatagaacaattaaaacaatagtagnacaactaaaaaataactgtgaaaacttaatataaaacttacgcattatttttaaaaaaaatacaatatttttgaaaaaattctgcccagtaaaaaagttaaaaatttgtgtaaaagtccattattacaatcatattttctaccccttaaattactcaaaaaaaaaaaaaaaaaacgaacaacctactataatctatagctaattaatgacacctaagaattttcctatatataaaaaagcaaaaataaaagccaaataattttttcaaaagaaaaaaaaaatcacggaaattgaaactaactttaccttaaaaaagggaaaaaaatattacaagtagttattgataatttttctataattttttttcttttcttttttaagttgggaaagagactcatatatatatttactcggttgttttgttgtactccactctccattcaatctcaatctttgaattttgagccttcattctttctacttcaacaaactgaaaatttgtaagaataatctaactttcacttcttcatctctctatgctgatcaaatttcacttttggaatctatttatttatttttggtaaatacttagaaatgtttaacatcatgtataattcatttatatatttgttcaataaatgtttgaccattatttctttagtatattgtgctttttatgaggctttgcttttgttaaatgaaatttgcataaatctatgtatgtttaatgtgttatatatatagttaattaataagagctaagccatcacataatgcagaaaatgaatattcttatctgttatgtatatatctcatgcgtatatatataatatatatat

SEQ ID NO: 57044 - DNA, 960 bp, Cannabis sativa
aatgttcaaatcccatggaaggcttaaagacagttgtcaacccacgaaaatagcgatatattatcataaaaatcaaacttcaattacctccaaaaatcaaggagattgttgaggtagctccgcattggttgcttctcctgaagcgagaagcaccgaccctctcccctatataaggggtcatccatgacctgagagggggatacacaattttgaacacttagaaaaataaacacttttcattatttgcaatcaagagcctgttcttgatctttgcaactcagattaataaaacacaaggggagtaggctattaccaacatcgaggccaaacctctttaaatttcggtgtcttttatttacatttattgtaaatttcggtgttatgaactgcatttattactataattttagtttaaatctcatttattacgactccgcgtcggttggctaaaaatctagtcaacggaacacaaagtggaccaaatacaaccaagaatgtgcagatccatacaacttacactaaatataacaaaaaccaataatatttttcataaaaagaacttacctattgcttttgagtgagaacaatgaatgtggaggtttgttgagtgtgtgggaggtccgacctgaggactgaggtcgtggtggagaaataaacgtctagcttgaggtcttacgttatgatgagattcggctgagagagagagagagaaatgaatgagagttttttttagtttagaagtagagtataattagaatgaaaaagaattaaaaaaatgcttaattttttttttttaaaatggtaatataattataaaatttgtgtaattttttttagtataatttgtcaaatttcccttttattattcttattacaataaaaagccaaaggtccaacgacaaataagagttattaaggggtgcgtgtgcgggttcttatatacatttttttttttttttt

SEQ ID NO: 57045 - DNA, 1552 bp, Cannabis sativa
aaaagatacttttctaatccttgcgaattctctttatttcataggtacttgggcagagccatttcttccagttagaaatgttactaagattttttacaccgtagatgggaaaagtgttcaagtttcctacttgactgagtattgcttggtctattcttatagatcctctcaaggatgcaagattcttaagttgccttataatgttggcaatcaaaatgagctcaacttttccatcgacttttttcttcgatcctgatgagaaagatgggctgcatgagttgatgaaacaattgagttcagactcagcactattgagtctacacttcaaattcaatgagaatgcgaaggataaagattccaaagttcaaacttgaatataacatggaagtttctgatatgatggaccgatggggtttaggctgaacattaaggacgcagagatgttggaagatgttgatcccaatgcattcactaaggatatgatggtttttcaaagttgtgttgaaattggtgaaaatgaacatgaagctatagctgttcagacgttgataccagtactagagattgttaatcccctccttcaataaacttcaattcagtgcttacttaaggatatacataactttccttgtaatttttaaggtaggcttttgtttgatcaagattttgcttatcattgcccatcaagtcgtgtgtcatcatgatataatgtctcaaaattatagtttattaagtcaggttgtatggattggattgaatgacaactattttggagaagttgtttatcattgcccatcaagtcatgccatttttaactcttgaactatattcattaactggttggtttttatgggatttcatgttttgtttagcattgatacgatctttattgtgtttctagaaattggttcatcacactttagtgttcatcttcctttatgtgtacattagtttagtaaatgattcctattttcattgcaaatcggtaacaccaatacgaatcaagatctcctgtccaaatattgtatctagggttgagcatttggcctactgggccgaccaaactggcgaacccagcctggaatgggccaaaacatgctcaaatttaatgggccgaaactctctttggttgaaaaatgcccaacccgtcacttatgggttgataatcgggctggagggattttaacccaatgaacccaacccgggtcgtaaagcccaataaaatttaaaaaattaatttacatttgaataattataaggaatcagatcagcagccacacttgtccaaaccctaacacagcagccacactttttttttttttttgaaaaaaagccctctccactcactctcagccgtcccaccaccactgtataggtctcccacccgcaccaccatcttccagccacaccacgccaccaccgtcttgttctcccaaccgtaccactctgttttcttcccttcggctccgagagtggtgagtacctccattgtaacttttaagaacttctttatattttttctctttgttggaagtaaaagtttttaatgtca

SEQ ID NO: 57046 - DNA, 1247 bp, Cannabis sativa
  modified_base (502)..(504): a, c, t, g, unknown or other
cattacctatatggcgagaaatgtgagatatacactgatcacaagagtctgaaatacttctttacccagaacaacttgaatatgagacagagacgttggctagagttggtaaaagattatgattgtgagatcctttatcacccttgtaaggtcaacgtggttgctgatgccttcagcagaaagggtcagagtctgttgagcactgtgaaataaatctcccaacagctagcaaatgagatgacccgagctaagatttagttggttgtggggcaaatggctaatattaccctgctatcaactcttttagggcaaatcaaagaagtacaaatgaatgatccagaattagtaaaaacctgagctaaggttttggctgggaaggctagtgatttcacagtggatgaaacaggaatgttgcgatttggaaatcgtgttggtgtgcctttggatgagaatatcgaaagagagatcatgaatgagtctcatacgactccttactcaattnnnccagggtcaacgaagatgtatcaagacctgaaagccatgttctggtggccatgcatgaagaatgacattgctaaatatgttgcaaagtgtcttacgtgtcagcaagttaaggctgaacatcagcagcctgtagggttgctacaaccactgaatatactagagtggaaatgggaagacattgctatggacttcgtgccaggtttgcctagaaccacgggacagttttactttgtgtgggtcatagtggacaggtttacaaagtcatcgcacttcttacctattcggacgaatttctccattgactagtatgctgagttatatgtcagagaaattgttcgtcttcatgaggtcccaaagtccatcatttcagatagagatttgaagtctacatcaagattctgggagagtctacattgagctatgggtactcagttaaaattcatcacaacttctcatcctaagaaggatgggtaatccgagaggattattcagattttagaggacatgcttcgggcatgtgtgcttgactttgaaggatcatgggtaaagtacctacccctgatcgagttcttttataacaacagctatcatgcaacaatcgggatggccccttacgagcttttacatggaaggaaatgcagatcaccaattcacttggatgaagtgggtgaaagaatgttcttgggtctcgaggctgttcagagaacaagtgaggcagttgacaagattagagcgcgaatgct

SEQ ID NO: 57047 - DNA, 724 bp, Cannabis sativa
ttgtgtcagataagtggcttggagcacaaactgttttacctgtttccttcagacacctcatcctacctgaaaagtatcctcctccaacagagttgctggatttgcaaccattgcctgtcactgctttgagaaattcattatacgaaggcctttacgttgatttcaaacatttcaatcctgttcagactcaggtcttcaccgttctttacaattcagatgacaatgtattagtagctgcaccaactgggagtggtaagaccatatgtgcagagtttgccatattgaggaatcatcaaaaggggcgggatattcgagcagtgtatattgcacccattgaagctcttgctaaggagaggtaccgggactggaaaaacaagtttgaggagcgtctggagctttctgttgttcaattaactggggaaacagctgcagacttgaaactgatcgagaaaggaaatattataattagtactccggagaaatgggatgctttatcacgccgttggaaacaaaggaagtatgttcagcaagttagtctgtttattatagatgaacttcacttgattggaggtcagggtggtcatgtcctagaggttattgtttctaggatgagatacatagctagtcaggttgagaatcagattcgcattgttgcattatcaacctctcttgcaaatgcaaaggatctaggggagtggataggagctagctctcatggcctttt

SEQ ID NO: 57048 - DNA, 962 bp, Cannabis sativa
atatacaaagtgttattgatggcagcacatggacttttaacaagtttcctctggtgtttcataggctgaaaagtggtgagaacccaagagcgattcatattcataaactggatatgtgggtgcaaattcatgatctcagatctggcttcatgatggataaagttgttaggagcgctggaggctatattggaacatatgtcaaatctgatccaaagaatttcaatggcatatggcgtgattatttacgtgttcatgctactatagatattgagaagccgctgaagcgacgaatgaagatttgcaaagagaatggagattggatatgggcgactttcaagtatgaacatttaccaacgttctgctttatctgtgggattattggccatgcggaaaggttctgtccgaagcgatttgagcaagatttcgatcaagctaaaaaaccgtatggaattgaaatgaaagctcagatgaggaaaaagaactatctcattggagcacaatggctaaagacaggaaaagaagactttcagccggttagtggtggctcctctcaccggagtgaggctgaagaccgatcaaatgagatggctaaaatcatggatgtcgatcccatgatatcagggagtaaagggagggaggtgattacggccaaaggaaatcaggggagtaatggagttgatattgtctctgataactatatggggaatgttactattaataataatggtgacaaagtcaatttacaaaataatgagctggtcattgttttggaaaataaaaagaggcgtatggatatgagagtgataggtggcaataatgaggtgtcatcagatgtggagaattatgtggaggtggagaaggagtgtgatggtagtgttggtccaaaaaacttaatgcaggtgggtcttggttcccaggcccaccaaacattatgagtcttatttcttggaattgccatgggc

SEQ ID NO: 57049 - DNA, 1199 bp, Cannabis sativa
tccttcatagccgaaaggaaatttcgcaaatctaggttctcccatttctttatagccttgtacgaaccgcacttttcccacacttctttgtagccgaacacctccagagagcatagttaattgtttcttccttttgcattcccccacaacaccaacaatttttgtcaacttccatacctctgcaaaacaaaacgttgtcagctgggagccacttgtgactcactttccacaaaaactatttgacttttggtggtactctcgaattccataggtgtttccaccatcaattggtgcattttgagtcagatttctcgtcaaaaattctttccttcatagcagtagtatagccactacgaacattgtactccccattctttgaaaaatgccatatcacttcgtcttccatctccagagatccactttgaatgcccaagatttagtctgcatcatcctcacaaaagactctactaataaactccacatcccattctccattctcgagtcgcaagtcaaccaccttgatatatatccagattaataagtggtttgaatcttaagggcctaggtagccacctatccttgacaatattaatattttcccccgacccaactctccatctagaccccttcagaatgatctctctacccccaaagtaaagccctccacaccgaggaggcccttaaccctttcttagcatcaaggatggtttagtgcagaaaatagttgttctttaagaccttccccagtaacgagttagggttcctcaaaatgcaccacacttgttttgtcaaaatggctttgttaaacagcttaagatctttgagcgccaaacccccaactccttagggcactcaatttgtcgtaagatccctattgggttttctttttcttttttgacgacccccgccagacgtgagcagccataccatggagctcattaatcatttttttcggatgccaaaacacccccatagtgtagtaaggaatcgcctgaataactgctttgattagcacttctttgtttgccaccgagaacagacttatcttccaccctctaaccttattcctgttaggttttgtgccctaaataaaacccattacaatctgatcagttataattctaagaagtttgaagtgatttatgtttgcatgagtttttcatgcttatggtttaatatatatatatttaatatatgca

SEQ ID NO: 57050 - DNA, 970 bp, Cannabis sativa
actattcgttttcgtggtattcccaatcctagatggatcaattttaagtatgaaaatctccccaacttttgttatttctgtggcctgatggaccatacctacaacaagtgttccaagtacctgcttcgttgtgataattttcatgtccctcctatcctgatataaggatacgcttcgagcatccccatcttctccccataaaaagaacccgttcgaaatctctaactctatccctttcgaggagttctttcctcgtattcgtacccgcactgatgaccaggacttgcaacaagctattgaccaatttctccatgtggaatctcccacttctacacctgtttctcttactactcaagtcccagcttcttgtacccaaccttccctattcatctctacattgcctatgccacattccagtccattacctaccccacaaacacagcaaacttccgttcctcctcccattatgactgattcagttaccacccacgctgcaaaaggaaaagctattgctctctctcctaccagccatccctcccacttcagagaaagtaagagagtggttattaatgaaccctgcctcactatctctattgctatttcccctgctacccgagcgaccttcacacgtgaacattcacaagttgaagattctgtgcgcagtatgctgaagcgtgccagggcggctgtttctgatgatggtgtgaatccttctatgtccgatgacgagccaacggtgggtgctgctacgcggccccgccgagaacaatgagtctctacagttggaatgctcgaggtttagggagtcctcgagcattctgaaatctctccctgcttgtcaagcagcatcagcctttgttgttgtttgtcatggagactaagttgccggctagacgtggattacacctcacaacacaagctccgttttgatagtgttttagaagtgcctaggcagggtcttgggggaggg

SEQ ID NO: 57051 - DNA, 2452 bp, Cannabis sativa
  modified_base (67)..(80): a, c, t, g, unknown or other
  modified_base (141)..(141): a, c, t, g, unknown or other
attatcatatcagtgaaaccccgtgtctgataaatctaggaatatttattcacatagtcatgtttannnnnnnnnnnnnngacaacacaataaacatgatcaatatgttaaaagggatttagatgaatttataaatcaaanagacaagcaattgataacatgaaccaaaacatacgaatggatgaaaaatacttttgtttctttattgatattgaataaaattggattacattgaagtggagttttatttagggcataaaacccaacatgattcccattacttattagtaaacatgccataaacaccaaaactcgcaaaccccaaacccattttccaattcccattcccattctcattccccgaccaattcccaatcccattcccattcccattcttattcctattcccattcccattaccattcgcattcctattcctattcccatttccattcacattcccattcccattccctagcccattcccatttctattcacattcccattcccatccccatccccattaccattcccattcctattcccattcccattaccattcgcatacctattcccattcctatgcccattcccattaccattccctagcccattcccatttctattcccattcccattcccattctcattcctgttcacattcccattctacttcccattctcattcctattcacattctcattcccattccctggcccattcctattcccattcccattcccgttccaattcccattcccatccccattcacagtcccattccaattagcattcccattcccattcctctacccattcccattcccattccctgacccattcccattcacattcccattcctatttccattcccattctgattcccaatccattcccattcccatttccattcccattcccattcccattccatttccattcccattcccattcatattcctatttccattcccattctaattccccagcccattcccattcccattgccattcccattcccatttccattcccattccccggcccatttccattcccattcccattccctggcccattcccattccccgacccattcccattttcgttcttgttcccattcccattccctggcccattaccattcctattcctattccaatccccattgccattcccattcccggacccatgcccattgccattcctattcccattccccagcccattcccataaccattcccaaaaccctaaaaccccaaacgccaaaactgcaaaaccccaaaccccaaaccccaaaacctaaaacccaaatcccataccccaaccccaaaccccaaaacccttaaaccgtaaaacctaaaaaccccaaaccccaaaaccccaaacatcaaaccctaaaccccaaaccctaatcccaaaaacagctaacctaaaaaccccaaacacaaaaacaccaaactccaaatcccaaacccgaaacccaaaccctagaaccccaaacccaaaaaccccaaaccctaaaacccaaacaccaaaccccagacttaaaacctcaaaccccaaatattacgatgatgacaataattttaaaaatattttctgtaaatttatatatcaattattatagatatatatatttttaattttaatttaatttatgtgtatattttgaaaactaataatatatatgtataataaataatataataaaagatattattaagttcaaaacaattagaaaaattacactttacaatatcaaaattatttttattaaatacgaagaaaaaattagttaatagttactcatattattataaaaaatacatcaaatatataaaattttgaaaattcaatataattttaatatttaattacctctaaataaataacaaccgcacgcgaagcgcggtttgtttcctagttacaaaagaagtgcaatacagccaaagaacaaagttctcttgacgaaaggaaaaagactctctccaacaaacttactcaacacctgttgaagcttgccttggtgccccaaaccgcaccatcattagttcagtaataacgttgattaattagcttaaaatatgggagagtgccctatgaaaaattactattttcaatggtaattttttaatcacaatataaatcttttataacttaattaccctaaatatgacattttttttaaaaaaaaacttacaaatatgagaaaaagtcacgagtaatgccatgaaaaactttaaatttgtgtttctttttattttatttcttttttttaaaaaaaaaataaaacactaaaataaataaaaaaataatctcaactgtagatattgctttttttttttatatagaaattaaacttgttttttttttttatttaaactactgtttatttttttttctttgtttttttgttaaaaactcattaaaagcagtagaaaaaaaa

SEQ ID NO: 57052 - DNA, 813 bp, Cannabis sativa
gcatcaatttcaatattaaatctacgattcaaattgtccaaaagcatagaaaatcaagctccaaacttaccaaaacttaagttcttgaacttgagcttagctccaaccttcccaaatatttttccagcaacaaatatcaacaaacaattgaattcaagataagggagaaaccctagaattccatctagagcttaaacacccatcacaccaagaattcaagcaaaactcacataaattagcaagagaacatcacctcatgcaacctatgcatatcatcttcatcaatgccaaaattatgtgtttctaacaatcaaaaattcagtagatacaattaaattcacagctgtaaagattacctcaagtctcaagctaagattaagcactaattcaccaagaatccaagtccaattcaagctattcctcaccaatttgaattgaaaaacaagagagggttaaagagggagagggttggttttgagagaatgaaacaaccagaaatttgatttcctttatctcaaaaattaattttaataaacatagtaaataaaagtcaaatgcccaaaatgcccttagggccaaaacacccatattcaccctcacaagggtatttttgtcattccaagcatattgaatcccaattaaatttcagattatcaaatatcaaatacaataccaattaattcaatctaattgcattttagacctcaacccaattcagcccaaaatacccggttgtgactataccgcgccaacctgtcaaaacacacctgaaaagactacacaggcatactatataataatatagttgtatta

SEQ ID NO: 57053 - DNA, 1087 bp, Cannabis sativa
ttatagtagttcacccctatatcgggatagtaatggggctgcgtctagtttaagtttttatttatcacgagatggtaattataacaatagactaagtattaaaaatttagagagagaaactctgaccttgtggggagttttcaaaatataaaaaatgagcaaagtgagttctccttatatatgttaaggaggcctacaaaaatagtagaaaaataaaataagttattttccaccattgatgatgatataatggtaaaaattagcttctggtggtgatggccaatttttggtgcttggcgaatcccgctgcaagttacccggagcttatttttataactctcttaggggtgaattttgatgacaatagctttagaattacgactagaatgtgacacatgacttgatagatcatttaaatagcttcagaaacaagtttaatcgagttaatatgattaaaattgagtgagttatggctattttacataatgcagttcaggtcctaacgcccaggttgacatccgagcgcctagattgacatctaatgtcaacgtgtacgctggtaagtgtagaaacgtccaaggggtatcctttaagatgtccaagtaatattttgacaccacctactccatttataggttttggcaaagttggtcactggttctcagagatgttgttattttccagaaattacaaactcgaaactcttcagttttgggtgtgctggaaataagaaatgaaaagttgtgaatttaatttctccgacttcatagatcagtgtaattgtgaagaaatagatggacggttgcaacaaaatcaaatttgaataagtagaacctaacgcactaggccttttgtaaacctgggtgctgagccctttaaatcgagctcctgagattttgttttatacttccaaggattttagacttaaggacgagatctcccaccctgttttgaccattccagatttaatggtcgcatcaagtttgatatttgagcaattgaaggtagcgttccatgttgattatcaacttgggtgcttgacccagcgctagctctacctgggcgttgggccttatttcttggggct

SEQ ID NO: 57054 - DNA, 1038 bp, Cannabis sativa
aattatatagtgttgtaagttcaaaagacaaaatattaattatttcttaaaatagttatacctaaatagttttaggagtcactcacgtgcgaagcacgtactatttcactagtataccaaataaaagtgaatgacacattttaggatttatgatttagattcttggtacattactacaagaaaaatgaaatgttaaaaactaaaaagtatcagtggtgtctattatagcacctttcaatatattatattgatattgatacaattaaatatcgaatctcatataatttaacgtattatttttatgaaatatcattaatcaatcgtaaggcgccctctagtgatattagacaccactccactgatatactataacaatgcttaaaaccaatatccaaatgaccaagttgttctatgttgtttcaaataagaaatgacagaaaatgttaaattaggggattttatcatcttctacctcgatttttttcctcctctcaccaacgacatacaaccacccacaacgattttggtagccactgttagcgactttcactggaaactaccatctatgactaatcaaggaaggagacgaccgatcaccagtcccaaatgtaaaaatatattatgtaaagtaagttaatatatacattatttgttctagaaaaaaatatattatgtcatttttatagatttaaagtctattattactgtttcagtatattattagtatttgaaaagaattatgttcatttgtggaatttttaggaccttaaaactcaaaaatttgaagaaaaaaatggtgggtccttttattaaatttacttttaatatatctttgttattttttttattatttatttcttgtcacatttgttaaatctttttttttttcaagaagaaaaatctttaaaaaaatgtaatttaggtgtagtttaatacaattattctggtgtttagtattactcaatatatcatattgttattagtataattaagtataaaatttcacattttttcttttaaaaaaaatatcactaaaat

SEQ ID NO: 57055 - DNA, 522 bp, Cannabis sativa
atgtataaattaatatcaatgttaaaataagatttttcataatcatatttctacttaagttctttaaataatcatcctctttatttattattttattatttttagttatccacgtttcaattattttttatttaccaatttaatttttagatgcaatttatcttcctatgaatacaataatacctagttatagactacgtacggcaactgcaaaataatttattagacagttgcaaatcattattatcttttttattatacatcagagtagtagttgtatcattattccacttttttctattttctactataaatatataagatgcaaccacaaaggttcatacaatattaactataaagcaaaagaaactcagattatatatatatatatatatatatttatattaaggtactacttgaagatgatgatgatgaagaggatggtaattatgatgatgattatggttatgttggtaatattaataatatacccaagatctatttgtatataacatagaacac

SEQ ID NO: 57056 - DNA, 918 bp, Cannabis sativa
gaggtattcctcaacttatccccttaactacaatttttttttcccacagtacagttgtgtcaaactgacccttaatgtaaaattaaaaaatatatattaaaaaattaaaactatattttttatcttacaaaacaattgcatttatgataaaattattacaaacataattttattaaaaaaccattaacactaaaaaaatattttcttatcattgtaaaagaaatttattgttgtaaaagattgattgaaatcaattaccgttggttgttaatttttgttttgacaaaagtcaaagtaataaataatttttatttattaattgttgataaaaaaatgaattttttaattttaaattacccatggcattaacatcaaacatgagataatatatatatatatatgatggaatataaaattatatttaacagaaatcttatattagcacttaggttgggaaaatttttaatagataagtgttactcttaatcttctatttcaatctcttagtcaagttgtagcctcaaaacacatgtttgaattttttttatttttattttcaaattcatttttatggcaatgttcgttatagaaataatatcaagcttgtaaatttttaaaaaaatttgaataatttaaagtatcgacaatagagtttttgatattatgatttaccaaacgtgttaaaatttttttttggcactattaaatatttagaaaaaattaaaaatttatagaaattatattgtaaacgaatatcgttatgaaaaaaatatatattttcacgtgtatttggtggttgattaagagactataataagaaattgtaattatcactcgtctttttaatatgaaagaaaatttagagggtacaagtaataatttttggggcatgcaaatatcctaataatgaccttcaat

SEQ ID NO: 57057 - DNA, 1131 bp, Cannabis sativa
ttcaattagttttattgttttcttcaatttattcagtatttgtattttagtatttttatttctttatcttttttttttactctatatttttgaggtatattgaaaaatatatcttttctttatcaattaactaaatctacctctaatctatatttactatttttttatatgtactgtacccaaaataccctgatataaaagagtcacatgaagagtacattgaagtgaaatgagaaaaattggcaatgtgtttaaaaagggaggtaaaaatgatactttaaaaaaaagatagtaaaaataaaaaacaaaaaaaaaaacaatataaaaagggtatagagtctaatttgctcaatatttttagtgagtttgtgaattttgtgtttgcttggggtattatttgattattagagtatataatctaagccaccaatatttttgttatttttttatttataatttctcttcttcttcttctattttttttttttttgttcttttatagtttttatatagcgtttttagtctctttaattttatttgttttttttttctctggttttagtttctaattctctttgttattttttctccatagtgtacgcttaaattaactctggtttttgagcatgcaaataaaaaaataaccaaaatagagaataaagttagaagttttgttattaggaattgatataaaatttatatggattttaaagttagtatcgtttttaaggattggctattagacattgtgtatttttcattatgttattgataaaactaattttttttctgcatcttttcatgaaataattagtttattttaatgttgataaaattggtttttaattaagttagtatcatttttatattatgtatttttttttaattattttgttgatgaaactatttttttctgcctcttttaataaaattattagtttcttttaatttgataaaatcgatttttaaaatttgtatcgtttttatattataattttttgcattgtattctttttttagtatgatgttgatgaaactgtttttttactgctttgaatgaattaattagtttttttattgatgaaactgatttgtaaagttagtatcatttttacattattattattatta

SEQ ID NO: 57058 - DNA, 1873 bp, Cannabis sativa
gggaagaggtgtgtacatcaaggagttggatactaatagatatctctttcagttctaccatgagattgatattcaaactgttattgatgggagtccgtggacgttcaatcgtattcaattagtctttcatagacttcaaaggggggaagatcctcgaatggtaaaattgcataagctggacatgtgggttcaattacatgatctgaagtatgggtttatgtctgaatgggtggtaaaacatgttgggaattatattgggacatttgtcaagtctgatccaaagaactttgtgggaatatggcgcgactaccttcgagttcgggtcactattgatatcgaaaaaccattgaagaggcgtaagaaactggtgaaacaagatggtgcgtggatttagacaacgtttaagtatgaacatgtacctacattttgctttatatgtgggctcattggacatcctgataagttctgtcctagaagatttgatcaaaattttgatgcttcaattcaattatatggcgaatggatgaaagctccaaccagaaagaaaaattatctgatcggagctcagtggctgaaaacgggaagggaagaagatgagggggctattgatggtggcggatcgtgatcggagtagagtggcaaatacgatagttaatactatccctgtaattggggctgatgggaagcatcatggagtgattcatggaggacagagggagacagggcataggaaatctcctaaggagaaatttgtggaggtcaatgattctcataataatgatggtgatttaattgtggaaggaaggtcagatggtcaacatgaagaggattctatgctgattcttgaaactaagaggaggcgtacaaaaaaggaaaaacaagtggggtcaggtgaggtgggagatagcatgctggttgttgatgatgacatgtcctataactcaaaaaacgatttacaggtgggccttggtgttcaggcccaccaatcattatgagggttttgtcttggaattgccatgggcttgggaacctatgggctattcaattcactaaggatttaattatccaaaagaaacccaattatgttttcctttgtgagactttatcaaagaaggagggcatagaaaagcttcggttagcaataaactttgatggtgctttttctgtggatgctcaggggaaaagtggtggagtggcactgctttggagggttgaagatgatgttagtttattgggttatggtcagaattacattgatgtttcaatagcaggaggagaaaggagaagctggcggcttactggtctttatggtgaacccaacagaagtttgagaagaaacacttggaacttgatgagaacgttgaaggatcggtctaatttaccttggtgcattattggtgactttaataatgttacttctcagagtgataaaaaaggaggtaatccttatcccaattggttaatcaatggtttttgtgatactttggaggattgtggcttgattgatttggaactgggtggttatccatatacgtgggagaagggtcgaggaactgatgcgtggattgaagttcgtattgacagagccgtggtaactcaaaattggttagatgttttttcgattgctaagctgtcaaatttggaggtatcaacatccgatcattgtcccttgtacctcgtccttgaaactgaagtgagaacaggaggtataagaccatttaaattcgaaaattcttggctccgtgagcctttgtgctttcaaatagtgaaggatacctggaactgttatgctggtcattcgattatgcagaaaattaagcaatgtggggaaagtcttaaggtctggggtaatgaatatactgggaactttaaa

SEQ ID NO: 57059 - DNA, 2590 bp, Cannabis sativa
atgcatacactagctcagatcaaagggacaatgatgaatggattcttgacagtggctgtacttaccacatgagtcccaataaagactggtttattgactattctcaaattgatggtggaaaagtcatgatggggaatgaccacaagtgtcaagttgttggtattggcaccattgccatcagaagctatgatggcactatcaagacactgagaaatgttaggcacattcctgatcggaagagaaatttaatttctcttggtactcttgatgatgaagggttcgagtacaagactggtaaagggactatgagaataacaaaagggtctttacttgtcatgaagggcatcaagaaacatggtttgtattttctagatggacaaaccatgacccctgcacaagctgctgcagtcaccaaaggaaaaatcgattccaagctttggcatgccagattggggcatatcagtgagcaaggattagtggagctatctaagcaaggtatattgtcaaattatactcatacaaacttacctttttgtgagatctgtgtacagggcaaacaacacaagattaaattctcaaaaagcaactatagagcaaaacaggttctggaataccttcatgctgatctctggggtgcaagtagggtgaaaacacctggaggaaatcaatacttcctctctgttatagatgattacagcagaaaggtatgggttttcttgcttaaacagaaaaatgattgtcttaataagtttagaaattggaaaatatttgttgagaatcaaactgataaaagggttaaatctttgagaactgataatggtcttgagtttattaatgatgagtttgatgagttatgtgtagaaacaggtattagaagacatagaactgttgtgaaaaatccccaacagaatggggttgctgaaagaatgaataggacacttctgaacaaagtgagatgtgtcctactcgattctggtctgcctaagaagtattggggagaagctctatacacttcttgttatctaataaacagaagtcctagtagagccattgatctaaaaactcctgaagagttatggaatggtaagcccccttccttaatgcacttaagatcatttggttgtgttgcatatgcacatacagtagaagacaaactaggaaaaaggtctacaaatgtgttttccttggataccaagttggtgtcaaaggctatagactactttcaattgaaaataataaaattttgattagtagagatgttattttcaatgaaaatgattttccctttaaaagaaatgagaaaggtattcttcctactgtttcaggtgataactctcagcccaagatacaaatcgaggtggagccactacagcacaccagtggagatcttaaaatcctagatgggactgatcaagacatagaggaagataaccaatctgaaaatttggagaactatcaactggccagagatagaacaaggagagaaataaagccccctgccagatttggagaagctgatataattgcttatgctattgctatagcaaaagaatcaaatgaaaatgtacctagaagctaccaagaagcaatcaacagcaagcactcaaagaaatggaatgcagcaatgaatgaagagataaactcactaaagaagaacaaaacatggattgttgtaataaaaccagatggacagaaagtagttggatgtaaatggatttttagagaaaaagatggtttgactaaagatgaaccaaagatatacaaggccagattagttgcaaaaggattcacacaaattgaaggtgtagactatttagaaatcttctctccagttgtcaagatgaagacaataaggatgatgattgccattgctgttcagcttgactgggatatacaacaaatggatgtaaaaactgcatttttgaatggtaaacttgaagaaactatatatatggaacaacctgaaggtttcaaggtggaatctaaagaaggagaactggtttgtctactgaaaaggtcattatatggcctgaaacaatccccaaggcaatggtacaagaaaatcgattctgtagtcactaaagttggttacatcagatccaagtatgacacttgcttgtatttcaccaacctaaactcacaagctgtaactttcctgctaatctatgttgatgacttgcttatcatgggtaaagatcaaaacaaaataagcaaactgaaatatgtactaaatagtgagtttgaaatgaaagacatgggaactgctaagaagatacttggcattgaaatcagaagagacaagaaggaaaagaggctactgcttacacaacaatcttacattgagaaggtcattaaaaggtttaacatggaggatggaaaagagactcaagttccattagctggccactttgttttcacaactgaacaatctccaaaggatgaaaaagcaagaaaaaggatggaagaaattccttatgccaaagccataggaagtgtcatgtatgctatgataagcacaaggcttgacatagcttatgctgttagcactttgagtaggttcatgtctaatcctggtgaggatcattggact

SEQ ID NO: 57060 - DNA, 1661 bp, Cannabis sativa
tacaacaaacaacacaactctaccagctcttgattacatttagataatacatatgtttcctacaatcaacaaaaggacatttgtttaacaaccttagctgaaccactttccgaacctccatgctcacctttcttggcgctgcacaacacacgtcatacacacaaccatttctgttcatccaaaccgagtacaatgtggctgcaacaacagtgttcaccactctccattgcggctgctggttcaagtttctgcaccagttcagtaactcagcagtcaagctaggccaagtaaagctacccaaccactcgaagataagagaaacaacctgtttagtaaagatacacttgaagaaaaaggtggtcatgagtctcaatttttgcctcacacacagggcagagcacacaaggaatggttaagattcgattgaggtaatctcgggtgagtaattgagagttcaaaatctgccaatacacaaacttatgcttcggcagaatgagcttatcccaacttgctttagcataatcagccttctccgcttcagtagaaacattataaaacagtttagctatgaatttacctcctttaacagctagactcagtctcgtttcatccacattgtctcttatattcagaatcttcttgaaataccaattatcatcagtcttcttagggtagttccatatgtcatagttcctcaaataaattgagttgatccacttaacccataagaaatcttgtttgcttgcaagagcccacaagttcttagctaaaagggccctattccacttcttcccctctctaaacccaattccaccaagattttttgggagacagaccttctcccaagaagctcggtgaagtttgctcctattcccagaggatcctcacagaaaatccccacaactcttatcaatagcagttgttatcttcgaagggatgatgaaaatgttcatccaaaagttccttatctcaagcagaaccgagtggatcaattgagctcgccccgcaaaggaaaggtttctgcttgcccaacaattgaggttcttatttaatttgtctaaaatgacaccacagtcctcaacctttcatttagttggtcttagattgacccctaaatacttcagggggaatcccccttcttcaatcttcacaatattcagaatcttagactttatctcatctctaactcccccaaagtaaatgtgagactttgaggtggtagcagataaacctgtatcattacagaatctctcaaacgcatcttgagtaagctaatcgagtttagattacccttgcaaaagataacaagatcatctgcaaaacacaagttcatcaatctaagattcttacataaagggtgaaagccaaaccctttttcctttgagctttgcctaagcaacctggtgagataatccataatcagaacaaacaacaacggggacattggcgaatgcctttcttccctttgaaactaccttgaattctcctgatgagaagaagatgatagtttgttcccttcaggcaagtcatgatccaattaatgaacagagaaggaaaacagagcaccctgagaaggtcctccacaaactcctagtcaaccgtgtcataagccttgcttaggtctattttcatgatgcatctggctgagatgttcttcctag

SEQ ID NO: 57061 - DNA, 2221 bp, Cannabis sativa
aattaattatataatattaaaatatgaaatactctcttaaaaactgcacgtggaaaaagaaaataacaaatgaaagagaaagacaaaaaaaaaatagaaagtgaaataataagtagaaaaaagatgaaagaaaaaatagaaaagaaaataagaggtgaaaaaaaatgagaaagaaagaaagaaatgatgaagtaagaaaaactgagagaatgcccttatttttatttttaactctcaaattttgttcaatctataattttactaagtatgaacaatatgaaaaagaatcaaataatattacatcactatttgtaatatttgggttcgtatggtgagacatgtcacgtatatatcattaccttttatattaacatatcataactatttgatcttgatatatctaagtgttgattaataataggtttggagagcatcattggcagagcttataggcactgcattgttggtgttttcacttgataccattgtgatatcttcatttgagtccaaagcaagctcaccaaatcttgtcatggccatcctaatcgccataattgtcacaattctccttcttgctacccaccccgtctctggtggccacatcaaccccgttatcacattttccgccgcactcgttggcatcatctccttttcacgtgcaaccatttacattttggctcagtgtgttggagccatgttaggtgcattagcactaaaagctgtggtcaacaacactattgaggaaacattctcattaggtggatgcaccctcacagttgttgcaccagggcctaatgggcccattgtggtaggcttagggatggagcaagctctatggctagagattctttgttcctttgtgtttctttgggcttcagtatggatggcctttgatcgtcgccaggcccaagaccttggaaaagtggtagtctttacaattattgggttggtagtgggcctgcttgtttttatttcgacaaccgtgactggtgctaaaggctatgctggggctggaatgaacccagctaggtgcttgggtgcagctttggtgcgcgggggccacctctggtatgggcactgggtgttttgggttggaccctctatttcttgtgtagcattttacttatacaccaagctcattccacataatcattttcatcactcagacggatttaagcacgatttctttaaaattgtgaaatatatatttaaataatttcaggggaaggttatatgtactagaaaacaacaaataatttatatatgttggagaagaagaattcgaacttggggtctcatctttgtaaggaattactaaattgtgtctataaccacaaataatatttctacttgataggaaggaaaaaaaaaggttaaagtgaaaaaaaatgtcatttgtaaaaaaataaaattattgatgggtaattgtgttggctgtaagaggaaggagcaagggaatgataatatttattcgaactgttaccattattccatatttagtttataaatgtatttgtcatgcaatgaatttcatgacatgcattttctatgttataacactagaagctcaattttcttttgcatgttatttttgaaacatttgaatttgatagtggatttgcttcacttttggacaaaaccacctagatgtacattatgaagagtaattttggacaaattatgttaaatttagtgtgtaatttactactttatcttaatgagctacataaggaaacaggttgttgggagttatgtatatattccaatttttccttagaatcaatatttgcaaaataatataatacaaaccctgaaattatttttctgttaaagatcaataacaaatggaattataaagcatattcagagtttttaaatttctttcaatataaataattatgcatagtaatcaaagcactaaatacaagccactaaattattttataaaaaataaaaattactataaaccttctactataataataataatgggtatactatacattctcaagtttcagcaaatactttaggaatatacattcaaaactctcacatactattgtagtaatctcatcaattatttacaaaacatttcttacaattttttaggaggtatctttttctttcttttttatatttctctcactaagaggtagttaggaccgtgtcaagcctattaggaggctagggcaaaatttcaaaatggagccttttttttttt

SEQ ID NO: 57062 - DNA, 3762 bp, Cannabis sativa
  modified_base (1464)..(1470): a, c, t, g, unknown or other
attgttaattgctgcctaatatgtgtgattttcctctctctctctatatatatatctatatatatatatactactcttcatatcttatatctatatatatacatatataattggaactcttgtgtgaaaaggtattcatttcaagaatatcaaacatggaaaccgtgtgatttacgaaataactgaatcatgaatactttctatctcatatatataattctactatgaaataatgaaataatgtgatgtgtctatataattgaccatataattaataaaagaagagcaacgacatagacttaatcaaagattattgtatggatttaccagttatgttataacaagttgtgttggagaccaaaacaagtccataatcaattaatgatgtcttttttattctattcttctttgtgttaaaaaagtcaagtaaaatgaccaccgagtatttagcttactcgtagggttttttgctctaaaacaaacggtggaggtttgagtaggaacagggccctgcgctaggattcgaaccatagaactaactctgagtaggagtaaggttaacatttatatatctaatatatctttacatgttattaatggtgtttgtctctcaacgtaatgtattattcatgtccctatttatcgttaaagttacacacattattttctctataggtgctcgtgtgttattgagattatatataattaagctcatcagcatgtgtggagtatactctataattcgcttgtaagatttgatgagccttgctatgggaactagtacccagcattaattttttataggtggtgttttatgattggttgtctaaaagctattttttaagttatatgagatctgatacttagttatatcaatagcgatatgacaccaaggaaagtactagacagcaatgatatcttttagcaatggttcttttttctgttttaaccaaaaaaaagtaatagtattacaaaaatacttccagctgaacaaataaacaaatatacaactcaaataaaaaaaaaattacacaaataccacttacacacaccttcaatccaggatccatgcttcctgggaaaccatcgcgcaaccacgcaactacctaatacaaccgaaataaaaattcaacgagaaagagatccaccattaatttcggcaacttcaactgagaagacaaccagaatcaatcaaaacaggagttgtttcaaattcatgaaaaaaaaaagtgtaaaaactactacgaaactaaaattcaactggaaatccaatttaatttgcataaaaatgtactgacttcaattttcaaatccatgaaagacagctctaaaaaagttgaattggagttcccaaactatctagctcaagtatataatccaaaaaaattacatcaatactatagtaaaatgtttatcctggtgtatttcgttgttttccaaatttctaatggtgaatttgttcannnnnnntcatgaagagacatgtagatagagttacgtacgtggaaacaatgttatgatttttaatgtttcatgacagttgcattacagttgcataaacattttgataacagttatttcttctgatgcaaccttcggccaaccacccagcaacattcgtctgattgaaaccttcgtctgatgcaaccatcgcgcaaccatctagctattgtctgattgtgtaagtgatagtgtcagaggtattttggtaattaaaatcacataataaaaagtataaatgttgtccatactttatgaatgtatttttgtaaataaagtatcaatttgtatttttcatgtaataattcttttagcaaaattctcatgtgtaataatatttttttttttgaaaaaggaaaaagtcaagtaaaaggaatagtttaggtcggactaatttagtaagtagtttgaattgttcaaatttacaggaagaagacagcgtgttttacaaggtgcagtttaattgtagctaggaaaattcttgtaacttgtaagtcaaatagtgtttcttttttaattaatcatgaatatatttgttcgtagttcgaaattatgtgcgtataattaattatttttttagttttcttaataatgtgttatactatacaatattattgatcatttagttaaataaataatcttattttgaaaaaaataatatttaacgtaaagttaaaaaaagtatgaaaatatattaaagaaggaaaaaataacaatgtgtaattttcagaattaatgctcactactataaaaacaaacttttagaagtgttttttttttcttcagcaaattaatattttaataaaaacacttacgagtcagttattttagaataagcgactctataggtaataattttttcaattttaataaaaaaattctacaatgtcggttattttgtaataagtgactccgatgaaaaaacatatggcgccaattattttataataattgacgccatatgtcttcatataactcttttcaactatcgtcaaacctcaaaataaccagcagcctttcttcctttcaaacccacaaaaccctcgcccaaccatccctttcttcctcatattttttcatttttcatctgtttctacttattttttttaaaatcttgcatttttcatacctaaaaacatattcttagaatttgatcgtcttttgtttgattttttagggtaaactgagcttagaggtggtggacgtggttttagttctgactgtcgcttttggtagagaaatcgttgaatctcaactccattgttaaggtataaatctattctttaataattttattaatgtaaattgttttattttttattttgtaattttttttaggattttcctatattgttaagattgtgttcttatggttgtgcaaccgaattaatttggttggtgttggtagccgaattttggtaataagataaaaatctacactttaagagtatataagtatgtattctgtgtgttttattgaatgtgtattgtatgtatatatattttgttattgtatatatgtattgtgtcgtatatgtatgtatacaaatattgtaattatatatattgtatattttttatgtattgtatatgtatatattgaatattttaaacaaatagttttgttaaatgttgtcaataagaatgagatatgagagtattaaaataaaagttttgaaattaatttctaaaaattactttagaaattaattctattttttatcattttttattattttcaattttattcatgtatttttattttttttttagttgcgagtaaatagttagttacaactacttaataagttactaatttatattcccattgatgtatatttttattacaactagttactcattagtaactagttagtaataaattaactcgttagtaactagttactcataaattatataattaataagtagttaaataaagattttttttaattttgtagtatttttttatattgtagattgtaagttcaatttgtaaggatctgacttatttgatattgatcgatttctagctagctcgaggtatacatttactaacttttattattaattaatcatgaatgcttaattagtagagtttgaatatcttaaatatattcattcatagtgatgtagattctatgatatcactacaagaaaaggtatttttgtcggcgcatttcgtgacatgcgccggtaaaagttgtcgagactaccaaaattgtggaattccaaatttattttgggtttacttttgccggc

SEQ ID NO: 57063 - DNA, 995 bp, Cannabis sativa
aacacatcagtgcatgtgccataaatcccctctatgactacttcaaggattacataaaccacctcgggcttgccccattctaactaaatcccatctcctacagaatccttaccagtttgaaggtcatgtataaaattctgaagtgggagtgccctacgcctattgcaatcgagtatctttactctattgaggttgttccagtgaggaagaatgccgcagtgggtttctattatctcagtactcactccagcaagcctaaaattattgtagacttgccaaacaaaatatctttcaaagataacttcttttggacaactggtctctccccaatcggcacaaccaccttccgtaaaattcgtaagtaattattttcatcaggcttggttggattaatccttgtcttttcattctaagttttctaactaatgttttattttttacagccctctcgaaaagatccatccctactctcgagatggtcaatcggcacaactcctgctaaatcttccccacagccttaggtcgtgcgacatccttctaaacgaggccaatctgagatttgtggacctccttactcaaaaggagtatacttgtgattataagtttcccaagtattcttcttggcaataggttcttgttcaagaggaggataaggccttagatcgcgtggctcgagcacaataccttcaaaacactgtccctcgggaagtcggtgaaggagaatcccgaggtaattaatgtggttggtcacccataatacttagggctaaacgtaacacattagttactttctgagatagtcgccttaatttttatattcggaatttcgttctcgtaaactgaattgcacataggtttgacagttggtaccctagattccacgttcagattaactataacgagtcatactatgctatagctgaacaatatggcaccatgactgatagggcaagtcatatagatgcgagctgggatttagaaccaatcgagccctt

SEQ ID NO: 57064 - DNA, 833 bp, Cannabis sativa
gcccaaattgggacttgattttttcataataaattagaggttattcttgaatagattattcttaaatagaagttctattgtagtattaaattgagtctttaacaccttaaatcacgactcatatttttttaatgggtaaatattattttagatcctgtgttttgtaaaagttattaatttgatcatttgttttgttaaatgacaaaatagatcctgtattttttaaattaattgctcaaataggaccctgaactgatttttttatcaaaataaaatttaataataatccgatctagagatgttatgataaaactagttacattttctatatttgttcgtgttagaaattgtcttaaagcttattatattaaaaaaaattgttaaaaattgaactcagagtcctatatttaccatttagcaaaacagaagttctattttatcatttaacaaaatagatggtccaattaataatttatataaaatacaagatgtaaaatggtatttatcttttttattatcataattacttgatttttattattataaagtaacatgtaaaatatttataagaacaaattatgatatttttcaatcgacacgcaccactcaataaaaaatattaagtcactgaaatttacagtggcctggccccttacaatttaattctggctcctcatgtcaaaagtaaatataataaatttacggaaaaacaaatataaggaggagatatatagttataaagagtacataatacatatgtcgaaaacgttgttaaaaatttaaataaaaataaataaaccaaaaatttgtggacaaaagatcaatgagtggtt

SEQ ID NO: 57065 - DNA, 1340 bp, Cannabis sativa
  modified_base (37)..(49): a, c, t, g, unknown or other
gctcttccgatcttttctaatctttattaataagtannnnnnnnnnnnntaaaatgagttttatttagggcacaaaacccaacaattgcttatccaaaagtcgaaggagaaggggttttgttttcaccctctttgtaaatctattggcctagtcaatctgtgttttgcggatgatctaattatcttttctaggggtaatgagaaatctgtccaacttgttagtgaggctttccaacggttcagtgaaaaaacagggcttgtggctaataaatccaaatcaacagtgtactttggggggattcaagatgatggcaagcaaaagcttctgaacatccttcaaatggatgaaggaagctttcccctcaaatatcttggtgtgcatctcaggcccaccaaatggaggttctcaaattgtggtatcatcatcgataaagttcataaacacttgcatacctggactagcaggaatctctcgtttgctggcagagctcagttgatccattccgtccttctgggtgtttagaactactggatgaaccttttcttgattccccaaaaagttacagcgcccattgataaatgttgtaggaattttctttggggagtgaatggaaatcgtagtaaaatgcacatcccctcttgggaaaaagtttgtctccctaagaaatttggaggcattgggtttagggaagggacgaaatggaatattgctctaatggctaagtatctttgggctatttcgagcaagcaagataaccttttagttagatggattgatgccatttatctgaaaggacaaaccatttggattgccgactttcatcatgatgctaattggtatttcaaaaagcttcttcggctccgctcaataattgatgaagacgatgtaaaagctgcggtgaggagaggtaaattccactctaaactgttctatgtttcctttgttcaagtaccgattgttgattattcaaagaacatatggaatagattgatattgccaaagcacaggtttatcggttggcaattagtgaatgaacagctgctcactagagataatattagcagattcattgagatctccaatgagagttgtcctgtttgctgcacagagagggaaacacatagtcatctcttttatagctgctgcttcacccaaaaaaatcattcaagagattatgtcctggtgtggttacttcagctggccaaacaacattagattttggttttctaggccttcaaacaatgtaagggagcaagtgttgaatgctattgttttagcaaccttgtatgtagtttggacaaaccgtaatagctgagtgtttgaacaaaaatgtaagttg

SEQ ID NO: 57066 - DNA, 1946 bp, Cannabis sativa
ctagtagggttgtttatttatatcaaatcctttaaacaattggaattgcaactacaagtaatgaggtttagaattttgtgaggtaaggtataattgtggattaaatgtgatgttggaattgcatcaaagtataatatacttcttttgttttttttttttatcaaagaagaaagaaatttcattaatcacaaatcaaaacaaattacaacaaatcagcagcctactagccgcacaccagcaggcaactagcagcagaacaaacacaaataaactctctacttacataataaattatgtatgtttagtctttcatccttcttcaatttgctatttttaattgcttgtattctatagtgcactgtacacttaatcaactatatgtaaacgggactttgagtatccctccaacttgcactgattcctgttcagccaactattataacaaactgttgccaaaataaccacattcaatctctgaatagtccctgaatttttcaaattcagccaattgttccaactcgagaagtgcaaaggccaagctttccaaccaatccacttaaaaacctgctcggttaccttttgtgacagtaagcaagagaaaaataaatgttcatgggactcgtttgcatagccacaaacagggcaaaaaaccgattccaaaggcagatgaaacttcagcaagtgttcacgacttgcaaaagaaaaaatctatgcttaggcatgtttaaggacctccaaacaaccctatagtaggacactttcttctgaataagcgtggtgttatagagaacaatagtattgaacttgccctttcctcctgcagcaataattttcctcttgctgaacctttgtctcaagcggcttaacttgtgccaatagcagctcgggtccggtttgagattgtaggaccaaaaaaaagtgtcgtttagataaatgaaattaatctattttatccaaagcaaatcttttttttttctgtgatggcctaaataaattttgctagaatgacttgattccatttgacaccctccttgaaaccaattccaccatatgccttcggtaagcagactttttctcaagaagcaatatgtaatttacttctaaccccattggttcctcataagaaatctctgcacaatctttcaacctccttcgtgatactatgaggaatgacgaagatactcatccaatagttgtggacgaagatactcatccaatagttgtgcagcctaaacaatacagagtgaatcaactaaatcctccccgcataagacaaatgcctgcttgtccatgaatagagatgctcctaaatttttttaataatgatgccacagtcttcaactttccacttagttggtctaagcggaactcctaagtaacgaagcggatatgatccctctattaatttcaaatctctaaggatagttgctttttcaaaatcttggactcccccaaaatagatttgggatttcccttcgctaatatgcaacactaaggtattgccaaactcatcctatatgtctttaagaacaagcattgaactccttattcctttgctaaacaagattagatcatctgcaaaataaagattaacaaaacacaaacgtttgcatagatgatggtatttataatttgtacccaaggtagccatttggagtcttctcatgaggtatttcattactaatacaaagaggagatgtgatagtgggtcaccttgcctcaagcctttcttaccttcaaaggacccttgcagttgcaccccttccattcatacatatgaagtagttgatagatctaacacatttcataattgtaataccctaaggtttaataatatacacaggagtgcctaccgttttctttaggagttaaaatggtcatggtctttagacaataatgcaggtttttggcacaaattgtggaatttgaaaattcccccaaaagct

SEQ ID NO: 57067 - DNA, 1523 bp, Cannabis sativa
  modified_base (196)..(201): a, c, t, g, unknown or other
  modified_base (323)..(324): a, c, t, g, unknown or other
aaaataatttccaacagtcaacacctaaagtagccaccaatcacccatgtggaaaattactaaaatgccccttaaggttaagcttaggcaaaataaagcctaagggtaaaatggtcataaactataatcctgctcaaactcggtgttctattttctccaatatacatccctttaagaaataaggttctaaacttannnnnntgatcaaactagccatccatcgtatttaccgttgtcagcgagaaaaaattgcataattcacatataatacaaataatactcctagagtttaataaaatctttgtaattgagaaattataacnntaatgcccatttctaacaatgggatccaccgataatttaaatacacaaataattattaaaatactaataattagtgcttattgtctttactaatccatattataaatgcggtcattacacaattattccttgactggcaacactgtcaccagtaaatccacaaagatttatcgtgcaaggtcttaacttagctttttcaagctccatcttctttagtgtttccttttaaatgatgttcactgaacttcctttgtccatcagcaccctttttatcctcttgttagcgagctggatggtgattaccaatgggtcgacgtgagggtacctcacatctttttcatcttcctccgaaaatataatcggatgttcttcagtctttactttcttggaattttctggagaaaaggcagattgctcatttttcacttccttcacgtacctcttttgggcattattgctttctcctacaatatgtggacctcccgagataactatgatatcctctcccttaacaggaggaggttgtaatccctagtttcctgggttgttgggcgtattgggctggttatgtccattgccctatctttttgacatattgcttgaattggcctcgtgtgaagagactctccatctcatccttcaactgatgacactcatatgtcgtgtacccaatgtctttgtggtacttacagtatctggttggatctcttttatgcctcgtgtgcctcatgggctcatgtttactaaatgcgaccttgtgctcatgcgcgagataaatattttcccgagtttcattaagctcggtataaatggtataaatcggcacgtagttatcgtgcttcttttgtttcttcttgtcttaagatgaccccttagagtcgtctttcctctttgagccagaggccactcggttatcagctttagtctagacagtacttgttgaaacattgttggttttttcttcttgagccagtttttaacaagttcatttcttttcgagcttcttcccttcgaaaaaacacctgagccctctcgttgaactcagtgatgtttttcactagacgaccctgtaggtcgtcccacagttttcctccagcagtggagagattagtattgatccctgcttgaagggcagtaaggcgggtactatcatccaaatttctttctctcgcagcagctgtgctaaaacgacttaagta

SEQ ID NO: 57068 - DNA, 904 bp, Cannabis sativa
  modified_base (855)..(862): a, c, t, g, unknown or other
tgaataatctggattacattgagatagagttttatttagggcataaaacccaacaggagcaagttttgggactttgaagatctgaaattttcgagtttctactgttgtgaaccggaattctgggtggtacagggcttcaccaaccggaattctggatggtcaattttcaagaatcgctaatttttgtatttagccataacttttcactcgggtatccgttttagacgttctatataccgtttcgaagcttatgaagagctttatagtatgagatatagattagagaaaaaaaaagatgtattttattttagggtgtttttaccataagatttggtagaaaaccctaagttaatttatgcagtttttagatagtgttttggaatagacccttattgatttacctttgtcgtgacataggacttgagatcctcgagcatcattccactcaggtcggctcgcatacatgactttggacttgaggtttagacgatagaagctgtgttcggccataagtcagaggtcttccagcgatgtacatatcagccgtggtgtcttggcttccgggaagcaggatcaacccttttttttatgtttggaaatgtaaccttactttttaatagcggttttgtaacatgttttaaaaaaaatttataaataggggatccccgtattatggtgatattttgtacgaaagttttattttaatttaatcaaaaagtttttagttaaaccacacacttcttaaactaatagattagttagggataagtttgtaaaagcacactcgtggcgtccctatggatcaggtgttgggttttgtgccctaaataaatttcatttcaatataatcagatnnnnnnnntaataaagatcagaaatcgcatttaatgttgcatggttcaca

SEQ ID NO: 57069 - DNA, 1348 bp, Cannabis sativa
taatgttaagatagaaaaaaaaaagataactaaaaaaaaaaaaaaaaaaatatatgccctttccaaaccaacgagtttaattctgacaccgacaatgcaaaccgcttatgaaactacgtcgttttgtggttttttttggggcttactaagtaacaactaacaacgttgtcaaataggaatgaagtcccaaagtttcaggtgtattatttgtgctttttcacttttatttttgggaaggtgtgtgattttatcattcccttgtcttttataataaatcgaaagctgacgtgtcggttattcggataacggataagtatcacccatggcgtattttagacgcaggccgtctaggaatcgtccacttttataaaattatactattttatttatacttaaaactttttttaattaatttttatttatctatttttcccaattttagatttcttgtaaaatatatattttagatttatgattgatacaatattattctgccatgcacaagcattctatcataaactattgatgataatcattatttttcttaacaagatgataattattaaattccctttttaattttagtgtccaattatgacaatccaccgaatgggttaaatttaagcccaggttgagtttaagcaaacggttagttatgttacattgggcccacatttctttttgaaataacatttgcccacattgataatctttatttattctatattttagttatgtaatactaagttattgttacttgtaatataaatataattagtcttttttaattagatttaattaagtgataatacatataggatcgtttggtaatctacaccgtattgtattgtataatattatattaaattgtattttatacaatatttttatgtaaaactatatgtgatattaatttttatagacacctaaatatataatattttagtataaatttaagtttaacatagtattatactgagcgtctgccgttattgctctgaggcagttacttatcctttatggttttttccatgatctgcaattttctgcagattttataactgttttaaatcattcttctccccgagtctttcctcaattcattgtttcattatggatcctttaaccagtaaaatgaaaggtgttataagcattgatgatgaagaagaatctcttattactattgatgatgaggaatctccaaacataaacacaacaaatgaccattctcttctggcccgtgtcctgactagaaagcctgtttacttattaacactccagaaacagatgaaagtccactgggatggtcgttttcctgcaacaatcactgaaaaggaacctgaattgt

SEQ ID NO: 57070 - DNA, 960 bp, Cannabis sativa
catgcacccttctcaagtcactcggaatgctcattctcaagtcactcagcatgctctttctcaaagtcactaggcatgcaccattctcaaagtcacttggcatgcacccccaagagctcactaggcatgcacttcatgcatgccactcttcatgctctttctcaaagtcacttggcatgtaccattctaaaagtcactcgacatgcaccctcccaagagctcactcggcatgcacttcaagcatgccactcggtatgcaacttccatagcaatatggctatacttagtgaaattttcctaagtatggaaatgaagggtactagggtacgatcacaaggataaggtgtgcatgtgaggtgtgtacaactacatcttctgcaagctctgaaagcaaggaggtacgagtagtggaggcatcacacctgcaaggcctaatgaaccgaccaagggtacacatcagccaccactaatgcaagcacctaataccaaacaaaggtacaaggtacaagaccacctcctacaacatgcaattgctagataatggatgtcaccatgtccttagggaccactaatgtatcaaaggccattagagcctataaatatctctttctcaaatgtgagaatagattggaaaattactcttgtaatcaacacattgaaagcaatagaaagaaaattttctctcttctctgaaagcacatttttatttcagttcacattttatctttattttatttttgagttttgaagttagattttgattttccggccaaaagattagttgatgagttcttaccttcagcatacgacctcttttgcaatctaacattttaatcatgatattaagactttttttttttttttttttttaatttcatgatctgaagtttaccacttgtaaatcacattgtacaagtatcattaagtttcattattatcaaacaattattgtatttcata

SEQ ID NO: 57071 - DNA, 1104 bp, Cannabis sativa
caccgcttccatgtgcaaatcagtgccaatcagcgctggctcaaaattttctccccctggaataagattgtctctagcctcagcttgaaggcggacatctctcagctcccgttgttcatacaattcatagtccgagaagcaatctttttttcgggaacccagtcggatccaagggccatacattggaaccgttctattgaaatcatcagcaatcattcttcttttacgtctgcatctagattcctcatgaccaacaaccccacatctatagcagacacatggcaaattttcatacttgaaatagcaccataaacacaccccttcttccatagggagaaacacacctaccataatcggtttgttcagttggatagtcacctggaatctgacatattcattagttggaaaaccgttcctccatagtcggtctattgagataaccgacccaatcttctgcgcaagcgcgtttgcatttttaatcgtccaatatctgggtggtatttcatacgcccgcacccagaccggagaagagtttaaatcagctgatgaccatttaccatcatcaggcatgggtttaaccaccagaaaaccatcacacataggccacagaccgtttctggagatttgcagcgcctcctgtttctttgttaaccttataataaaggtttttggctccacttcttgaagcttccaccccttggcaagtttccatttccttcccagaatcgaacgtagcagacccataaagacagtcttgtttgtatacagttttgcaacgactgatttctcaatagcctccaccccaagctcatggtctgcttctaaagagatcttgaaatcctccaaaccacagagctccacttgttccacctgtctctcctcagagttgttctccatcgctagagaaaggctcaccaaaaaacaaaggaaacacagacagaaaacagataaccagagaaaagcagaaacaccccttagacaacaaagagagtagcgagaaagcaaagaactcgagaaaaaaaaccttcctttttgcagcaaaacacagagcgtatacccactgatactgaaggatatcacgaaaaaaccctagatcacacaatg

SEQ ID NO: 57072 - DNA, 1050 bp, Cannabis sativa
ttagtgggatgtatattggagaaaatagaataccaagtttgagcggggttgtgggttttgaccattttacccttaggcttgaattggctttaaattaagcaccacgagtatttttgtaatttggtcaagagggttaggtggctgcttggatgaatggcagttgtccatttgatttattttcagcctatagtttattcattttgaggaaattgggaaaaacaaaaggaaaagcaaaatttgggggaaaaaccctttccttattctctttctttattcggccaccacgaaaccagaagaaaaccactttgattcttcatctttcttggaattcagcaagagattcaagctaaggtaacccctagaacacttactctttatttttcaagcttttgttttggttggatgtgtgattttgagtattaatggctgttagggttagagctgtttgtaattcagtttctatgtatgattttagtttgtttgaagttctagcagctggtttagggttgtggggtgatggatgtacaagtttgagtttgaaaactcaagcttggttcatccatggcataatttgaatttgtgtatttttttgggttttgttgattggaagtgattgtgtaagctcattataggtgttttggaaagtttggtggaaattggacatcttttcagcaggttgtgaattgtttggggaaacctggtgcaaattggttaaccggtttgcgaggacctataaaatcagttaaacggtttgcaggacctataaaaccggttaaccagttttgacaaattccctgaacaactcatttcctcgattccatagtgccttggttgggtgatttcctgtttcctaaggtattgtggttccatttagaattagcgataccttaagattggaggttcgggtttctcgaattagggttttggcacgttatttacctggttttaatatctgattagggcatccatccagcacgagacattctcttcaggtcggccaactcacttgaattcggaaaagaggtaagaacagcgtataatatgtgatat

SEQ ID NO: 57073 - DNA, 908 bp, Cannabis sativa
aaaggagtcaaaattctaaaaggtctaaatgacaaaatactattagtcttcaaggctaataaacacaagaaagctaacgaaagctgaaactaaaacttaaaagttttagaaacaaaatcataagatctttagtccatctggagaaacaaagttaaatcgccgagtcttctctggatttcttcttcttgaatcttgagtgttgctttcgctctctcagcttcatggaatttttctacactagcttggtcatttgatcgacttatctcctcagggagatgtcgttgctccttcaaggaatcattgagactagaaatatttacctcaaacgatgtttttttggcttcgaactgagctcgtcgttgttgtatggctagttctgctgcaataatctctgcttcatctacctaaaaatttttaaaattctttgtcttgttagtgacagatatggacaaactatctatagctgccaaattatcctcattacgacgaagaaggtccatgataagaggttcatcaagacgaagggcattctcaacagcttgagcagaagcgagagacttttcttgagccttgagcaaatcattgacagagtcaatgaaccatgcaacctctgctaagccacatttataatgcccacaaagggtactcaacacgtaaagttgcataaccacgtcagcatgatgttttgaaatgtctactatggtcaaaggagaagataacaaatgaagaatgtctttcatgcattcaatcacaaaccttttggtatgctcatttgagttggtgattgctaaagctgacactatcaacactgggtctggtcaaggaatgagcaaatctgagggaacaactgatgatggaacacccgtctctgctgagacaatcgattctggtagaatggttggctctac

SEQ ID NO: 57074 - DNA, 2452 bp, Cannabis sativa
  modified_base (1529)..(1531): a, c, t, g, unknown or other
ataaaaaaaaaaaaattattttaacgttttggagatttttttttacatttttacggtattttatagatataacacgaaaacaacaagaaaattacatcaaaacaacattaaaaaaataatatacagataagagtacaacataaaaatactatatttttataaataaaattataaaaacgtaaaaaaatatttatcatacatataatgaagtgagatgagaatgtacatatatcttgaaacaatatccaattactcctcctacaaataattttatctaaaaaagttaattagtgatgatgtagtcgatgatagccgcccttcctgcaatcagatcctttttcacaacctctgttgtagccgttggaagaaccaggaaggcatttaggacccttgcatggcttctgctcaccaccatgctcaatagccccatacccaatcttcgagcttaaacctccctccattaacatcatcgccaccacaacactcacaatcaacataacgtactttctcttcaaaatccccatttcttttcaatttatatttatatatgatttattagtgatacgaagatgaaatatgtatttttctttttggtactttgttggtatacaattaaggatatagtgctcgtatttcaaaggtatattattgatagttaacgaattaagcgtaggtaataccggtagatggctaattatttaggagtgcagatttgtcaggttgaccactggtcaacctttgtcatatttggcttttcataatatcagtccattagacaagtcatattactaaaattatataaaacatgataaatgacacacatattttactaaaaatttataatgtaatttatctatctaatattggtaaaccatttttttttttttttttttgaggaaagtattggtaaaccaattcatttccattttttctttttgaaaaaaatagtaaaaataataaatattattttagaagcttataacttttaataatatatcatgaatttatgttctaaaaattacttgatcaacaaacttgtataaatgtatttaagtttacttttaaattttacaatgggtaagaagagcatttgaatgcacatttttttttgaaaaaaatggtttttcataggaaaataagtgacaaatttgatgtacgcctaatataaacttatttttatttttatttcttattcatactttatcttaatggaaaagaaaaacaattatggcctttagaacatatactaattgtgtttgttgttactatttaagagtaaagtattcaaaatctatattaattttgacataatattttactagccaataagttagaacaattataacagtttttctactctattttttaaaataattcactaaaattctattttttttttttattttacctcacacatttacattacactatacatcaatttctctatatttttctctataccatttaaatattatatttttacgtatattttattaattaaaacaaaaaaaatatgaaaatgagtaaannnaataataaaaaattaattaatttaatgaaagagagaaagaaaaatataaatatgttttacctcttcattattcatgagctaaatgcctagaagaatttcttgaagtttgttggagcctaattttaagcttttagctatttttttttttttagcttttagctatctcttagtaaaaaaattaaggcaagacttttatgttgttcaagttgttaaaaaaaatttatggtacgtttagtaacacttttttaattattttttattttttaaattaaaaaagtgaaaatattttttaaaattatatcttataaaattatttttacttttcaatttcttaattgagaattaaaattttaaaaattttgaaaatgaaaaaaatgtcatttaattttaaaattttttgaaacaatattttcttaatcaatatttccttggaagtcagacctggcaccaccggtgctgcacctgaccacaataagagaaattgagaatgttgctagccacccacaaaactgacttcttatgatctctcgccaaagccaccgcacacattgagtcactactaactttaacatcacagctaaacttgactcaattgttcggcaacggaccaaataggagacgcatcattgacgtagaaaataaacaaaaatcaaaatctgcgcaacatatagaaatagaatcaatagcacttaatattacatatatataattattattatgaactttatctttctaatttttctatatcatgtccactataattgaaacatacagaaaaaattcttgtcttatttagaaaacaggtaaagtataatgttcagggtttctgaatttctctcatttatttttttcaacatatgtttagttgattaaatattacttttgacaactaatcatgtcatttacttgtgaacattttaa

SEQ ID NO: 57075 - DNA, 2705 bp, Cannabis sativa
ccatagactagagccacttttgattcggcaatattttgttcattaattacgccagattctttcatttccatgtaaagatcatttcctccattctccatagcaagagagggtaaaatcctattccaacaagaaaactttaacatctaaaactaacttaggcaagcaattgaatcacactggaaacaaaaagaaattgaatcaatagggtgtttcatatttaagaaggtttaattttttattttttgaaaagagacgtacatatatagctaacactagacctcttggtcgttacagaaaaggttcctaggtatggaagttacaggtaagcatccataccgttgatgggtaaaagcccactttgctatattatgggcaacagaattacaagttctattaatacaagataaagagcaaccatcaaaaaacgaaaaggtgctattacaaaaccaaacatagttcagaagcatccaacaagaatcctttccagaaagagtgttgataaccaccctagagtcgctcttcaccataacaaacttgtggccattagctttcgccacttccaaagctaaacagcaagcagccgcttccacaatcaaagcataagcaaaatgtaaaagttttgttctaacccaaaccacctcaccaagatagttccttgctaccacagcgatacacatgctctccgaaccaactctgacatcacaattcagtttgagccaatcctggagtgagggcgccaaacatcaaccaccaatgaggagggagaggtaaagatggaggcacaataatctacagaagatgagcgaatggaatccatgtaatgaattacattattcggcctattattgtgtaccttatcattgcagacccgccaaatggtatcaacaatagtggaggcatagaggaacaccttgtcagtattaatattaatgtcttatttttttaactcccaaatgaatttcacccagtcccagatacgaataccagaaccgacaatgggaaaaataccccatggagtagacctccatagatgaatagccaagttgcaagagagaaatagatgttctaaggattcttcttcaaccttgcaaatagggcacatcttatcctcaatatggaatttcttattgagaactgcttgcaccggaagggcattagacaggatacaccaccacaagaccttatggcattctagaattttactattccaaagcttgttccagagagagagagggcgacctcacacataaaggatctttgtaaagcttggattagataggcagacttgcaggagaagtgcccacttttttccttagactaaatccacttatctttaccgtgacctgtaggttggccaccttttaaaatggcagacatagtctctatgtcaaaaagaccgtgaaatttctaaacatcccaaccactactttctgacaacagatcaacaacttttgaaacccttgaagccccagggttattagaagttgggataaaattattcccatggactacccaaggatcttcccatatagaagtatctcccctgttagccaccaatttacacgcactttccttaaaatggaggaagctttcaccacatttttttaaaaccacaaatctgacttttggactcacagtgaagaaagattcttcctttaagatattttgcttctatgatacaacaacatagagattggataccagtcaataagttccaaccccatttggctaggaaaaccagattcatctctctagttttttgaaaattgaagcccccctagatttgggaaggcacaatttattccaaacttttaagtggatcccgtgattacctttatcaaactccaccaaaagtcaagaaccattccatcaattctagaagcaaaatgattagacaacttagtagtttgcatgacataggctggcatagcgaggcccgcaaatttaatgagggtgacacgctaagccttagaaagagtttttactttccatcgctgaagctttgaagcgaggccatccagaatgaaattaaaatcagcatcatttttgtcttgacctgaacaagggaagccctaggtatgtaatgttatttttgggggatccaatgcccaaggcttccttaatgtcactctttaaaacatcagaagtattattactaaaaaagattgaagtcttacgtttaccaatattctatttttcttttgtttttgatatttgaataactgtaattttttttatttatattctttattcttaggatagttgtaattttaattttttttatgtatatatatttgtgtatattatagttatttaaaatattgaaaaagttttgaaaaatttgaaataaatttacaatacaaaaagtagagttcaatttgtctacttcaaacgtggataaaaaataaaaaaaaaaggcacacatgcaactaggggtggacaacatccaatccaatccaattgaaccgaattgatttaatccaatccaattataaaaaaaattggatatccaattacaattagattggattggatgataaaagttagattttaattagattagatcggttattggatgtcaatctcaaagtccaattaaaaaccaatctaattcaagtacatttatataaattaaaaaattatttatattgatttatataataaaaaataatatattaattatatttgtagcagttttttttttt

SEQ ID NO: 57076 - DNA, 668 bp, Cannabis sativa
tgtactctttgcatcttccatgttaaacttctgaataactttattgatgtacccggactgttttaagtttaataatcccttctttctggttctggtgaaaacttcgataccaagtatctttttaactggtccaaactctttcatctcaaattctcttttgagcttgtctttgatacttttgatcacaaatttatctttgctcatgatgagcatatcatccacatagagcaataagaacacggctgtagattgctccagattcttgaagtataaccagtgattgtatgcggatcgtttgaacctaatttgttgcatataagtatcgaatctcttattctattacattggggactatttcaaaccataaaagatctatttagcttgcacactaactcaactcatttcccttccacatgaaccccaagtggttacttcatgtaaatctcttcatccaggaatccatttagaaacacaatcttaacatcaagttgttcaactttgaactccatttgagctgccaaggacaacatcaaccttattgtcttgtattttaccacaggtgagaatgtttgagtatagtctattccttccacccgagtaaagcccttagccactaacctggctttgaacctcactggttcattctcattgattccctctttcacctt

SEQ ID NO: 57077 - DNA, 686 bp, Cannabis sativa
cacgtgttgatgtacattaattaattaatagtatttgttttattaacaacatatgcttctaatctacgtagttgttttataactaataacgattatacatttttgaactcttgtaccacaattaagtatttatttattatcaatataatttttcacacacttttcacatataaactaaataaattttttaaataaaatataaatttactttttttttttttttatggagtgagtatttatttttattttaatattatatctactatggtgtatttgctcatattccaaatatatgttgttggaattttttttgtgtttagagaagcaaataagtagttcatgtattagttaataatcaaactttaattaacaaagctagtaccatataaattagatcgtcttagaaagaaaaaaaattaataatactagattttaattatatgagaaaaattgaatatgcctttataatttgtttgataattttttgtacatgccaaattacataatattttttataatagtttcattaatgaatataatgattgggtttaagatggctaaaaaattcttttatattatgagaaattatttaagttaatgttttcacttaaataatactctgttagcgagtttattttaagagaactacacttttgtgacagcctaattttcaattatataaaatc

SEQ ID NO: 57078 - DNA, 1062 bp, Cannabis sativa
acaacctaaagtgaccctaggttcggacagaaccagttctcgaattttgcaagcttgaacttaaagaaaaccttccaaaaactcataaaaatagatctagagccttaccttaattactgatactccaaatctccttcaaataatgttggaaactcagagcaagattgagtttggcttggttttggttgaagataggtcacgagagagagaaagtgaaagggtgatgttatctttcttttatttcaaatttttcttatttttctaagtaaagggataaaatttatctttttaacttactctaatcaaattagataattaatttggaagatgccaccaaattcccactaaaaccaaaactaatctctttggcaaaattgactattttaccacttacatcacccttaatttatctttaggcttagaggtaaaatggtctaaaactataaccccacctaatactgaaattccaaatatcatttaagattgtcccgctagataaaatgttctaaactaataacccatgtgattctaatagccatccgtcgtatttttccatagttaccgagtaaaaatcataaaaataatatttttcacatatggaataaatattacatttagagtttaataaaatctttaaaattgagaaattataatctaatgcctatttcttgaaaatagggcctacaatataagatattcacatataataataaaatataaataattaatgctaattggcttactaatccatgttccaagtacgcaatcattacaattattcccccattaaaagaatctcgtcctcaaaagctaacctaaacaactctagaagttgagctctcatgtcggattctaactcccaagtggcttcttccaccttactattcttgaagattatcttgaccaatgctatggtcttgtcccgaagaaccttttccttcctattatagatttgaactggttgttccttgtaggacacacttattgtatttctaggacattgaaactcaaaatatgagtcgggttcgacacatatttcctcaacatcgaaatatgaaatac

SEQ ID NO: 57079 - DNA, 854 bp, Cannabis sativa
caataaagtaatttggtgctattctagaattagagtagagtcataaatcatcgatttattagacttgaatcagtatacatcttagtattgattttatagttttcctgctttgtttaatttctggttttatattctcttctactttgttattctctggttcttgatttgtgattttctgacatttacattgctaattgtttgttgattagaattttaagttagttttaattatgcacattagatgaatttttccacatataagagttttgtgtgttgatcatgtattttcttaaagaaagtaattataggttataatatattaagaaataacgagaatgagaaataaattcttatataattttctataaaataaattaatgaagtttaatcttcgtgttacaataatttaatatgatgtgtgtgtgtttttcttttcttcaaaatttcagttcatggatctctagctaggatgaaagcattgcacgaatatatcggtcttgtgtatcaatttttggtaaccctaacacattttcttttatttttacaacttaataattaggatttttacaaaaatattggattttgggtcaaaatttacaattttattgccacacaattttttttacaaaattaccgtcttttataaaacaactgtaaaacaacaaaacagaataattaaaaacaacagtagaacaactaaaaaataattgtaaaacaacagtgaaaacttaacacagtacacagtatgaatccgacctcgtacttagacccgacttaaataaaatcaaaaaataaaaataaaaaagaactttacagaacacacttttgttttctatttttaaaattgaaaaaca

SEQ ID NO: 57080 - DNA, 846 bp, Cannabis sativa
  modified_base (543)..(545): a, c, t, g, unknown or other
tttcttagacgagtatatataaataaagatttacaattttgttaaaaaaaattagacaaaaataataatgtgtaaatgtatatggctatactatacataaataaattattaaaaagaataatactcgcatatatttagctaatgctgatataatagataattattgttttattttaatatatatttgtaatataatatataaattatttgtactcaacaaaacaacataatttaattaaccagtaattcaactaaacaatgcataagcatactcttctttataatattttcggtaattatattatgttggaatctttatataccaaacgagccatagagtagatatatatattttaaagatggaatactttttgtaaattctttgattagacaaatgccaaataagggtaaataatattttggattttgtattttataaaagtgttgttaattaaattttttattttgttaaatgataaaatagactttgcatttttttaaaattgtaccattaatatgatcctgaattgattttttgtcaannnaaaatttaataataatatgatctagagatattatgacaaaactagttacattttttgtatttgttcgtgttagaaattgtgttaaagttaattatattaaaaaatgaaattattaaaaattgagtacaagattctatttttgacattttaaaaaatatacggtcaattttattatttaacaaaataaataatttaatttttataaaatataaagttcaaaataatatttactcgccgaataattatcaatttgctttaataaagaacgcagcaatgcgaatattcaagctcgaagattcac

SEQ ID NO: 57081 - DNA, 1533 bp, Cannabis sativa
ttattttatgttgaatttttttatgtattgattctgaaacttttgggcttttattccttttgttataaactttatattgatatattacatgcttaattttattgaatattgagagagaatttcatgctttaagtttaagattttctcataaaattataatgagattaattgttcaaatgtgaaattgattatgcataaatgatttttcattgttttataatgtttcttcacaatttaatttcctattattcgaaaattaataggatttatgttaaattttttgttttgaaactttcggattacacaataagatctatcctattttcttcatttatacctgaaatttaatctctggatagattagattaagaaacccaagcaaaatccctcaatttcctattattttcatccgttttttggccaaaatttcatctcgacctgattggactgcaatcgagtcatgcgaaccgctcctagacccaactgaagtttgaagacagccttccctgcaatgtccattctcggtagtggtgcattgggcgcgtgcttcaccgtctaacgttgtttttcgacatttttttttagcgtacctagaatttaatttatgatttttaattaattttttttgactctatttaataattattattgatttaatgataattatgcaattaagaaattattgaaaataatttttgacaattttttgagatctctaaatcatagaattttttttggacttcttctcgttttgtttgacatagtcactctcttatttttatttatcttgaccatgcagtctcaaccaatattcttactttcacatcttcgattatttgttgttctaaaattgtaaaagaaaacttgattgtttgatgtaaaaatattgtgttatccctgaattttatatattgtaaaaaatattatttattttggttaactatatgtttaattacttgcccagaggtagagttatatatattagttcacattttaataagtgggttaatattaaacgtgtatattttaattatttacccgaagataataatttaaatatatctttattattattttggcttgaattaatctatattcattaagaaatttatttacccaaaggtaataacttcttaattgatatgtattttttttattattaagttcatgaaggtagatcatgtgtgtgttatattctcacctcaaaggggagtatataatgaccagttgactctatacaatattttctaacaactacaaaaatagtttttcttgacgtttttaaacaatcgtttaaagtattcccatcggtttctataaccgtcgcctatatgactgtcgtaaaatgggaaaaataggcgacagttaaaaagcgtcactaatggggacttcctgactgtttaaaattgttgcctataacatggtctaggcgacagttttaaaccgtgtcctatactataggcgacggtcggtttaaaactgtcgcctataccctgttataggtgacgattttaaaccgttaggaatgtaaaa

SEQ ID NO: 57082 - DNA, 870 bp, Cannabis sativa
  modified_base (158)..(166): a, c, t, g, unknown or other
aacatgcggtctattacatcagtaaaagactcattgaggctgaagagcggtaaccactgatagaaaagctcacttattgcctaatcctagcaacgagaaagctaaggccctactttcaggctcatcctgttcaagtatacactgaccaaccattacgnnnnnnnnngcaaaaaccggatgcctctggacggtttctcaaatgggcagtgtagttaagtcagtatgagattgtctttcaaccccaaacaacaattaagggtcaagcattggcagattttgtagttgaatgtacgggtaaaaaagagagcattttagaaaaaaacctagagccagtacaaatgcttcagctgagtaatattattgacaagctggacttggttggaagctactacatgtgggacaggtcggctacagatcaactacccagtgcaagaatctcccttgtcacgcctggggcaacacctgcacactacagtcaaatttagattcaaggcatccaataatgaggccaaatatgaagccctaatcgatggcctaaaactagcgcgggagatgaaggccgagcacattgacatccgcagtgattcacagctggttgtaaatcatgtattcggagaatacgtggctcaaggtgaaaagatgatagcctatctgagcaaaatacacgatctggtcgcacagttcaaaggctatgctcgcaagcaaattccaagggaaaaaacatgactgctgatgcattagctcgacttgcaagcagtaatgtagatgataaagcaaatctaattcctatctagtttcccaaaaaacctaggatcactggcacggaaaaggttgaaatggttgataaatctccaaactagatgacgccaa

SEQ ID NO: 57083 - DNA, 1278 bp, Cannabis sativa
aacaatggagatcgaatatctctttgattaaagctcagtatttaaaataatgtatttttaattaatcatttattttaagctatatattttaataatgaaaattgcacgagggccggatggtgagtcttaacctggttcttaggggcatcgaggtcgatggtctgggaggctcgcttcctatttgcagttgtcttcctgggtattttgaggggctccacgttgacatcagagaaagtctccaaggcagttaacctcttctttcccttctttcttgaggaataaagaaggtcttcgagatccatttctggaagacaaaacaatgtgttaatatttgtttaaaaacaagaaaaagggaaaattgggaaattatttctcgcttacaggatttatcataatcgtaagaagacgaagaaggaagactataatattcactaaaatctctacatcctgtgatcctgaatatgtcgtaggaattaattggttctaaataccagctcgaatctatatgacctgacctatccagcatggtcccgtactgctcggctatcccataataggagttagtacagctaatttgaacgtggaatttggggtatcaactatcaaacctatgtgcaatgcgatctatgaggaattgattccatgtatagaaattatactggctatctcaaaaagacactaatgtggtacgctcggtcctaagcactgtgggtgaccaaccacattgattaccttggaacgctccttctttgccttcccaaggaactatgttctgaagatagtgcacccgagccatgtagtcccgagtatcctcgtcagttgggaccgaaatctgctgccacgatgcatacttgggatatttataatcactagtatactcgttctcagcgaggaggcccacggacctcaggttgacctcgttcaaaaggaactcagctgatcggagaccgtatggaagacccagcaggagcctacgtcgctcggccatctcgggggtaggagttggtcttttcgtaactgctgtcaaaataataagattataagtcagcgaggctaaaactgaagacatggaataatttaaaaccaagtttaaggcaaatagtcacttacgtattatgcggaaggtggttgtattgattagggagaggccactcatctagaagaagccctctttgaaatgggttttgtttggcaacccaacaattatcttgcgatcgcctgtgtgagtcccaagataataaaaacctcctccagcattcttctgttggaaatatttta

SEQ ID NO: 57084 - DNA, 1583 bp, Cannabis sativa
aaactagaacctagagctataaaatgagtttttttgggatatcctgaaggggtaaaagggtgtaggatctggttaagggaaaagggggattttaaataattattagcagagatgttatattcaaggaagatgaatttccatgtttgcttaaaactaaccctgcaggtacatcagatactaatcctgcaggaataatacagtttgacccaatcctatggagattagaggatcaagaagaacctgataccaatcaggtggaaccaccaggaggagaaccaaaaccagatcagattcaggtggaacacaaagaaacactaaaagagaggaggcttaaatagaagtacaacaagaagatgaaacaaaagacatataacaaacaggggctctagatgattgccaattgaccagagatagagagaaaagaacaccaaaaacctaatcccaaatacaacttcaatatctagaatgaagatatagcctatgcatttatgatagctatggagtcaattaactcagaacctcaaacatatgaggaagcaatggaaggacctaatgctaagaaatggttcaaggctatagatgaagagatggtgtcactcaagaagaacaatacctggataattgttttaagacctaagggaaagagaataatagcctgcaaataggtctacaagcataaagaaggcatatttaagggaaaacctgcaagctaggctggtagtaaaggttttacacagaaagaagggatagattacacagaaatattctcactagttgctaagtacaagactattagaatcatgttatccatagcaaaccaatttgatatgaagattgaccaaatggatgttacaactacttgcttacatggagatctagaggaagaaatctatatggagcagcctaaggggtttgaagttaaaggcaaagaagaaatggtctgtaagttgattaagtccttatatggactcaaacaggcccctagacaatgcttttatgataaagcatgaattcaacagaagttatcatgatacttgtctatactacaagggaagcactataaaaaaatgtcatctatctacttttgtatgtagatgacatgcttattataagccaagaaagatctaaggttgacatagtcaaaaaactactcaaaacagcatttgaaatgaaagatctcggtaatgctaccaagatccttggaatatctatgttaagagatagagataagggaaagctgattcttagataggaggactacattgagaagatcttagagaagttttctatgaaggatgcaaaagctgttaagcaacctataaccagccagtatactctatccaaagaacaatgccctaaaactgaaaaagaagttgaagctatgaaagatgtaccctattcaaatgcagtggggtctgtcatgtatcttatggtaagcagaagaccatatctaggttattctatgagtttgcttagtaaatacatggcaaatccaggaaaagttcagtagttggccatgaaaggggtattcagatacttacttgggataactaaagtaggtctggtctataagagacaaaatg

SEQ ID NO: 57085 - DNA, 808 bp, Cannabis sativa
gagtaagaatactcgatatctctccaagttctatacatagtattgttgatcatgaaaaccttatggataaacagattaacatagtcagcatagcatgtgtagtatcctttagataagccaatgctttaattattctattctttctatttgttatccaacgttgatactaatccatcaatgttactatgtggaaagttttatttagactttagtcaatcaaaaattgttgtctaatcataccttagccatcttcaaatttatttgcaacatgcgatatatagtacacgtgtattaatccacttccttgaatgcatcatgtttacgagcattcacaattaacacagctacatccattgaagtattaattcaaaacttgtccacttatgatctatgtcttatcttgatctttaagcataaaaatattgtagtaattgattaactggttccaccaaaactatttcaagacacaaaaccaacgtattagtcttttcgaactcatcattatgaagcaaacatagaagtattacttcagatgctcaagaaaatctcctaagcgattccaccctcataaagtttgtcaataaggatcgatagacacatgtataccttactaaaacaaactatcgtaatactctcattgagcatgtagtaatttggcatctttaaattcaaatgtgatttcaagatttactaattttgaggcctagtccaattttctaatgagagatcgatatgacaaaatatattatagtcccatctgataactaagcggtagatgtcttatgattgcttaaagctaaaagaaaat

SEQ ID NO: 57086 - DNA, 916 bp, Cannabis sativa
  modified_base (879)..(879): a, c, t, g, unknown or other
cttgtctctgttgaagactatagctaaattaacattcaccatcttgggcttaggagaatcatgtgttctcttcttctcgtcaataaagtgaattgagcgaggtgacttttttctgtttatctttctgaatatacgtaattcgaagtgaaggaacattcttctttgtccgagccggttttgaataatatattggcatttttcttactgcattaactgttagggttttttatttttataatccatatagaaattcacatataaactaagaaaacaaattaaatcgtaaccaaaattcacatagcaacccgcacagaaactagcgaagcaaccagcatagaaagtttagaaaccaccggaacaatcaaatcgtaatttttttttaaaaagttaaaaaaaataatatatgtagtaatttctctaatcattatgataatgatatttactactatattccaagatgtatatatttgatttcgaatcctttattgattagctagcaaaatgttagcttgtacaataactttgtctgtgaattaatttattactcgaaatatatgtacaatatgtcaaatctaaataaactgtaaaaattaaattgaaacaactggcaaaaaatacaacttcaataactttaacaaaaaagcagaccacccaattattatattggatccaacccacctaatacgacgtacgtgaataaacgaattatatttttttagaaaaatattacatatatgttaattggataaattattttatatttgaatttcaacttatcaagttttatttgatattatatattttttttttgatgagtcaggtgattttcattactccaagaaaatttgtacaactctatagcattctccaactagagantctaaatatctctaatatttacaaagcttcaaaccaa

SEQ ID NO: 57087 - DNA, 667 bp, Cannabis sativa
ctctctagggtaaaatctctcgtcgtatgcccagtgaaatgcatcactatttatagggctatgaacttggagaagaagtattttccttctcgttacaatggatataagcagaaagattgcataataaatgcagaatacactaatcgtgggattcggatagcttgccatatctctgtgatctgatccccaagttatagggatttctttgatgactcacgatgtgaaagctgaatcactaagtgttgattgctctgcgcggattgctgatcgctttgctccagacatgcctatgaggcatcctgttcggcttataccctcaaagcagatattcgaagttgattccatgtgtcaccatcatgtgatgccacgtcagagtgaaaaaattgggataacatttacccccaagtctgtaccgaacttccgaagttgcgcatagacttaatccgagcctcttttgcctttggatggggacacgtgtcgagcgcatctgtccaagactcgatgtgaggctgactgggtgtcccttcgattttcggctattaatgctctgacaatcaatattacaaaatccgatttctctcaccacggttgaaggctgcacttgattatttttgatttcccatatttgctttttagaggggaacaaggcgtctgaggtccttttgaa

SEQ ID NO: 57088 - DNA, 1695 bp, Cannabis sativa
  modified_base (1396)..(1410): a, c, t, g, unknown or other
tcataggacgagacatgcgggtttttgaatctcgaagaaaagggggtattcataatatctgggtgatacgactcaagctcctcattagagttgtgtcaagatgatttccctaattcccccacttgatatctcctaaacttgtcctccagctcgtttattcgtaattggattggatcttcttgctttggaccaagctgttggcgaaggtcacgttttttctgattcaagtgctctcacatatctagttgggagtaattgctggtagatttcgtcttacttatagaccgcgtcctactcatagactttgtctttaagtggctcgctaatttacttgtttccgtactttctcgatcattagttcgttgagtactttctcctcttcgagttgatcagctatgggttctatcgaagtcacacttgctcttcacgctctgttctgtcctctcgagagaggtttttcgtatttccccccatcagggtatgtacaagtcctcgctctatgggttttggaagaacgttggtgattcctagcaggtgatctctgttctcccggttaagttccaagatcttcctcatttccatgatggatttcttgttcaccaatttccggttgcctcctttctggctgttcatcttgattctcagaggatgtctcattttccccgggttgttcttcatgggccttttcctgtctcctagttcgtgagccacaaggtctcccttgtggtcttctcacttcaggttcaggttaattttgagctttcgtcccctgcaccaccctggccgagactgcctctcgttctaactcaacgtttcgacactacgcctcttccagacggcatctcaggcggcggctttctgtttcataagttctttctcccacagattgggcacctccacggttgagcttttcatccctcatccctggattctgaccattcccacgctgagctctccttgagtgcgttgttcgcgtaataggaccaacattgggttgagttctccgggcacacgtggtccgagcactggggccatcctcaggttgatcccttctggaacgggtggtccttcttgactgcggattggtagatcttctagagcccatgggctcttttccaaaacgatggttagtttcctcatgtggggtgttaatattctctggatcttcagccataaaggagaatgtttttttagaagaagggagggctttttctgagattttttttttacagagactctcaatgaaagccccaaactgttaacgttgatttttgttaaccaaatttgagcctcacgatgataattcaacaccgaaaaaataaaagctatagaaaaattatatgtgaacacagggttttttacgaggttttccagttaaaattctgcatagtccacnnnnnnnnnnnnnnnagatttctgagtatttttttagggtctctttcataagagttttttcctcccttttttgagattgcttaccactatttataattgcatagtgacagttaattacaaagctgaccaaaatatgattacggttattatccctaaaatcgtgggatctgattacatatcacaaaatgtaaacgcggtgtataattttcaaaatcatatagctgtgattttctcgcttttaatgagtcaaaaatatcgtgtattaaacacgtctttaattgttgaatctggagatgtctc

SEQ ID NO: 57089 - DNA, 926 bp, Cannabis sativa
gaattactactcctatcattcaaagaaagataatcattaaaatctccaataataagccagggaagtaaaggagcattagaaaaaagtctatctaaaagcgtccaagtatgaggtttatcacaaatataaggggagccataataacatgaaatatgattagttatattatcttcaaaagtgacaatacagtcaatatgatttaaggagtaattcaaaatagttacattaacctcctttttccaaaataacaaaagacctccaccaagaccacaccttggaacctcaaaagcactgtcaaaaaagagcttggtcctaagcacatcacactgaccagctaataacttagactccataataaaaaaaaaactaggcttatgattatttacaataagggaaagattacggaatgcccggggactccctaacccacgggcattccaactcataagcatcatttttctgggcgggtgttgcggagaaacagcagctgaagggacttcattgataacagggccagcacgagctcttttgaaaatattcctaagggaatctcccaccataacagaatgaggaacaaaagaagagcgcttcgcaccagcaatggctttacctttggacttcttagaattccgagcaacatcttgaacagcaaccgagtcaatatcatttggaatatgtaccgcaatagcagttgctggaggtacagattgaaaagcatcgcaatgaacatcaacaggggaaacactacgaaggccagggctgaaaccttgatcagatgagactctctcaaagcctgagaaggtagaagcaggaataggaataccatcattgattccttgagagattatctcatccctccttaaaggagtggcagaagaggatgaaccagcaccaacttccttagttgtaagaaactggcttacagc

SEQ ID NO: 57090 - DNA, 1086 bp, Cannabis sativa
tggtaaaattttttaaatatttttttattaataaaaaaagttttgaggggaaatgtttttggtaaagcaataagggtattaactaatattgtacactttttatcaacaattattagaacaacatgatgcattttattagaaggaaaaattttaatattgtacactttttattagaaggaaaaatttatatttatgttttgtattatattacataaaatcaactagatttttttttattaaagaaagagtataataggaagtagttataattagtacaagacaaaacatttatgataacactaaaaatgtgttataaaaagtgtagttgattgcaattcataacactttaacatgtgtttagttaacttatatgcaattaattaaaagactccctatttaattacatttttgcacatttatattaaatataatataataacattatttttgtgttatgtattataattacttaatactaatttagtgttatgattcttcatgttttaatattcattattaaccattcttttattcaatttggaatgagtttcttatgatcatcttggcctttttttcttctcatgagaaagcattgttcatacaaataatgtttattaatttatgtcatcaatatgtcttttgaattaaggttgctatttgctaattaagaaatttcttgcgatcataatctctattatttaattttcagggctttcagatttgatgaaatttctctctcatatatgttatggtgtttaaagttattgttgtgtgttgttttatttttgaatatgtactctttttccctaatagattttttcccatgtgggttttttctatgagggttttaacaaggcatattctaggttagtgatttgccaattccaatttgtgatttctcattcatattcggattgtttctaaacttttttttgtactcttttgtttcacatgaataaattctacatgttttggtgtttgttgagcatgtgataggtgatttagttgggtgccaacctagttgggatgtttctagttctaattgatgctccttcaccaaattaagttataaagcaacaaaaattc

SEQ ID NO: 57091 - DNA, 2350 bp, Cannabis sativa
  modified_base (2078)..(2088): a, c, t, g, unknown or other
cgatctcccattcaccatgggagaaccaccaatgcccacaactcaaatgcaagaatgtatagttgtcgatatccctttggcttacaacatactaataggtcgcccaaccttaacaggaatgggggaaataagctcaattaaacatttgtctctgaaattccacaccaattatggagtagggattgttaaaggcgaccaattattagcttgtcagtgctatagtgtggaattgaaaaatagaagggaaaatcatcaattgatggtgattttaatagaagaaaacaagaaagagatggaagatctggatcctaaaatgcctgatgaaaacaaccaactcaagcctattgaagaattggaagaggtgaatttagatccaaacaatcctactaaatgtttaaacattaggaagggtttggaggaagaactaaaatagccactaatcacttttctaaaggtaaaccaagatcaatttgcttagagccattcaaacatggttggaattaacccgaatgtgatatgacatcacctcaacattggcccagcttatccttcaaaatgccagaaatgatgacctttagatcctgaaagacaaaatgcactaaaagaagaggttgacaaactgttgactaataacttcatacgagaagcattttatccctcgtggatatctaacccagttcttgttctgaaacaaaatgggacatggagaacttgtataaatttctctgaattaaataaagcttgccctaaagactactttctattattgaggatcgaccaattggtagatgcaaaagtaggacatgaactaatgagtttcatggatgcatactctagttataaccagataaaaatgcatgtcccaaattaagagcatataagcttcgtgaaaaatataggactgtattattataaagtcatgccattcagattgaagaacataatatgtcgattcgggcatccccaaaagattgtgtcagacaatggtaagctgttcaacagtgacatgttcattgatttctgcaacaggcatgacatcatcaaaagcttctttgtcgtggcccatcctcaagcaaatggacaggtagaagctgtcaacaaaacccttaaggacaccctgaagaagttccttgaggaagcaaaaggcaactggcctaaactgctcccagaggtcctatggtcgcataggactaccaagaagacggccactgggaaaattccatttgctctagcttatggctatgaggtcatgttacgtgtagagctagtgccatcatctcacaggagaacaacctatgaccaacaaacaaaaaacctgctggcagagtcccttgacgaagtagaagaaagaagagaataggccaacctaaagctgcaagcctaccagcaaaaggtagcaatgcacttcaacaaacacatcaagagtaaaaaaaaatttatagtagacttggtgctccgaagagtgttcctgaagactaaagatttagcagcaggagtgttcaaacctaactaggaaggcccttatcaggttacaaagatagctagtaagggagcctaaaagttgggaaggtacgacaagaacataaagctcatcctcctactaagaaactggaatgaagagcaccttcgcaaatactatcagtaactagcttacagaactctactccaaggtagcggtttaacctactcaacattagagtacaaaaagtgctagcacccatggcctcataggcatggtctcccattgttcttcaacagtggcctctacttttctagttgagcaggggtggtcacttgacatctagaagctaattttatgtaatgtaggcttgtagattcaatttatgtaagttgcacaacaacaaagaccaattaatgaataataataatatttgtattcttgtttattgtctcaatgaaccacttgcgcatagattaacttcttaaagttagtcttttagttccacatgcgtactgtggtacccttgtaagacaaaacccaggcaatgtttgtgaaacttggtgaatagcaagtgactaagagacttatctgcatggtcacttgggggcacccatannnnnnnnnnnatcgaactagcacaaagaacttatacaaagaaattttaaagcttagtataagctactaaacctgcctctaagtcatccaggcatacttcagcttggcaaagtaaatccgaacccttacttgtcgaggccataagaagacaaccaagattaaagactgattggttggtcagacaatccatgataaaaaaaagcaacaggtccaaatactagtagtgttcaaaaacggagggcttatgacaaaagatacgaacatgaaggcctt

SEQ ID NO: 57092 - DNA, 1099 bp, Cannabis sativa
aaattcacttgaaaagccacttccatcgtatattgcagaagaaaaacatttaaaagttgtgtccaatcagcttccttagaccttagccatatagaataaccccaaaagggtattgttctgcccctgtcgtaaacccagtgaccaccaaacactatgtggtttagttgaagcataaaaaatacaaacctctcatctacagaaaaattcttgaagccaaattggttatacttaccatcaaatccttttaacaccatcactgtagtaatagcactcgtgatagacattaattgtttaattaatatgatcagtataaccattctcattaaaggataatgccaaatgtcactaattagccaaattgaagatagaaaattattagtaggtggccctattccataagaaatacctggcagtcccaactgatatttctcatccttgctcttggtgatatttctgccattgtctaagaatccagaaataaccaatagcgagacaccagaattatcaacaaccatccaagaaataaatgccaaaggtctcttaagagttggaattacaaaatcaggtgcacatttcttcaaaattaaatttgaaggtgaaccagttcttgaatgttggtcatcgggagactccaacaaaattttcagcaattcctttctaaaaaattgcaaacgtgaaagactaaggttaccttgttctttttgaagagtgattattttccctctatcaaaagtccagcgagaaaatggcttccccaacttttcttcaattaattccggccaaatacgcacccctccgtccaccctcacggcgatccccatcctttgctcagtcgctggtggtggtggatcacaatcgacaagtcgacacttcatgcgattaggagaagaagaagaaatcgtggaaaccatatctgggtcccacttcctttgcaacctgggacctaaattgtccattgggcctttagtaatgtttaatgggctgtcatttatacccaacccccaaacaacacaatgacctaaagcacacaatgggccatattcaagggctaagttgggccttaggtagggtttccaaaattcaagcccacatgtctcca

SEQ ID NO: 57093 - DNA, 2189 bp, Cannabis sativa
  modified_base (648)..(660): a, c, t, g, unknown or other
  modified_base (776)..(784): a, c, t, g, unknown or other
cactcttcagttttacttgctcttaacatgacatgatacatttttgcttaaatttttgacagcttttatgtgaaaacctaaaatagtatatatatatatatatatatatatatatattatatgtcgtagaggatgtttgctaaacataatctctcaaattttagtagattaggtatctctttaaaatgccatttatctatacttataacttagtttgatgtcctacttgtgggacgctctacttagtttttgtcaaattaacacactttggtgctataaactacttttaaataacttggatatgttatcacgtaacttatggtaaacatataatagtattattatttgttgatcaacatatttttagtgttttaatttttgttaatgatatggatgatgatacttccagatacctttcatttaaataagaaaattcattgagctgcatgtgttaacattcaatgaaaattttgatgttgctttcttatgcacaaagaaaatataaaatatgatacattttcgattgaccttgtgccattgtttctttaagttttccattgtactaaattataaagggtaaatactattttagatcctgtattttgatattttctgtatctgtttgtgttagaaattgtcttaaagttnnnnnnnnnnnnnaataaaattgttaaaaattgagttcatgtcctatttgtacaattttagaaaatgcagggtctattctgtcatttaataaaacaaatggtcgaattggtaacttttgcaaaacacannnnnnnnnatagtatttacccttaaataaaattgtttgaaaactccccttggcacgtgtcctacaaatatttatatatatgtatatatttatctatatgcattaataaaatcatgccaaggcaaggggcatatataatttcatagattctcattagaagttcctattgagccttgtaagttggcttaggaagagttgaaccaaagatccctttattctagtcctataccatgtttttttttttgttgtaaggcctatgccatgtttattggtttacttgaaattgcttatatttaaatactatattctttcaaaagctatgatagagttattgttccgtcaagtgcagcaatgccaaaatgaattcatgccacataattcataatgaacacagataatattatttatgcttctcatagtcttttgatctcttcaatcggtataattatttcacttggtatcatgcttggtattgtgttttaactaataatgtaaatacaattattgtttgccaatgtaacgtgtgtgaatgaatgaatgactcatgcaggtatgttacaagtgatgatgttttggagttgaaggggaaggttgcttctgaaattagtagtgcagaggagctgactcttacagagctgatgcttaatggtgtgtttaaagacattaaagtggaagagatggtatctcttctctcttgttttgtgtggcaggaaaaacttcaagatgcaacgaaacctagggaaggacttgacatgctttttgtacaattacaagatatagctcgaaaagttgctaatgttcagcttgaatgcaaggtactcacagaacttcctttatatagtcgacttttcaactgaagttttccctgatatggagatcaaatacaatgttttgtgatgataagtggagtttgactattgcttttgaaaaatgattattgggcaagctatgctagttaccaatgaaagttgcattgcatgtatgttcgtatttctcaattttgttttctgtctatcccaggtccaaattgatgtcgaaagctttgtgacctcatttcggcctgatataatggaggctgtatatgcttgggctaaaggatctaaattttatgagatcatgtcagttactccagttttcgagggtagcttgatccgtgcgattaggagattggaggaggtccttcaacagcttatagaagcagctaaatccattggagaaactgagctggagtcaaagtttgaggaagctgtttctatgatcaagagggatatagtgtttgcagcttccttgtatttgtaggatcatctggtataatttctgataagaaggaattgcatcagaatcatacattattttcttaaccccgatgcgattaatagtgcaagcttctacaaaatggttttctgagtttcta

SEQ ID NO: 57094 - DNA, 993 bp, Cannabis sativa
  modified_base (208)..(214): a, c, t, g, unknown or other
  modified_base (317)..(317): a, c, t, g, unknown or other
ataaatggctgagtactcattttagtgattatattagctcactaaaatatcatttataggtagctaagtattttaagaataaaatacattgaaaagtgtaacgttaaattaatccatattctatgtaaatcatctatagaggatcattgattattgggataataacaaatggataatcttatagcatatctatatcatggaacatatnnnnnnntctatataattgagagtggaattccaaattctatagtggtgcaaggaggaattaataaggtagagaatttacttggtaaactctagatctgcttattggaagntcggttatataggcccatggtacccatactagggctgcacacgggtcgggtttttcgggtttttcagatttttgagtttgggttttcgggcttcgggtcttggaattgcccaaccgaaccctgtttttgggtgttcagatttgttgggcatctagttaggctcttcgcgtttggcatggccgggttagggtcctattcggttgagcccaaatgtttaatttctgggctgaaatgaaatttaatttttaaaaatgtcatttttgtatttttaacattgtttggacctttctttataattaatagtttttgggcatgaataatgaattgaatttggttcatacccaattaaaaaaattacattcaatcaaaacttaaactaaactacttgtccaaataaataatcattaattattcataattacttaccaatttaaatattaaaaagaaacaacactataactattaatcaaaacatataaattaaaaaaaaaaaaaaaaactagaaccaaagctcattcaaacccatttattatttcattattacttaccaatttaaatattcaaaacaaacaacattatagctattttacttcaaaaaaaaaaacactatagctattaatcaaaacatatacatgaaaaaaaaaaggaaaactagaaccaaaattcaatcaaaaac

SEQ ID NO: 57095 - DNA, 847 bp, Cannabis sativa
ctcttcggattttcctttcttctcgttaacgtcgccgtctgttctccgttttctcttacctttctccattatacgacgtcgtagtggattaaaatccagaataaagattttacattagaaggaaatgctctctctttttttttttggttatttgtttgtttggtttggagaggtttttaatgaatagagaatatatattaaattaagactgcgtttggggaattttttgtaaaggaagaaagtgacgtcactcgacaagaggattgttacgtcactgttgtgacgtgtttggtttactattttattctacaaaaacactgaaacgtggaggtttaataattcaaacaactttgttcaaaaaaaaaaaaaattattattcaaacatctaatacgccaaattctgccgtttgcttttaagtatttaagaaagttttttattattattattttttttttatggtgtgaatctttgatttgcacactgttttcttgtgaaaattgtatgcattcttcaagtgtatctagaaaaaaaaaaaaattagttggaatcaagctatagttatttaaactatagttatttaaagatattttttaaaaattttaaaaaaattatattataaattattttaaataattatattttgtacaccaatataaaagattagattaataaatttttttaaatactaaaataattaaaaattgcccccaaagtagtaaagagtattgtaaaaatactttttttttatatatattttttaaaatttataaataatatttaatacactatcataaaaaataataaaaaaaaaaagctaacttaaatatcaaaacatatgtttattta

SEQ ID NO: 57096 - DNA, 781 bp, Cannabis sativa
gtagacgtagctctattactatcacgacacagggagtgaactactataaatttcttgtgtctaatctatttacttacttaaacatatatttcttctcttgtcaatccagcgagcgagtgttggccagatttttgcatcaacagagtttgttagaattttactatgggtcgaagcccatttagaagtttggaacccctttgggttcgattatttaaatataatcgaagccataaggtagcacatgtaaccctatggcttcggttatttccaaataatcgtagctaaaggggtccacgataaattttttcccttttagtttcatttttcctaatataacagaagttatatatgagtgactaactaatagtagtgggttctagaaggctatggcttcacttctttttttttaaaaaaaaaaaataagtgattgataaacccgaagctaaaagggcattttgtaacagtggctctctcttgatctcatagaataatctcagtcatgtaaaaatgagatattttttttaaattagatagtaaaattaaatataaaaactctaatttttctaataatacttagataatatctgttaaaagtgatatataaatattaataatattatatcactaagctatatatatatttattactgttagataagtctttcatgtataatcatgtaaaaaaataatcacaacaatatctttcatgaagtttgagagtgagctctttgaaaagagactcgcgagtgtgaaaagttagcgaatacaatatactctatga

SEQ ID NO: 57097 - DNA, 2305 bp, Cannabis sativa
  modified_base (799)..(804): a, c, t, g, unknown or other
aaaaaaaaaaaaattgtgatagttcaaaccacataaactgcagaaaccacaccgtactgcattattttttgcggtgcggtttttgcagttttttagtatcgcggtgcgggtgcagtttgaaaattagaaaaaccgcatgtgcgggttggtttgaaaaatgattaaaaaccgcaccacccgcaccgcaaacacccctaatatatcgaaaatgtatggaaatttaaataaatacccaagttagaccaaaaaatcaaatcctgctatttcaaagaaaaaaaatagcaaaacaaaactaatacaaacaacaaaccacacatatctactggaaatgaactatatacttttctaaatatttaagaaattatttaaaacacttgcccattattgtgcgtcttttggttgtccatggtggaagagcagtgagttaggcattcgtgggatggtcgtgcggtcctacgatgtatgtgatcgttgtggtctctcctaggggtgtttgcggtgcgggtggtgcagtttttgaccattttttcaaaccaacccgcacatgcagtttttccaatttcccaaaccgcatccacaccgcaaaactaaaaaaccgcactgcgaaaaatagtgcggtgcggtgcggtttatgcggtttggactatcaccaataaataaactatcacaaatacaacaaaattaaacaacatttatcaaaaataccataagagttgaaaataaatatgaaaaaaaaaattaagtttcaataatacaataattagtgagctttggattgaacattcacatattggacctnnnnnnatataaaaattagtatttttataaagtgcggtgcggtgcggtttgaaccgcatattaataattcaaatccgcaataaccaaaccgcaccgcgcggtttaggaaaaattcaaactatatcgcgatcgcaccgcaaagaatttcaaaccacatttttttgcggtgtggtgcggtgcgggcggtttgagcggtttcatgaacacccctagtctctcccatgtgggtcgtctctctggggctgaggagagagatacacagagagagaagaaagttagagagaaaaagagaatttgagaggtttctaagggcagtggtaattttggtataggatatatttgtataaaataatatagtgtaataaaagggaatttatgtacgttgtgttcattggaccacatccaatatttttaagtctatccagatctgacctagttatatattggatgttagattttaccattcgatccgatccaattaatcatttcagtcatccaatcaatttagcatccattggatgttggattggatcgattctatccattggatgtatttcatgtatatctattgtagtaatttgggtttatcaaaaatattttagacctagtattttttggatcggatcggattcattcaatattttagatccagtattcaaaaagaaaagtaaaattttaatattaatttttatatttacatatattttttatgtataacaatataattaaattactcatccaaactaaataaaaatattaagaagttcgattagatgttagatgtattggatttttagacaccccatccaacatccgatccgatacaattgaatatttaaaaataacatccaatccgatccaatcacaattgaatatccaatctttggcaatagttataattggatcgatcgattatcattagatttgattgatttatgcacacccctagtctttaggttattgaaatatctttattgataacaaactattcatacatatcatataatcaatatacatatatttatattatattaaatgtaattatgtaagtattattttcattttttgaacattagaattcaaattaaactcactgcacatactcttttatcttttgtgttatattaaatatggctataacatagttttttgttttaacattacaatacaagtttacaacatctaaaaagtattatccaatcaacatatcctaaaaaaaatatttttttgttattgttttcttttaacaataaaatatatatataaaaaatatatatgtttattaaaaaatcattattattaaaaaaatatatttctattattattttcttaaaagaaaaataaaaaaaaaataagaaaaataaaataaatgtattatatttcaaaaaaaaaaagtattacttaaagtaaaattataagttttttttttatataaataatacttaaattaaacgtttcttaatatataactgatcaagtagtttatttgttgtacgtatgttattaa

SEQ ID NO: 57098 - DNA, 861 bp, Cannabis sativa
aattgtgagtagaaaagcatataacatataatatattatcgacttgtatttaggcgcctatgcacatatttacaaggcttaacagatgatcaagaacgttcttaacaaaagtacgacctttgtaccacatgcactaagtatttctactatactagtgttggtagggctaaaccgtacctcgagtactactaagtgttgtaccacatgcactatgtacttaactgtactagtgttggtaacaccagatcgtaccatttgtacatcacatgctataccaatacactcaataccactaccgtactagtgttggtagtatatgaatcacacaattagcaacctcatttacaaaattaagtgtggcagttgacctaaatataaaatcacgcgctgagtggagaccctatatcacaatcacattaatgggtaaacaacttgctaaaactttctcagggacctaaactccaaaccaaaagattctctattgataaatagcatggcaataccctaaatatcaaggaaacatcaaaactaaagctctaaaaacttcccaaactggtaaactgaattcctcaaacaaaaaactagttcctagggtcctgcctgataaatcggttaaccagttctacagctttagtagaaccggttaactggttccctatggaaaaccctaaaaacctcatatctcactcaaaacattccaaaactcaatcaaactttctaaaacaccttgtaataacacctaataatagtttaaaagcaaaaacagtagcaaggatgcatataaatgaatttcgccattattgagccaagtttgagttcttgaactcaaactttctcaacaactgaactacttactaaaat

SEQ ID NO: 57099 - DNA, 849 bp, Cannabis sativa
cgagaccacctctagctttaggaaggcaaaggtggtcccacgcctttgggtataaaccacggttaccctgttcacagccccaccaaaaatccctaaccattccgtcaattttcgaagcaagtttcttagagagcttggtagtttgcatggtgtacactggcagagccagacccacagacttgataagcgttgcccgaccaactttagacagcaattttaacttccaaccatgtaacttcgaaataaggttatcgaggatgaagttgaagtccgcatccttgcagttagatctaaatagcgggagccccaagtaattgatgtttgtggtagtcaagttgagccccaactcctgcatgataccccttttcatcccctcactggtattattgctaaagaatatagaggttttgagtttattaacacgttggcccgaccaattacaaaatttctcaatgcagctccaaagacctttggcttctgcaattgtcgtctacccacaagagatcatcggcaaagaaaagatgggacagagtagggccttctctactcagcctgatgcctttaatagttccttcttcaagtgccttctccaggatccgagaaagaatgtcagcagcccatataaaaagatacggggacagggggtcaccttgtcgtaacccacactcaggagtaagactgctaatccttcctccattaagatgtatattgaaagtagtagtagtaatacactgggaaacccatttcctgaataagtttggaaccttgaaactgttgagaacatgatcaataaaattccagctaagtttatcatacgctttcactagatcaattttgattgcgaagagg

SEQ ID NO: 57100 - DNA, 1457 bp, Cannabis sativa
  modified_base (468)..(469): a, c, t, g, unknown or other
tgaatatccaaagatttaaccctaattataccataagtagatctttattttgggggaatttggatgggaagttgttgtatgtgtgtggggataagtgtgaaaattgagagagtatgaaaaacttttagattgatagcaacttaagaaaaaaaaaaggaaaaaaagaaaaatttgacaaccagtctcaaattcagaaaagataaatacaaagttgttgcaagcatattgaaaaaaaaaagagaaaaaaaaaaatatatctcatgtaattagaacaaggggtattgggattgtgtgaaaaatattgtgagtgacataattggagaagcttattgtataggaaagcctaaatgaccatttcaactacctttaccctaagcctaagattacaagcctaaaaagaccttctgattcttggttgtgcattaattcatattagtagagaatagtaagtattgcaagcatatgganntcagggttagtggattgatgattgtaattggcatgcataaagtggttcaattgtttgttaattacattctatggtttcatgagctaattaaatgaaaataaattgaaatctgtcaagggtgtaattgatctaaaattctggattatatgcataagtgaaacttttttcataatcatgttattgaatctacttgaaaattactcatgtttttaagattgacttgtttaatgtttatttagtgttttactcgaggacgagcaaaaagattagtttgggagaattttttaggttatttagtattaattttagattaagtttagtatatttttaattgagttttaatcgtgtttagagcatttttacaattgttatcttttattattgcagatttaaaataaaagaagattagaaaatatctgaggaaaaagatgggaaaaagataaaaatatctcacaaacagatgatatttaaaatagagaaaattacgcaaagaaaataaagctgaaacttcaagcgtgaatgcgactatcttctagttatattttgaaaaaagtcaaaacataaaagttctagatctctcttttatctttcctgaaaatcttaactcgtccgattccgagtaatatccagagagttatggccaaaatactatcattcgatgcaacagaaaaattactgtcgataacgtgaaattccaacacaggtcgcggcatgataaagctgggccgcggcccgcccccctaaacagcagaaaaatcatatttttggtcgcacgtgagttttggtagtttactaattcgaataggcatttaacatgtgcgtttttctatcttttcagtccctgagagcctatataaagggtgaagtcgagttgattttagggaagcaagttagagcgaaataaacagcagaatatagagcacgaatttcagagaccgaagtcaatactggaggcattcttcaaagggttttcagcattcttttcttc

SEQ ID NO: 57101 - DNA, 1975 bp, Cannabis sativa
aacattttaaaaaatgaaactatagtatgtatatgtggatttctttactcatttgatttagaataattagtaattttaactttaaattttggataatattatttttacctaataaaatataaatttattaagaattttcataaatttttacatttttaaaaatgtcccattattaagtgctgatatatttttgttaattaataattttgtctttgaagctttaactacaatcaaatcgtatgcctcaaaataaaaataaaaaagattcaatatttttttgtagtaaatattaaaaaattaatttagagcttaaaaattatcatttgaatgttaagaaaattaaaaaaaataaattttacaaataattaaacaatttaaaaaattatttatttattataaaaaaatttattttgatgtaaaaaaaatattaaattttaatttttgtaaaaactaaattttacgggaacaagcttgagtctatttttttctacgaaaatttatatttttttaagtaaatataacattttttagtttatttctaacttttttttaaaaaaaatagtaattttatatttttattgaattttaattattttttttaaggtatgaatttgtaattataaataagtttaatcttttcttttaaaaaatcttagtttttttcaaaatatttattagattttcaataattttagtttgattttataagatacgtatttataaataaaataatatttaaaaatatttttttaagaataatttagaatttttgagtaaacttaatatttttaaataatttaatacttttgtcaagttttttgtagtatattataatttttaaaattaatatctttttttaataaaatggggtaaaattatatatttctcaaaatttagaggataaaaatactaacggtaaaagaaacagaacctaacagaagggacataattatataacaatcagatagtatcgaaaattcatagacaaaaatactattattctttcatttaattgtactggtaataattttaaattagaaaggacctcattttttaaatctaagctaaatcaattttatttttccattattttttttaaccacttcttttgaatttttcattattcattggggaaaggaaaggaaacaaacatgtttgccaatactttttttttttttttgaatttgtaacttcattaattaaccaaataagtacaaacttaaaaacaaactcagttggaatatgtgcattccaaactctctttctccgaagtcctaggaatctcttaactaattagttatataccatattatacgttgctaataatttatgattaaaaatgataatgggtatgcaacattttgttttgataaaaggttattaatgatagagtttaatcaaactaggcgaagcattccagtgtcgtaacacatacaaaaaatttgtactaaaatttaataacgagtctttttttcgttgttgcttctttttttcttttgagaggacaccacggaattgatattttcatttccagcacaacgcaatcaaaatgcttaatggcctaattcaatgtgataggtacatgaaaacataattaacaaaaaaaaaaggtacatgaaaacattgggaaaaaaaaattcaaagtatttgactttatttatttatttttcaaaattttaaaattaaagatctgtttgttgtattgtatgtagttttgtaggttagtgtactcaaaaatcataacagaaatttttaagttatacccgctcgctagattggcgagaatgaaatatttgttaagtataaataaagagatgcacaataatagttcacttcttatatcgcgataataatagagctacgtctacttcgagtttttattctcgcaagatggtaattacagaaaaatggttaagtgtttaagctttaatttttaaaaagagaaactaacagagatggtctgaccttataacta

SEQ ID NO: 57102 - DNA, 831 bp, Cannabis sativa
tggaaagctaaaaccctctccaaagccggccgggcgactctcattaagtcggtaggcctgtctatgccgatgtatgccatacaaactactaagctatctaatagaatggcatccagaattgatagtatggtgcgtgacttctggtggggttttgagaaggacaaccacgggctctatcttaaagcgtgtgacaagttatgtcttccaaaatctttgggaggtctggggtttaggaaatcgagagaaatgaatcaagcttttattgccatgtgggggtggaatatcttgaataaaagccaatctctgtgttgcagagtgcttactgctaaatatctgagaggaaaagagtttctgacttgtgattccaagagttctgattcctggttttggaaaaacgtcattaaaactaggaacattataaggaaaggtgcctgcaagatggtgggagatggaagggatactcgaatctgggaggacccttggattccccacttaaaggatttcagaccaaagcctcgctctttaaatgctggagattacacttatgtggctgatctgatctcagatcgccgatgggatgttcataaacttaatagcctgtttgatcatgtgactgtgtcggctattttgagaggaggagttccgagtggtttagggcaggacaagtgggtttggactcttgaaaaggatggacatttctcctgcaaatctgcctatctctctcaagcattggggagagctccccagtgtgtagtggctccttctttgtggaacaaactctggaatagtaaagtgatggaacgatacaaggttctctggtggtgcatcctc

SEQ ID NO: 57103 - DNA, 858 bp, Cannabis sativa
tgaggactgtgcaaaattttctttaacacataagcatgatttaatatgaaaacaaaaacagaatgatacgaggatattaacacacttcataagatcagagttactccaatcattgtcaacttgtggttgaaatctcgtaatagtaacaaagtaatagagcttaagtacgtatttgctgtatttgcttcacacgaatagtgagctgaaaaagccattagagaattagttcaaaatttgtgctgaaaaaagccaccatcttggatagacatataaagtgtctagcattgaaattgaatgtgaggatattaacatatttataaggccataaattgactcttaaccatgatagggctagaatttatagtgaagggagcataatgtggctccatgcttttatgtatgtactatatattggaaactacatcacaaacacacaccttcactattataatcttaatataccttagggaaattagctaatactacattatcatgattatccaaacatataattagaagactacaatttcaacgttatatatattcttcatgggagtctctctaacctgttcaatactatagcttttgttttctcagtaaaagatctcttaagtgtttccggattcaatgtccagtggggtgggtcaagagccacatatacctgtgaaagtataactatgaatacaaaatattttatttaacaaaagtagctcttattatataattccatgttagtagtagttggtaataaaggcacttacaggaacccctccagccatggtaatacatgcttcatatgtttcaaaacaaggatcaaacagtataacttcatcatctttgtctattactgtagcaaag

SEQ ID NO: 57104 - DNA, 1317 bp, Cannabis sativa
caattaatttgcactctactatgttattcatatttttagccatagaacttttaaaagaggactacaagtctataacacctttaattaaataaaataagattgatttcatatgacaatagcaggctgatttattcttacgcagcagtctgtctatcctagattaatatgaagagaaaatagtctatatatatatgtgtgtgtgtaaaaccagaagatgaccaacggcaacaagtaggtactcttgttaattaattagtttatattttgaaatgaataatatatataaaacagaatcattcatgtcaatatgaaattaatattttatattatctatatttcattgaccaatagccatatatttcaataatattgaaaaacaagaagtgatcacatatatggacaatgaatatgtgtatacatatatatatatttatagcatcaataaatacacatttcttataatatggacaatgaaataacaattgggccttatgttaaggagacacgagacacaaagagcaatcgtccatcatagaattattagttattgtacttataattactatgtctaataattaataccattcgttttctctatagatttttcttatcaagccctttttgtgtatgtcatccaatcgattcatatcaatttttttcttaatgctccttcatatgcaacactaatttatggtccaaatttctagtttgattcatggctaggaaacccccacacattattaattattttagagagttgaaatatgtttatatgtatatatatacttatatagttaatataaattgtttttgtaaaaagaccatgcataatttaacctataaaatagtaattattctcttaatgtgatatttttttttatggtcgacatgataatgtagagtggataaaagatcacatggagtgcagatatgaatgtgtgtattactataaaaacattatagcttttacttcatgtaaagatgtgattgtttcgacagagatagcacatgcaacactcctgtgtaatcagtctaataatactctgtttttttctccaataatattgtatataaagtactacatattacctaataatttaattacccctaagactataagtaaaatctaataaagttattaccaaacagtaaaatctaataaagttattaccatgggcagaactcaattaatttataactatgagtactactatagtcaatatccgcagaggggtccttttattattgatttgtacggctgaattcaaagtcacacactcgtgcagtgcattgctctctcattcatttatttctttt

SEQ ID NO: 57105 - DNA, 652 bp, Cannabis sativa
taacctttattcttgtagtgagactagatcctaactagaaaatcgatttctaaacatgctgtcagggggaaccagtagactagtttagtgcacgaaaccctaaaaactccaccacatgctcaaaactacccaaaataatgccaaactcttcagagtacctaaatataccataacaaactaaaatcatgcaataaaccccatcaataacctcagaaactaaaaccaccatcgatcgaagagcaaaaatttaagctcttaagcaaaaactttgtctaaacacaccaaagacaacaaaccaaacttaattcagctcaaataacatcaaaataacttctaaaaatcataaccaaactcgaactaaacctacaataacccaactcaaaaatcttccatgaaaacctaactttcaagcttaaattcaaagagacagagaggggaaatcttacctcacaaattactaaagttacagctgctgaatttctctacaattggtctacaatggagatggaaactgttggattcctttagttcttggtggccgactctatggagagagagaaagacaatatctattctttgattttcttttaatttttttaagtaaattcttaatctaattcagcataatccaaattcactgaagacaaactag

SEQ ID NO: 57106 - DNA, 978 bp, Cannabis sativa
tgtgtgtgtctctctctatctaactatatttttttggatttagatttgattttttgttttctcagtggaacctatcatctccttagctctctctcacgctcaaggaaattcaaatttagaggtatacatggctttttaaaatattgttttttttattatgggtaaaagttgtttgtttgaaaaaatatttgtgttttgttcttggtgattgattagttcttttgggatggaaatttgttgggtttccttttatattaatttgactgtaaaatagcattgagaccttggatttgtatcatgattagtgttgattgcttttgaccccaatactttgttttaaatatagcaatgatgactccaaatcaatttcccaggctttatctgaacccaagtattatactatttacatgggacgagttctcagtgaaaaaatcatttttatgtcaaggttttgattattcttttgtgggttttctgatttattgtctatttatgtgtttctgatgtgccttgaaagaagaacattgcataatcatcaattattcttgttctgttgtttggttgttaaaattccttgttgggtttcaaaagtttgacaagcaaatgaaaaaataggaaattttaggaaaatttttctactttgtagaacccacaaattgaccatgtgtcacatgttctgctgaagttttgagtgaagggtttggttttaggttttaacttgacagtgttcgaggctctcaacgttgtatggtgtgttcattcattttaagagtcatgatatgccatgatgatgatgatatgattcaatgtaggctaagtttttagtttgagaccggatataaaataattagttggtgttgtttctcttagcaaattctgttacctcttacttgcagatcaatcattttcctctaaaaaaaaaaaagaaataaagaattcttagctttggatttggagcaggtgtttgcttccttgaat

SEQ ID NO: 57107 - DNA, 1507 bp, Cannabis sativa
tttcattcccaagaaaagtgtaactttttttcacaaattacctgaaagcgatccaacgaacaaaatttgagctctgaaaattgacgattatcatccagagtcaatttcaccattagatcatcataaatggctaagagatattttttgtaatatatattttattattattttattaagatcttcttccttataaaaggagagttccactagctcatttttcacatttagaaaactgtccaaaaaggtcagagcatctctctctagaaatatagagctcttgccataatcaattctcttgtaattctcgtaagcaataaaaactcgaagtaaacgtagcaccattaccgtcacgacaagaaaagtgaattactataaatttcttgtgtctttcatttacactacttaatttctattttctttcggtaatctaacgagcgagtgctcaccaatattttgcgttaacaaaaataattattattttttttaaaatatatataaatgaaaaaaaaattaaaatacataaagttaatagtaaaaataacataaaatattgaaaaaaaatattaaaaataaattagtttaatatatcataattaatgggtgcgaatatagtcacttatttttttcaaacttataacaaaagaaaaataatacgagattataccaataaaaatgtgtgcatttgtttttgtcaaaaaaaaaaaaaaaaatacattataaaaaaaagtgcataatatatgctttcaatatatatatataagtgcaatatttaataatataaaaataatgtatttaataaattaaataatattttttctcaaagaaataaataaatcatataaaaatattttaatgttatttaaattggttaagcttattcattaaaatagtattattatataattagtataataatcccattttacatgttttcaagtttgtcaattattattattacgtcgctataaaaaacatagctacctttagcgataattttttaatcacaattataaaatttttataactaaatacgatttttagctccaacaaaaaaattatttatgactaaaacatagtatttaaataaaagttgttactaatttagttttagttacaacaagtattataactaaaaacatatttagtcacaaagaattgtgatttttgtgactaatacatttagccacggatgttttagacataagaatgataatttatatattttttttttgtttaaaagaatgataatttataattagtcacaactattttatttttagttataagttttgttatgtgcaacagtccaccagcagcaaaagagaggttgtgagttgtgactaaatgtaagattttttgtagtgtgtaatttattaatttttttttttataaatattatttaatgcattcttgttaatttaagtatatatatgggtccactcttatggcatgtttactaataagtaatgggaatcaatagtaaggtaatcattcccttacatttgtt

SEQ ID NO: 57108 - DNA, 1032 bp, Cannabis sativa
tatgcgcatcgatgataataagctataaatatctttttaaattagtaaaaggtcgcaaaaattgtataaatattacagaatttagttgacaatactatttgccttaattttgaagaattttgtagttgttcataatattataaaaattattttgaaagattttatggttatttttaatttttttcactgagtgagtagcaaaggcttaatagatataactataggttaaatattcaattgaaaaaacattcaaaaacatgtcgtaaattgaaaagaataaataaaaaaaatgtaaaaataaaaataaaagtctataattgtaaaagtctataatctttctacatgattacttaacattaattttaattttattacaaaataaaaattatacacaatgttaatataaaatccagcatttctttcaaattataaatttgtatatttatatatacttaagccacttgtcatatgaggcgtgtggaagtttttcttattcttctgattttcgttactttcaaagtttctttaacattagtaattattgtgcattttacttaaatacatcacactacatgataactaaatttatgccttcaaaagtcaccaatatctatggttaaaaagatgtccctatagtataaggacaaaagtagagtatgtactataaaaattttctatatatatattaatagttatatctatttatataaggtagtgcagggactagagacataactaatatattttcattgaaggtgctacaattattatagtcataacttgttttaattaaagaatgttacaataattttttctcgataaaaaatttaaataactaaaaaaattgagagttctttcccttaatatatgttggcttaacgagtaggggatctagtttttaaagtattattacctagctattaaagttatatatatatgagcaagactatagtagtaaaattattttttaaaaataaataccaatataaaaataatttaaattaattttataaaaaaataataataattcaa

SEQ ID NO: 57109 - DNA, 1809 bp, Cannabis sativa
tttaaaaaattttaaacgtattttcagtactgtgaactatccaaaaatttatagaaataatattgtaagtataataataaatactgtcatgaaaggaatttaaaaaatatttcaacatacatttttaaacacgaaaaattaattaaaagattgtaataaaatgttaacaatagcactctattaaaatatttgtggatagtgtatacctaaactaaccttaatagaagtgagattttatggtcagtatgatatataacgtagtttaatgaggttatgttaacgttacttaaagactagtcctaactagggtgggccccactatatccactctgtcgtatttacacctcattggtgcgttacactcacgcgcttcatagccaggctttcactgttcatcaccgttgtccaacgcctccagtcaaattaattgaatgtttttattttttaagggaattcattaataccaaaagaatttgttatttaatatttttttataattatttacatttagctatttaatatattttataaaatttaaaaaatttaatccttccatagtaggttcaaacaatttatttcacacgcatataaaataaaagactcttaaatacaatagattgtttgaaccttattctcaaagtattaaatttttgttgaatttcttaaaatttgaatgtcttaaataactacaatgtagacgattataaaaaaaaataaatcaaaaaattctctcaaatatcaaatcaaataaatagaggatacattgataaaccccttaagctttacgttgtaaaagcatccaaactttaattattatttttttttagttttaaatattggtaaatttatagtaaaaaaaattagtccaatatggtaatttttttttagctttttttccaaaaaatagaatacaatagattatgagtaaataccaatttaaaatttatattttacataaattattcattagaatatctattttactatatgacaataatcctatattttacaaaataagactcataattcaatttttgctaaataaaaaatttaataatttgacttaaatgtgttatgattagactaattatattttcatatatttatttatgctattaccagctttaaaattaaattcagaatattatttatactaatttattatttaataaaataaagtttctcattttaacttattcaattttttatttttttcacaaaaagattctaaataattataacttaaaaaagcttattttagaaatttagttccgaactattacaattattaaattatgcttcgtgaatttttttagtcgttaaaaaatttagaaaatatattttagtagtcctaataattaaagggtgaaattttaaaatagcataaaacaaatttaagaaaaactattctaaatacttaaaaaaaaaaaaaagaaggggagttgtatttaataaaatgaaaagtacactctaatatttaataaaattaagcttaaaataatttttaaaataactctcaatattttttaagattttttctcatattgttttatgttaatttcaatacttattttaattttttttttaattttatctattttggtatttagaaaaaaaaataatctaaatttttttatggtcgtatacgttgtagttgtttaagatatccagtaaaattttgaaaaatttaacacgtcaaaaataaggttcaaaagtcagttgtacgtgcaaattttgttattttatacgcgtgtgaaatagacggtttgaacattgaattctatattgtaaattattctcaatttctca

SEQ ID NO: 57110 - DNA, 915 bp, Cannabis sativa
tccaggaacaccccataatagtgttagccaatcagcccttgagacgagttttatcaaaaccatatgcttcgggaagattgataaaatggtatattgaactggggtagttcgacataacataccaccctcgaacatccatcaagggccaagccttggcagacttcttaatagaaggtataactctagaagaaattctgtctgttcaacgagatgcaaaaacatggaagttatacgtggatggtgcatccaacgagcaaggttcgggtgcagggctaatattaataacacaagaaggctttaagtttcactatgcttttagatttcaatttgacgcatcaaataatgaggctgagtgtgaagccttgattgctggcttaaagatagttgaatcattggaagccaaaaacctcatttgccatagtgatccgcagcttattgtaaaccaagtcctcgggaaatataaggccaaaggcttaaaaatggcgaagtttttagacatggttcagaagaacttggaaagatttgattactttaaaatcaaaaaaattatgagacaacaaaactccaacgtcgatgccttagcaaaactggcctcactgagcttgggatgaattgaacttagttccgatggagatgctaagcgagccaagtatatgtgcaatggaagaggtagagatgatagatatctctcctacatgaatgacttctattatcaattatttactcaacggacaacttccaaatgacaaaaattcggcgcaaaaactattatattttgtgcctcgctacacaataattgaaggcaaactatataaaatagggtactcgatgcctctactttggtgtgttctccttacagaagtgaaagaaatcatcaaagaaattcatgaagacttttgtagggaccatacaggt

SEQ ID NO: 57111 - DNA, 972 bp, Cannabis sativa
  modified_base (42)..(52): a, c, t, g, unknown or other
aaatccgcacttagtgcgaattggatgttgtttgaccaaaannnnnnnnnnnggatcggatgaacacccctagcagcgctagttgcaataggggtttcaacgcgagctgagttttttctagcattataaaacaacactcaccttcaatcttactccgcatacaacaatgattggagctatgcactttataaaaaataaagaaagtaatgaatttaaatttaaattgtaatgtgtttttttctaatactttttgttatatagttacatctaatataacataaaaatatatatatttaatatttacacctaattatttttattattattatttattaattttctacatttttcttatttttctatacttacaaattttttaaaaatatttttgaaaagtttattcaaaagaatttcttaattacatgatattatcttacaatttaaattaattattcttacattatcatttatagatactcttcattctctctattcggcatcattattttttatatatataaatttatcaatcgttatatttttcttttcaagatagtgacgattacaagtgaaatacagtgataacaacaattttaaatttagtgacaagcgagatacaatgatgacaacaatttcaaatctgatgaatttcatatagatttatcaattgttatatttttttttcttaattctatttttaatatgagcttaatcacacaaaaatgatatttatccaattactaaaattctatcatgtgctgaatctaatttaatttatacatactgtgaaaactttatagaaatatatgtctattaaattaattaataattatcatttattgagttcaaaataattagaaaaattaagactctaaaatattaatttatttttcttttgttatcaagagttaaaaaataaaaaggttttttttatttttatactttaaaacaatttttttttttatattttta

SEQ ID NO: 57112 - DNA, 1028 bp, Cannabis sativa
gtgagatatttttatctttttcctctgatatttttctagtcttcttttattttaaatctgcaaaaataaaagataacaagcgtaaaaatactccaatcacgattaaaactcaattaaaaaatatactaaacttaatctaaaattaatactaaaaattagctaacatcctgcagaagaacttgcttggttgtcttgtcctttataagacaagacagttcatcaaattcaagaatgacatagttatgcttggtaaattgagaaatgctaagtaggtttttggtgacactaggcacatgaagtatgtcttgtaaaacatatgaatgattagggaaattagtgcaaaccaaacttgatccaatatgatgtataggaagagaggatcaattacctacaactactttggctttgcttttgtagtcagctgctaaactgagatgatctgcatcatttgtcatgtgatgactagctctagagtccaaataccaggcagctaaagcatttgatgtggaagtggattcagatacaagagcttgaggattatcaccatttgaggaagaggaagtagatctattgttggcattagtgtaagtgatatcaaatctatgatagcacttaatatttgtgtgaccaacacgtccatagagttaacatactggtctattgccacgtccacctctgttactgttgtaggatcatccttctctgtttgagcctctgaacccatgattggaagaagagcctctggtattggccaggttggcttgcacattatgaaaagatttagttgtgttttttgaattctcatttcttggctctgtaacatgaactgtacttctggagaatgagaggttcagttcttcatgtcaaattgacaaccacggcttcatactctatttctaatccaccaagaatgtacaataccaaatcatcattagtgattggctggccaactgctgcaagttgattagcatgctgcttcattttgagaatgaactcctcgatcaacagagatcctttcttggtggttt

SEQ ID NO: 57113 - DNA, 2019 bp, Cannabis sativa
cggataggtttcttacttattattcgctacattgagcaacgatagtgacatacatagctcatggctaacgagtggtaagggtgctttatgaagtaccaagattgtgtgattacgatgttgtgcaattgtgtaatcatgttaatatgtgatgggattaaatgaattttatattgtttatagatttattcacttttcttgctgagtctctgtaactcacgggtgctaaatagtggaggtaaagggaagggcaaggttgtacgactatgagtttgaggtcgcatcagcaatgtacatatcagtcgcggtgccacagcccagtggacaggataacctattttgattgtattctgaagtataaacgtactttgtataagcacttttggttccaaatgtagatattttggtgacagggggtctgcgtagatattaatacttatctattataaaattatgcgttcgttttaattgtaaaattttaattagccacactttttggtataattatataaattagtaaaagatgagttttataaaagcatacacgtggcatccctgttggacagggcgttacactaggtcgtaccatcctgacatgtacaatcatcctcaagctccaaactcattgctgttcaaccttagcctttcctttactaacacatgcaagcaataaaagtcgactaactaagtaagaaaagcatataacatacaatatactacgacttgtatttaggcgcccatacacctatccaaaaggcttaacagatgattaagaatgttcttaataaaggtacgacctctgtaccacatacactgcgtactgctaatgtactagtgttggtagggtttgaaccgtactccaagtaccactaagtgttgtatcacatgcactacatacctaaccgtactagtgtttgtaacaccgagttgtactcttaaacattatatgatgtaccacatgcactcagtattgttactgcactagtttttgtagcatatgaatcatataaatagcatgcatataatacatatacacatatactatacacatatattctatgctggtcttaccttattttttaattatagtgtgttgatcgacctgaatggaaaattatgcgttgaacggagggcctatgtcacaatcacgcaaaacgggtaaacaactttctaaaacctttctggggatccaaacccaaaactaaaagtttccctatcgatcaatagcacggaaaaaccctaaatattgaggaaacatgagaaaattgactaaacagaaaaactaccttaaaaacagtaggtcatttctgtaaaaatagcaagtagtttttttgggtctgcaccagtaaaaatggtagaccgttttcatagaaacagtctgctatttttcactacaaaaaattagagtctaaaaacaacccaaattgaccttaaactataccacaagctccagatcacctataatcatcataatagatcaaaaccaagcaatagcatcttaaaatacccagtaattcaaaaatcaccattgttgagccgtttgagttcttaaactcaaacttgcacaacaccaaaactgaacctcaaaatataacaaaaaagcatcacacaactcaaaactaactcaaaaaataactcaagacaagctagggtttggacagaacctatctcaaaaatttgcatgctgaaaattaaaggaattattttatagggttttacctttgctcttggctaactagctaccttcaatctcttgctgaattttgccaaacttagatgaattcaagtctggttctttagggttttgggtgaggttaagaaacagagaaatgacatgagagagagtgtgtgtggttgattaattgatgttttaatatttatctataaaataattttttttattctaatgtaataataagattaatacactaaggtaattttagaagattaattaaagagacttaatagaaaaattttaattttgccccttgtttgacacttaagcatcctataggtctaggg

SEQ ID NO: 57114 - DNA, 1157 bp, Cannabis sativa
  modified_base (502)..(503): a, c, t, g, unknown or other
  modified_base (571)..(577): a, c, t, g, unknown or other
  modified_base (879)..(885): a, c, t, g, unknown or other
  modified_base (1012)..(1028): a, c, t, g, unknown or other
ttttatttattttttttttttaggttgtagacataaatatttataatgagtatatttttaataagaataataactttttgtaattaaaatgttactttcatttcaaaatcacaaaaaaaaaaaaaaaaattatttataattaaaatgtaatatataattacaaattgcaactaactaataattataaaaggaatctcatacatatgagaaaaggcttatataagcatccaaatgtaacaaaagtatttatgagaagtgccaagaaagatgaccattagtataatactaatcaaaagaattaattattgtttttttacggtaaacttacaaaaatattgaaatttgggtaaatttttataaaaatacagtcacacgatttttttttaaaaaaaaatattgtgattttataaaacaacagtggagcacaaaatagaacaactaaaattaatagtggaacaattaaaaaacaaccatagaacaatagtgaaaacttaacacagtnnacaatataaaacttacacagtatttttgaaaaaaaattcgccctgcaataaaaaaattaaaaaaaaannnnnnntttcagtatgtggtgtaaataattttttttttattttcttttaatgaaatgtcaaaatggaaccaagaccaaatacaaataaaaaatactaaagtgaaaatataaatatcacataattagatgattcaacttaagactaatcaattggatcttgtgttttgcaaaaattattaattggaccccctgttttgttaaatgataaaatgaaccatttgttttgttgaatagtaaaattaggaccctgagctcaatttccaacaattttaatttttagtataataaactttaagacaatttctaannnnnnnagatacagaaaatgtaactagttttgtcataacatctgtagatcagattattattaagttttattttgacaaaaaatcagtttagggtcctatttgtacaattttgaaaaatacagggtctattttnnnnnnnnnnnnnnnnnagggtccaattgataacttttgtaaaatacatggtccaaatagtctttaccctataacaaaataataatcgacggtcactaaatggtataaaactttaaacaattcaaaaatgatcgaaacaaaataat

SEQ ID NO: 57115 - DNA, 1010 bp, Cannabis sativa
ttactttacaaataaaaaactagtggatgctctaatcgatcatgcataatagtatacttcagaaaaaataaaaataaaatatcatgtataatagtaagcagttacaatatcataatagattttgtaataagtgttaatctaaatgcacaccgtatacctttaaatgtttgtcctgatagcatatttaatttttttttcctttttatccttccaaaaagaaaaaaaaaatcttttttatataacggaatatttttatatatttagaattattttgttaaaccaacaaaaatattagataataacttttaatatataaagattttaaatattgtttaccattactttatttttgtataataaaaaagtcattgaattttataaataaatgcattacaaatatataaagagaaaaatgaaaatatacatatatgagcagaggtatatatactaaataaacttatgagtaaaacatttcatcatatttaaatttttgacaagtgcatatattgttatccaggtttactatgtaagatgtgttacagtcatgtactttgtatacaactagatttgatgtctcgactggaaaaaaaatagactaactagttgttattgtataggcacacattgcgtttaaaacaaaaaaaatgaatatttttgttctaatatacgaaaaatagactaataggtttattagcgtatattattatatatgtttgattatagtttactctgtattgaaaaaaaatcttattccaacaaacagaaactagtaagtttattgacatatataatagtatgttatataaaatgaaatattgaattgttgttttaatatacggatagaaaaataaaatattgtttcaatataccaaattaaaataataaatttattagcatattcgataataggttatacaaaaatgctactatgtaaacaaagaatgaaaatttatttcaatatgataaaataaactaataagtttatatatgctagtatagacatatttgat

SEQ ID NO: 57116 - DNA, 2549 bp, Cannabis sativa
gtcatgtatagactttcaagctttttccataggccagtagcagttgtctcctttaacgcttatctcaaaactttttcaccaagactgagaatgatggaactgtgtgctttctcaagaatttcattcttctctttctccacctttcccttgatgttatcttcaccaggcaaagcttcatgaattccttgctaaactaacaaagctctcatcttcaacaaccataatccaaaattattcttgccgataaaattctccaaatcgaacattacattccccattgtttccctagatgttcttcaagcataaccacgttgagcttgcctttgattcgaaggtctaagctcaagagcccgtccagctctggtaccaatttgtaaggaatatttgattccaatgcaatcaactaacttgatctaacaacaatacaaatcacacttgaactaagagttgaaaaaatcatgtgcagtcttgctcttttattaactcacctaacttgttttaggtaagtcttaacaaaattaacaaccacatgtaacaacatatttacaatatatggtacaaatgtgagttagaacgctacattgtaaaaagtggtaggtttatctacaactgaggctgattatacatctactattgacgctatgaagctttgtgggtaaagggattgattgaagaagctagtggtagattttctatcatcaaaactagaggccaaatcatcatctaaataggcttcaagagtaaacaatgttgacggtttgaaatgaagaccaatgtgtggagtgccttttatgtatttgagaatccttttgcaggcattccactgattagtagttggggctttaaggtattggctgagcttgtttactgaataagcgaggtttggtctcgttaaagttgaatactaaagggctcctaaggcgcttctgtacaattctagtttctcaaatagtggactgtcattgagagctaatttattggccataataatgggagtggaacactcctttgcatctacaaaatgtgttttgtccaataagtgagcaacatacttagattgtgtcaaatataaaccagaggaagttttgtaagcttcaaatcctaaaaagtaactaactgatccaacagatttgagagcaaacttgttgtttagagcttcaattagtcttgatatggctattgtatcacaacctgttatcaaaagatcatctacatagactaggaccaataagagatacccttgctgatgttgaaaaaatagaaaagtatctaaaacagaagctttgaatctccaactaataacagtagacttgagagtgtcaaaccaggctcgaggatcttgtttgaggccatagagtgatttgtttaattgacacacataatctggtttttagggtcttcaaatccttgaggttgttgcataaataccttttcttgtaattcaccatttataaaggcattattgacatcgatttgttggatatcccaatcataagtaactactagagtaaacaccagcctgattgtagtagcctttatgacaggactgaaagttgttgtgaaatccaagcttggtgcttgttcaaaacccctcactactaaccttgctttaaacttgttaagggagacatctttgttgtagtttgtcctatacaccaatttatttgacagtatattcatatctggtgcaggggaactagtatccatgtctttttcctctttaatgaaccatttaagtatccattgctttcctccaatgaggcaaacttaaggcctgttttactgtttttggttcttcatatagtttctatttggaagctgtaacaagatataccttaggtttaaagataccagatttagacctggtgtgcatagggtgtcattgaggaaaaggtggaggaggaacaagtatgtcaatagcaggcaatatggtgtcactagatgaagaggaagaattggaagttgagttagcataggagactaatagggactattctcaactcaaacagaatcagtgttggaagaagatgagacatttggaatgattgatgtagaatctgttgtggtatttgatagtgaaccaaattgaatatttggtaaagaagcatgatctgttatggaaggaatgacatatgtaggagcaaggtagtttgtgtaagataaaacaatagggttagaaggacataaggtggaatatggaaattcatgctcattgaaattgacacttcgagcaatatagattcttgttgaggagtgaagacacctgtagcctttaagaaatggactatatccaaggaagacacacttagatgtcttaaactgaaactagtgttgattatagggcctgagaaaaagaaaacatgcacatccaaatgttttcaaaaaattatagtcttgtatggaattatagtctggtatggaattatagaggctctcaaatggtgatttgtatgcattgactaaggtgggaagcctattaatgagatatacaattgagacaaaggaatcccacaaaaaattcaatggcatcttggcttgagccaacatgg

SEQ ID NO: 57117 - DNA, 1092 bp, Cannabis sativa
  modified_base (524)..(525): a, c, t, g, unknown or other
  modified_base (1057)..(1061): a, c, t, g, unknown or other
cgtcggatcggatcactgatccgatccaaatgaatggatctttttgccatgcctaaccacatccatatatgagcaataagctcttgaaaagccttaagtaatatattcttaatgatctggatcacacaaaattatatggagtttgttcttagtatgttctttagacaccttattactctgaacttcattttaacaacaattagctcaaagtcaatgtgccttttgaccttatagagttgatattgttactaaaatggaacctgattaatttattgtcacaacatatatctttaataacttttaataccattcctaattttgcagccatatgtgacaagaaaatctcacaacaaaaaacttgataagatcagaataagaaatcttaatgatctccaaaattttatgttaactgatttctgataaagtgaacatatagtattttgttctccttaaatttcttatagcttatttggctacatatcgaaagttccttatatggttacttaaatatctatccaacattnntaatatgtatattaagtacaaatacatacatgtttaagcatatattagattcctatataaattaagaatcttcaatatttcttaaattctaaggttgcttttaagacaataacttagacaatttattttctttaactacaagcctttcgcctagtatagtatctttgatgccaaaagttttgaatactttattgatatacctcttttgttataattcaagaacatatcttgaattttttaatacaaaatgggtatatcatctgtggcaagtaatttgtgtttcttttaccaatataataccaggatcatattcttactcccactgaacctatgatatatacacaatcatcaaaagcttttatctcaaaaaccaaatgagaatacttcaagaaaatagtgtaatcattgatgagaagcttacttgagtttatacatgaattttcctaatttgcaaaccatatctttggatctttggacacaatgttttcttgttgcactaacttttgtcatcaatatcactattgataaatgnnnnnttagtaatccatttgatataactcaagacca

SEQ ID NO: 57118 - DNA, 2058 bp, Cannabis sativa
ggctgatttggggatgaaaataattccaaataaggaaagagtgccagtaaaagagtccaaagaagacacaacaagaagaaaatgcggggaattgagaaatttggactttaacatcaactatgaaaaaggtgttaaaaaatcagggatggaaaaacaagtataatgaagattcttacatggaacataagaggcagtggtgataaggagaaaagaagggctattaaggcaactttatgtaaactcaatccggatagtgcaataatacaagaagtcaagaaggaagtcgtagatagaaattttgtgggaagcatgtggagatcaagatttaaagcatggatccttctcccatctattggaaggtcgggggggatgttgttgatatgggacactagaagtatcacagtgttggactcaatgatagaagagttctctatattagtgctaattaaaacagaagaaagagaaccttggtggttctcgggtgtttacgggccttgctcatataaagcaagatctgacttttgggatgagatggcgggccttagctcgatttgtggggaatctttgtgtatagggggtgacttcaatgtagtcaaaagagcacaagaaaagctgaacagtaattcatgtaccaggagtatgaagatttttgatgaattagtgaatgagctgagattgattgaccctaaacttaacaatggaagatttacgtggtcaaactttcgagaaaatctgatctgtagtagactagatagatttttgtttactaacaagtggaacatcacctatccatatgtcagacaggaaatggcagtcagagtagtttcagatcacagtctggtaatacttgattcagatctaccgaattggggcccttgcccctttagatttgacaaccaatggttggaacacaagtctttttccaagctcttcgaaaaatggtggaaagagacatcggtgtaagattggtcaggaaccaaattcatgagcaaaattaaagaagaaacaagagaagataaaggtgtggagcaaagctacttttggagacaatcgcgtgaggaaaattgctctagaaataaggttagaagatctagatagactagaaggaagcaacggatggagtgaagagagaagggagatcaagaaggaatggcaaaagttagcttttgaagaagaaatgaatgtgtggctgaagtctaaatgcaagtgggctaaggagggagatgcaaataccagatttttccataatctattgaatgcaaggaaggccagaaacacaatatccagaattgagaaagaaaacggagatgtggtcgacaaagaagatgaaatagtcaaagaattgatgggttattataccaaactctacacctctgaaagaagagaggggatgggtgtggaaggaatttgttggagacaaatatctactcaatcagctagagaattagagcgaccatttgataaggaagaagtaaggagagttttttttgattgtgaaggcaataaagcaccgggacccgatgattttagtctagtagtcttccaaaataactgggatctaatgaaagatgacctactggaagtcttcaaagaatttgaagatgaaggaagaatcccaggcagcgtaaatgaaaccttcttatgcttgatccccaagaagattgacagttgtaaggttaaagactatagaccaatcagcctgatcacaagtgtctataagataattgccaaagtcttggcatctcgactccgaggtgtgatggaagatacaatctcagagactcaaacggcttttgtagtgggaagacaaatattggactcagttttgattgccaacgaagcggtggaagaatatagaagtagaaacaaaaaaggaatggtgttcaaaattgacttcgaaaaggcctatgatagagttgagtgggacttccttgatctagtattggaacgcaaaggattctgagaagtgtggaggaaatggattaggggttgcatttcgtcaacttctttttcaatattctttaatggaaaactgagaggtaagatattgggatctag

SEQ ID NO: 57119 - DNA, 656 bp, Cannabis sativa
tgtttcacgaaatgggaacttagattcgaggttggggattttgggaggtctcgagttcgatgatggcttctatttcaccgttgtgtggtcgaaaaagactcctctggagttatgccgagagttcgtgagataaagagaaagagcagaggagagagagtgcaagagagaaagcaataacaggagaaagagtatgagagagagaaaggttaagggaagcaggctagtttggacaacgacggtcggtggcccgtctgaaatggagggtgaaaggatagagggaagcagaagaggatgaaagtgatgggtttaggttttggttttttttttttttaagttttaataatctgtttaattttttatttatttcatttattttaaaattgatttttttaaatgtaaaattaatttatttcatataccatatcattaaatatttagtgacatggcatgaactagtctacttggcattggctcaaccatgccacattggcaaataacgaggtcaggggaacaaaagtgggttttttgctaacattacagtgattttggaagttttgccgtcaaaattttaattttgaaggttaagtgcaagcaaagtgaaaattgtgggggttatgccgcaatttactattatagaccccttatgtgataaaact

SEQ ID NO: 57120 - DNA, 1099 bp, Cannabis sativa
aattgggttcaaatgctccgcatatgatcactgcgtaagaatctggagcaatctacagtcttgttcttattgctctatgtggatgatatgctcatcatgagcaaagataaatatgtgatcaaaagtatcaaagccaagctcgagagagaatttgagatgaaaaagcttggaccagttcaaaagatacttggtatcgaagtctcacaaaactgaaaggaatggactattagcttaatgcagttcgggtgcatcaagaaagttattcaaaagttcaacatggaatatgcaaagagtacatctatttcgttagggtgtcagtttgttttgtcaaaggaacattgtcctaacagtatgaaagagaaagaagaaatgaaggatgtatgctatgttgtggttctaggatgcctaatgtacatgatggtgagcacgatactagatatagctcacgctctaagcaccctaagccagttcatgtccaattcgggcattgaacattggaaggccctaaaatggttattgagatatttaaagggcacttgggattatggtttgacctatgaaaaatctaaaggagaattagacttgaaagggttcgtggacgcagactacgcctcgaataaagataccagaaaatcaacaacttcctacgttttcttgacaaaccaaaactttataagctagaaagcccagttacagtccatggttgctctttccaccacgaaagtaaaatttatggcgactacgaaaactttcaagaaagttttatggcttcagggagttcttgaaacaaataaaaaagggagtgactgtatttttagatagccagtcattcatccatctttgtaagaacccaatttatcatgaaaagaataaaaatatagatataagactctactgaattagagagaagatagaggaatggctggttaatttagagaaggtcaaaacagaagataatcttgctgatgtttggactaaggtcttgactataaacaagttcaagcattgcttgaacttgatcaatctcagaagttagtatactgagattcttggaataccaatcatgatggctacgttctttcttcatcatcgtcattct

SEQ ID NO: 57121 - DNA, 2470 bp, Cannabis sativa
  modified_base (1317)..(1319): a, c, t, g, unknown or other
acaataaaattaaacacataagagtttaaaaaaccttacattggttgcagtggaatataattactccttctgctcagatcgctaacccttattccttcagctcaaaaacttattgtgctaaaactagatatacgcaagtgcacacagtcacacacaagtaatacaatgataagtaaaagagtatcgtctccacagggattgattagaaattaattatgcaaaaatcagtactaaacaatttgggttaaacaaataagaagcgatgatgatttgaactatgctaaaaactaaacaagatagtaaatgaaacgagaaaggaaaatgagaaaaatgatgaactagaacaatcaaatccacttagaatgcaaattcaatgtaaattccatagaggaatgcattagtaattaaattttgtcaaccggaaatataaatgaacatatgatttttttcaaagctatatgttatgggctctcgagattaaattaacatattcctatgcaaatctagacttagagaacacaaattaagcactaattttccatgggtcatacaagctaaatatcatatttatataccatctacaaatcacactttttcaaggtgataatcttgcatcattcaagtattttcactaatcttattttttttaaaatcaagattagttaacaacctacaattggcgatcaagcaaaagtaggtagacaaacattaggcatctttgaatgaacaaaacttcattacaaaaaatattcataaaacatcaagaaaattcaaaatccaaggttcattaaaggttttaactaaaaaaaattagttcaagctcaaaaacacaaaaatacctaaaatgaaaataaagaaatataaaaatgaaatacaaaagattaccaaaggcatataaacaacaaaattatagaatggtaatcaaataaaaaataacttgatgagattaaattaattaatgataacttcatcacaattctcacaattgttatgaacaataaaattggcatgcttattatagtgttgtttcattttggttgtaaccgtttgtcgattaatgaagtttcctttcttctggatcaaaaaaaaaaaaagaaaatggcgccaaaacccccaatacttttattttggtttcacttaacccccaaaacccaaatttggatggtaaaacccccaatactcgtgttctgttagcaatttaccatttccgtcatctttagttgttaagtgccatgctggattgttcatgtgtacatctacatggacacggtgtacacgtgacacaattttattggtccacgtaaaaaattatttaannnaattaaaaaattaaaataaaattataaataaaaaaataattttctgttttttttctttctttttttttttctttcttttttgttctttcttttttttttcttttctttttcctttttttcttgttttcagactctctatcttctttcccttcacaaactctctctctcttcccctctgtctactttgacgccggatcggagtcgccccacaccagaccgtcgagtgccccatcaagctctctatctgtctccctcacgaactctccgaccacacgacgatgaaacaaaatcgtcatcgaactcctcctctctcccatgcttcctttctctctctatctctcgcagtctctttctttctttctctctctatcacggtgaagcaaaggttgcgatggtggtgatttttagatctggggttttgagcacagatctaacagaggaacttgatctattccaccagaggagcgcagatctggggtttggacctcttcttctttgttttttatttttattttttgacctgctaagttgtggtggtttcatatctgggtttaattatttttttgggtatgatttagatgtgaaagataggttgaggtggaagtggtggtggttttgattgtttaggtacagtatgaagatgatggagaagatgatggagaagatgaatgaaataagaaataagaaagaaaaaaaaatgttcatcatcctggtaggaaaaaatcaggagaatagagaaaagaaaacaaacaactcacttgtttaacttctccataaaatccaaaaaatttatgaagctcgctgtttgaaacagaagaatcaaggtttgataccatcctcatacccatatttggccaatagatactttgaaaatttaacacgaattgaaaacaataattataatgataattttctaaatcaaatccaaacctctcgtttcaaccatagtttcatcaaaaaacttaaaactgaaacaaaatcaaagaacctaaaatgggtttccatcgatgagcttaaagagagctcaaacacttagagcttgtttggttgttttttcagttttcagtttttaaaattgtatttttaaaagtaagaatagaaaatagtttttcatcattttaaaatttaatggtgtttgtgttgggatttta

SEQ ID NO: 57122 - DNA, 1310 bp, Cannabis sativa
tttttttgaagaaaagcgtgcatatattaaaacaaaagcagttagatgaaattactaaaatttaagtataaactgtctaattaagaaaaaaaaataaaaatttgttaaattaatattcatgtgccatttttttattaatatatttaaatgaatttttaaataaaaataaaaatttaataatgtggaccaattaagaacggtcatatagtaagggccactgtcttaggcctaccagctcaaagaaactcatttttttttaatgaaagaatgtgaaagctcctacatttgtaagtccaaattttaataaatgatattataacttagagttccaatagcctcaatccaaatgtatttttaaaaaatggtttaatttaatacttttttttttcttatttactttaataaatatttatagttgtcaatttttttatagggaaatttgcagcataaattctcatttaatttgtaatgttgctaataagtacccatattcaaaaaattgcggcattaatacataaatctctaaaactaacacacttatagatacccgatttaatagagttaactccgaaaaaaaaaatgtcatgtgttgtgtaaccatttgtccatatcataattgtttaaaataataaaatataattaaattaaaaattaaaaaagtacatttaaaatttattaaacatcaaaccaaaataaatgttaataattttaaacaatttaattacaatttaaacaaatatgagtaatatgtctctttgtttttgcccagtataccatcagagatgcaatctccccccgattttatgaatttgttgcaactcacctccaccgggaaccaccgagtctgcaactagatctgaacttaagcaaaagttcacaacaaaaaaaactttaactcaacaatattgacttatgaacttgactagaattgcagaagtgtgacccatgaaaggtttagtggtggtaacaaccatcttatcatcgacagagaaatcaaaagatctggccggagactcaaagtcaaaggtaaatgatagttgaccagtctgaacatttcgtagtttagccgaaactaattcgcacttcagcaatcaacaacattgaatcccctaaaccatagaacctccaaactcacgaagaatccaaaaagggaaacgatttaaagaaagaaggcatcgctagaccaaacgacaccattatgaccacgatagaatctaaggtgcttgccattatcggcgaactaaacggtgggagtatggtccttggtgtaggggtgttcattggatcacatccaatgtttttaggcctat

SEQ ID NO: 57123 - DNA, 817 bp, Cannabis sativa
taaaatttagattaataattatagatagggaactaaataattttaaaattaatatttattaaaaactaaagcaaactaattaaaagtcactaaatttactaaacatgcttgagaataaagttaaattaatgcacaataactctattttcatagagttatcaagtcccctccacttcttgctcatttttggctttgtgatctaagtacatcttccagtatttggcatcccacttctcctcttcgactgccagcctggccttccaatcttcttggatcttttggctgctagagaccgcctgggtttcgacctactcaattttagcgcgtaaggcctcattttcaatggccaaggattgaactttaggcagagctggtttagttctatggtcatattccccgcttctttggctatcctctttgcgaataattccatctagagaaaggaaggtcgaaagaaattactaggcatatttcggtaataaaaattgtatcgcaagtgagaatagatcagaaggttgagacttaccccagtggcctgctatttggcggctagtgataaagtgtatagatcaacactgcttctcactacccacttcttcgatgtaagctcactcacactaaggcttatgatgtctaacatctctgcagcataaggggcaataaccctgcccatcttaggtattagattttgactcgctgcagttagatccagcacggggccaggagaaaaaggctgggagattccctcagcaatcttggctgttttgatggaagatagccaagtaacccacttctgaagatttacctactcccgctc

SEQ ID NO: 57124 - DNA, 944 bp, Cannabis sativa
ctttatcatcttctcattattgcctgtgtagatgagatcatcaacgtataaagagacaattagtgtatcattcgtaccttgagttttgatgtaaagagatggctcactcttgctcttcttgaatccttgctcggtaaagtaattgtcaattctgctataccaagctcgcggagcttgcttttggccatataaagcctttttcaatctaagaactttatcttcttgtccttgcgctacgaaccattgaggttgctccacataaatttcttcttcaagataaccatttaggaatgctgacttcacatcgagttgaaaaatcttccatttgttttgtgcggctagagctgttaaagccctaatagtgttgaggcgtgcaattggagcaaatgtttcgttgtaggcaactccgtattgttgtgagtatcctttcgcaactaatcttgctttgtgtttttggatagagccatctacgttgagctttgtcttgtagacccacttgactcctatagtatctttgtcttgtggacaatctataagctcacaagtctcattcttcacaatcatctttatctcttcattcatagcttttctccatacttcttgttgttgagctgcttcaaaactttctggctctataagtactaagttgcatgtcttgtagatttctgatagtggtcttgttcgccttattggtgagtctggaagagattctatgacttgtgcatgttgattctccatggtaggttgaattggaacatcattttgttcttgtcttggcagcagaggaatgttgattatctttctttcaatttcttgtgtctcctagttgtatgcagcatcttaatcaaattttacgtctcgattgattattagcttgtttgtttctacgctatagagtcgataaccttttgattgagtaatatagcctaagaagattcctttct

SEQ ID NO: 57125 - DNA, 1307 bp, Cannabis sativa
tttacaatgagcaatcaaattcgtcaagggtaagtggtggtgatatgggttgtggagtttgaaaattctgtctaagatgaaagtgtttgtgtggagattatatcattctatgttatagtcccttcctagtttgttagaagaaaggttcatgtttctctttgttgtttgaggtgtggagaagcgactgaaactcttgagcatgcatttgttttcttctctttgctggttctggtttagtataggttaggcttctagtttgttattagtcgcgggcagtcgaagtcgttgcctaagcttttagtggttctatttgaggagtttacgagtttttcctttgagctctttgtcatggtgctttggtgtgtttggtttgactaaaattcagtcttgtttggtggggtgcacttgcgactaaatgtgcttgatgggttggcttataatgcgttggaggaatttcagcagatggagcatcggggtctattctaggtgggtggtggctcaattttgtagagggagacaccatcagtttcgcctctgttgaatttgtttttgttgtgcacagatgcctctgttgtaccaagtagaggctttgttgggcttggaggtatgattcgggatagccttggtgtggtatagggagcttgggcggtgggtgcggctaggcatttttcagtgagtgtggtcgagttgcttgcattgcggttggatctttcttttgcatagcggtttgacttttctatttctaaagttgaatgtgattcttttgtggttgtgagttgggttgatagttctagagtaataatattcttattcatttattcttgatgatatttcattattaacagttgttggtggtggctcttgtaatgctatttctcataaatagtgttatccacggactagctacttctggtactagttctttaggagagtttatttagacagatacttgtccctgatttttgaattctcctccaacatgtgattctatttgaatgaaaatccttcttttaaaaaaaaatagagaagagtgtatatatgtttatattttttatacacgtttgataaagaagctatttaaattctattttttagcacactgaattttttttttttttaattttttaaaaatttgtctggttatatattgtcataacaaaaaaaaaattgagattactgtcatctcaaatttcgcacaaaggtgatgtggcatccaacatggtaatatgtggagaacattgagaagtttaaacaagtaattttctctcaatggcccgcccagagaatttctacttaaaattatcaag

SEQ ID NO: 57126 - DNA, 2952 bp, Cannabis sativa
attgggtttatgccacttaaaaacttaaatctttgagtatttataccgctatttaccttacaaaacacaacaaaaatttcataatgggaagaatgctaaagagaaatttgattaattatgcttacaataggaaaaattaatttcctaaacttatacttatcactattgaaaaaataggtatacaaatatttgagtacccaaaatatctcttatacacacactcaacccatcccaccctttctctcttcactatctttctctcaaccacattttctcttctcctctctaacaattcaaactaaaattttatttttagttgtaaattaacctctccaagctactacaaagtgctagaagttagagactttggtgtgaaactccatttttgaggcacccaacaatttttggcaaaaatcaatggctaagtgatttttttttttgttcttatatttagcttagaatgttgttttcataattgatatgtggattgttggtgtttttctattgttttgtgtttaaatagttgtctggtttattttggtttttctgcattttttttgcctagttcgatggagcccaataggggcccaatactagcccgatgtgattattagatctatggtcggggatgatgacccaattaggcctgatggtagtttgatagtattctacgaactaagatcgaggaggatggcatgattgggcccgataggggcccaatggtaattcgattgtcaactttaacttaagggcagggctgattggcccgatgtaagcacgatttacgcctgatgctggtctaattctaaatctggacgtcatgagtctgatggtttatctgatgtaggcccgatgcctatctgattgtcctcttggatctaaaactgggactgatgagtccaatgttaggcttgatggggtacgatttgacccgatagtttacagatttatggcattttaagacttctttttttatcacttttttgttagatttttgttctaaatttgtaattataaacttttttaatgtatgtgataagttcaactgttaatgcgttcgttatgtataatggtatttgggagcttgagggtagagattgggtttataatcgcaccaaaaatttgacatttgagattgatacaaacgtaagctactcatgtttaattgatcttttgtacgaagaactcggtagaattcagtgttgataaagtgtagtatgacttgaaattagaagtgaattacaagtacatgaaatgcttaatgtatcgtcctgaagttattggaaatgataagcgtgtaaggttctttttgtctatgcttgcaaagaagccaaatgaatttactcccttatttgtgacttttgtaaataagaatgtatgtatcgattctagtcccacaccaagtactgttaatgatactcgtagcgaggttgggatttttgttctaaaaataaatctggaagtgttggcagctgatgtgttacttgaattaaacactatgataccgacagttgacattgtagcacacatgccctttcttgatggttttggtgatggtccagatcctgaatgatatgttgagggccatgatgacgtaagagacgaccaagatatagaggttctgctgatgtagctttgaacttgactccactattatactaaagaccacccaggccaccgacatagaaaagaatgccttgtagagaaaatcgccaaacacttagtactaatagtagtcatccagacaaaatcagtaatgctacaggaaccactgatggtagaggtcctagtgatgctagaagaaccagtgaagctagagagaccattgacggtacaggtcttagtgatgctagagggaccaattatgtaaattaaccatgaagccactcctcctgatcatgaacctgattcttttcccaaccgagcttttatcagatccgccatgagtggaataaccgagtaagcttgatattccggcatcttcccaatgattactgctttatccagaaccaatcaaccaaaataaaacataatctccctattcctcactgcccaacgcttttattaaagtggtatttcattaccatcggttccttgatgagaccaaattgatgttgatatcaaaacaaggtttcaaaattcttaaacttggcgatgactattggaaacctttggaccccaatttcagaaaaggtcaatgcatggtgcaatcaaaagatagaaaccaaatgtagttcatctaccttgttcagtctacgacactaggcttggatttaaaggttactttttttgacttaaggacagaggtttatggcatcattaaaaatttcccacgtggtgttttctctgatttaacaaagctcactccgctcaagtggaacggtcatttgcagttggtgttctgagtaagaaaaaaaggccttcgagtgttggtactgagaaaccgagaaaggtatggtcgtacgctccaataccagaaaaaagaagaagtgttagatgtggaagagagaactcctaagcaaccgcgcagggacaatacacttatatcattaagtgaagaagatgctcctcatgtacataatcctaataatgacctcttagttgttaaagtataaatttcaaacatgacagtagtgtggagtaggatagacaatggaacctcatcgaacattcttttcgaatcaacctgtgagaatatgggcctccaacttaaagacctagtcccatgcgcgcatctaatttatggtttttttgaaaacaacatcgcatcattgtgcgtcatccatctctcccttacggtaggaaaggctccaccacattgccaatcttggtaagatggtgtcaatcttgtcaagtgccaagcttggcaagtggtcgtgaatgttatattatttgttataatataatatagattaaaatatttaaatgtgacaaattatatattaatatgag

SEQ ID NO: 57127 - DNA, 613 bp, Cannabis sativa
ctgctgaggaaggattctgggctattttcaagtatgaatatgttcctaccttctgttttatttgtggaatattgggtcattcggataggttctgtcctcaactgttcgttgtgcctgctgataaaattgtcaagccttatggggctggtatgcgtgcccagccaagaagacggaatcacgtaatcggttcgaaatggctcagaaccggtgaggatgaagacgactccttcaatggtggtgcgactggtccaggttcattgccctcaatcaacgctcaaggttaaatctcttcttcaggaggagttatgaccaccaatcaaggaatatcaacaggtaaattacctgttattatttcaaatcaatttgaaggagtgaatattggaaagtcaaatatccaaggaaataatgttgttgctgatcctattcacgtggggactattatggaaacaagtgaggcttctcctttgcttgttgttgatactaaaagaagaaggactaatgaagtgggttctaatgggcccgatggagtgggcttgcaaaatagtgaaaatatggatattttagtttgtgatgatgatactgaagaaggctcaaaaaatgggcttttggtggg

SEQ ID NO: 57128 - DNA, 855 bp, Cannabis sativa
tagtctctagcaatgtattcacaataacaatcatatgttgttgaagttttcttcaagactttttcaagatattttagtttaaacattgttatttggcactaatactggcccctaacattttttataggtggcatgttacgattggttaacgatattctctaaaagttatttttttatattatatagaacatgctacttaattacactaacagtaatatgacactaaagaatgtattaaacactagtagtgtcttttaacaattctctttagtttgtcttttagttgtcaatatcgttattggtctaactaagtatcaagtctcatacagtttattgtaataatttttaaggaatatcgttagccaattgtaaagcgatacatctaaaatatgttaagcaccactggtacccaataacaatactcttttaataactttagtttggcgagtctagtgtactgtcgtagaaacttataatatgacagctcatacattaatggttaaatatgctttattaattactgttagcaaggtttggtggctcgactatcctccaattcgatctcttattttacatgaggcaattaataaatgaatgcgagttttatgtcggcttctctctcttagaaattggtgaagtcgttggcaccgtttctcacaaaaaaaaaaaatgtctagtactatttaaaaatagtgtgacattctataatagtttaaatttaataatataaaatttaatacttttaagtggtattaggcaccatatttttccttttataaagagaagtcaagtcatattatatattcacttgaattcaagagaagcctttaataatagttaatcatgtcattgtaa

SEQ ID NO: 57129 - DNA, 765 bp, Cannabis sativa
gtatggtctttgttcttttcgcattgctttgctttggtccctccgatttcatggtgttttcttgtttttcttctttcccttttgaggtattatgtttttgagaaagaagaacatgttgatagtggagagcagtgatctatgttgaactctgtacttgtaatgaatcataatttgctattttaatttttatctgtttttgtctcattgatttgggtgttggactttgtttacttctgtattagatatcaactgcacctttttattctagtaaaaaaatgtaaaagattccttaaaaaatcctaatcagttaaggtggatttattattgtcatagagtagaaaggctttcgaattatttaccttcataacttatttttacttttttaaaactagaaattgtttttaaaacattttttttgaaaactgagttgaaaaacaaaacatcaaaatgttttctattttaaaatatatatatttgtaaaatataattttaaaacattatctcacatacccggggtttggggttcaaaaatttttgtatagtatgtaaaatttcaaataaaaatatataaaagtattaaacaataaatattataaatattgtaaagagagcaaagtaatgtgaaaacaataaaatattaatataaataaatttgaagaaacttgaatgtggagatgatgttaagtatactaatcattttgttcttttaaatagagaagctatctaagtgaagcatctcaaatctcaatgccacaattctatagt

SEQ ID NO: 57130 - DNA, 666 bp, Cannabis sativa
ggacaacgattttgctctgaaacacaatgcttcgaaccattttcattgtcatggcgaggctctatttatagtgactaaaggtccgtattagttataagaattacaatttgttgtgactaatgtgtttttggtcacaaacaacttatatctaaatattatattttaaagtaatatttaataaaaaaaattatgttataactaaaaaattatcactaaataaagtattaactttttgtagtaagtgtagatgatgataaaatttgggttttgtaacttacatgtatgtataggaggcttattgtctattattaatttgtttgtatttagtttttaattgtgagctataaattataattatgattgatcattaagaaagtaataaaatttattaaaaagaagacaaaattacttaccaaaaagagagagttaattagatgaggagacaactttaatcaatcaagttgtaggtaattaatttagcaaaaaaaaaaagttttacatagaaataggactcccacaaattgatatgcccacaccattacaatttttttttgagaaaagataatcttgattcaaactcagctataacaatctcaagcagtaatatcgaagcattgctagtaataatgtgacaacctgacaaagaactagagttgcgagcaatga

SEQ ID NO: 57131 - DNA, 713 bp, Cannabis sativa
ttggaatggtttgtaaagtttgaatagttacaagttaaattttcattccctaaatgaattaaagcttaaattctactcttatttctagtaatcccgatttagcaggattaggtcatgattattggaaatcgtagtgtgtcaaattgtcagggcattatagcttcacttgttctttagactgcctcaggtccaaggtatctacgttcagtggcttcatcctagtcaatgggaaaacgacactttcttccataaagcatctcatacagtgccataccaatagtactctgataactattgttataagaaaacttgatcagaagaagatacttgttccaggaaccctcaaaatctaagatacaagctcgtagcatatcctcaagtatctgaatagtcctctcaaactggccatcagtttgaggatggaaggctgtactgaattttaacttggtacccattgctcgttgcagagttttccagaacttagacgtaaactttggatctcaatttgagacagtcgactttggagcaccatgaagtcgaactacttccttgacatatatatatcagcatattgatccactttatacgtagactgtactggtaaaaagtgtgatgattttgtatatcaatctacaatcacccagatagagtcataataccttactgtccttggtaatcccaccactaagtccatggtgatgtcttctcatttc

SEQ ID NO: 57132 - DNA, 926 bp, Cannabis sativa
tgtacatagatgtataaatggtgtgcatatcattttcttgtgaggttaactatatctggcatgcgattctgaatattgtgcagaaaatctgcaagtggttcacgcagctactattggcggttgagtacttacattcgaactatgttctacaccgcgacttaaaagtattattttttttttcacatttctatttgttttattcatttgtttgtatcatatttcagcttttgtaaacagtttgtggtgtattgttttgcagtgttccaatatctttctcacaaaggaccaggatgttcgtcttggtaagtttgagttccaatagattgaacaacgatttttgggaactattttgttatgtctttaccatcgtttttcattcctttatttgtatacaggggactttggactagctaagaccttgaaggcggatgacttggcttcctcggtatgcactgtatttacattttttcatgaaatttgttgttaaaacttttcaagagctgctagagctcttctatctgaaaaaaaaagagctgctagagctcatgcttgtgttttttatttttattttatgtgtagagtttagtgtcaagttttcagatgtgtaatatatgtttaagtttcaatgggaactcttttagaatatatacagaactgtaggtgttttcattttcttccttgctatagtgaatttctcactttgttagtttccgaattctagtaagtcttttaatgtactcataactgtgtgccaaatacaacataatattttccctatatatatatataaaacttagctttatttattaataattataaaccttaacagttactttttgaataccatgaatccaaaaatcatattgaatgcttcttggaccatatgaatttaaaataaaataatttggaaactttagttgtatagg

SEQ ID NO: 57133 - DNA, 1187 bp, Cannabis sativa
  modified_base (804)..(838): a, c, t, g, unknown or other
  modified_base (1147)..(1147): a, c, t, g, unknown or other
tgatcgtattaagaatataacgataaatcatattaaccgctgaatgtacatccatatttttcgaatatagatgatcttactttcaagtggacattggcatatttaactctttgcagagaatgatcttgtcaaaacaactatgaagaagatgcaaatgccatagatatatgattgcagctattgtcttttgatgacttaggtctagttactttaaagaggtgttagaatagttcaagtggatcctagtcatagaatactaaactcatattccatacataaatatatagtttggatccattgacagaaaatagatattaataacttgtgaaagtcatactatattgtctaatgtattctaggaaactaaaatatcacatttctatttggaatctaaaatttaaagtcaaagccttaaatttataccaaatagacaatgagtgattattctctcttgcaccaccactactaatttaactctaagtctaatttgcctaaagtaaacatatacacgtaaaagatttctaagatcgagaatttacatcatttcacgatagaatatcgggaatgtagtcatctgtgccattcaatttcataaaagaaaataggattacatcataagcagatgatttataatccttctatccatgatatactttttaagaaaattctaattgaaaaagctaaagaggaataattaaaggataatttcgaataaaataagaatttaacaatgtcctagtaggtgagagtcaaagttattcttatcttagaaactactttattgtttcatattgtaaacactannnnnnnnnnnnnnnnnnnnnnnnnnnnnnnnnnnttgcatttacaaatacttatctgttgagatcgaacactattatgtttgtctaatggatgacaatcctttggaatttgtcccattaaaacaacaagttaagttagactaacaatgaagatctcaaattatactactacaattaataacaaaaaatataggttcaatataaattcacacacaattcaaaaattatcaaggatttagaaataacaaagacatgtgaaaatacaaaacaagaacatcttaaataatttctaaggtttccaacagacagatacagtgtccctataggcgagagtcaaagatatnattcattgaatagagttgtcagttcatctaaaatggacac

SEQ ID NO: 57134 - DNA, 932 bp, Cannabis sativa
agtgggaagacagtttgtacctcctctccaaactaaattcttgactttgggaggtatcttcaatctccataaatcattccagaactcacttgcttcaattgtgttccaatggccattcgattctgtatcaagttatacgcactcttgaccgaatatatccccgaagtgtctgcagtccagtataaatgatccccacctgaagtgagctgaagaggaattgactttattaaaccctgatctcgtgtattgaacaggtcagctagaatttcatcatcccattgaatactatcattaaccatcagattagacacctttgcattcaaaagagcaggatggcaagaagttacagtcggctccgcgtcatctggtaaccaaggctcccccaacacatcaatagttgaaccatcaccaatatgccaacgaactccttgtttaacaatagtttgggcctcccaaatacttctccatacataacttggattattgcccaatttagccgaaaggtatgaatcattcttgaaatatctagctttaaaaactcgagaaacaagagaatgtggttgagtcataaatctccacccttgttttcccaggagaggcaaattgtgatcccgcagactcctgaaacccaatccacccacactcttctgcttgcttaatttatcccaagacatccaatgaatccctttgaccttggaatttgatgtcttccaccaaaatctggccatatgttgttccatgtccctactaatgtccaaaggtagaaggaatacactcatggcatagcttggtaaagcctgagccacagtctttatcagaatctccttccctgcttttgaaaggaactttgtatcccaattgtggactctctttctcaccctctctttgaggtaccccagaactgcatttttgttccttcccatggtgcttgg

SEQ ID NO: 57135 - DNA, 1145 bp, Cannabis sativa
ttggtcaaagagagaaaccaacttattgggaaattcaatttgtcagatttctttggttttgtaaaaattgggattcgcaaggatttgaggcaagaggaaaaggcttccatgaaaagtttgaatctatgatggagaggataatacaagagtgtgaagaagctaggaatgtgggaagggaagaaatgatattgttaaagacttgcttaacatttttcttgacatatcaaacgatgaatatcacaaattagatatcaaattagggagagataatatcaaggcctttatactggtatgttctttcaaactcttacacattcctttaaagtcttaaattcaaagaccactttgatttgcaatatctcagaattaatctttaagagtgaaaaggtaaaacaccattgtgcaatttaggccttaaattaccattcatacatttgttactatatatttcacatctataggatatatttgtagttgggactggaacaactgccataaatatagagtgggcactatcagagctaataaatcacccaaacattatgaaaaaggcaaaaaaagaaatagatagcatagttgggaaaaccagactagtagaggagtcagacattgtttatcttccatatattcaagctataacaaaagagacattaatactaagagaatcaattgaagattgcaccattcatggttactatattcctaaaaagaccagagtgtatattagctcatgggctattggtagagactccaaatattgggaaaatcctcttgagttcaacccagagaggtttctaagtgaagatgggagtggaaatatcaaccatatggatgttaggggacaaagtttcaatcttttgcaatttgggagtggaagaagagggtgcccaggagcttcacttgctttgctggtcattcaaacaagtattgcttgtatgattcattgctttgagtggaaagggtttattgacaaggttgatcttgaagagggacttgggttcgcccttgctagagctcatcccttaatttattttccagtttctagatttgttctttagatttgtaagagtgatctgttaatgactaagagtacaatattatttaccagcatttgttggaggttgatttactatttgtaagtattt

SEQ ID NO: 57136 - DNA, 526 bp, Cannabis sativa
  modified_base (37)..(45): a, c, t, g, unknown or other
  modified_base (118)..(124): a, c, t, g, unknown or other
atgttcaaacagtttattttacatgcgtataaaatannnnnnnnncgcgtgcaacacactgtttgaacatatttttcggcgtgttaaattttaccaaatttcttaaaattttacaggnnnnnnnaaataactataacgtacatgaccacgagaaaaaatttgactaaaaaattattttggatgctaaaatagataagtgtgcatgaatgtatccattttaaggggtgcattgtagaattctccaatattttaattacctttcctagttatgtaaacaaaataaaataattttgatattttttccaattaatttaataaacaacataaaaaattgtttttattattttatattttaaatcaatttatttgttcatttatatctaattataattacagtttaataaatgtgctatttagaataactgattattcctttggttaccctaaaggtaactggttacctgacttttttgatatctttcttatcatatagcgttgtttatctattaataagtttggtgtgtat

SEQ ID NO: 57137 - DNA, 541 bp, Cannabis sativa
aaaaaaaaataatttaactactatttatgaaaatttttgtattttgttttgttgtgtatcattagaatgccttctctacaaagataaatgtaggatgacaattcagtatatgtttctgaaaaaaattgttgttggtgctacaaaacaaaattcagccaataaaattgataaaaaaaacttcgtatatcttttatagtttttgagtatattttgactaaattcataatataaatcatctcaaaaaaattcataatataaattatgacattgtactttattaaaaaaaattattattttttaaaaattacgtatttttataaatatttttaaaattagtgatgatcaatatacacgtgttttcgtaagtaaaactatcaaaaatcatacataataagtaaaaacatgattattttgtaaatcataatttcaagtaaattaaaaaaaatgggtaatttataaaattgaacataccaaaaaattctttttgcttcttagtgatgcctgtgtaatctcatttagtttataaatagtgatatttttt

SEQ ID NO: 57138 - DNA, 939 bp, Cannabis sativa
agatcaacggggtggaaggtatggtttctaatatgggagattggaagtccaaatggttttatgtgtttaaggttccagggattaggactgactttaaccgctggcctagtacgtcgcgtgcttctttacttagtcaatttttccagttatcttgtgactttaagctaactcgtcctttttattgttgcagatagaccggctcgacctaaacttgacgcgactcgcagagaaattgctgaagttcttggaagcctccctgtgcaagatcatgattggcgattactgtgcacgacctcaaagctacgagaacacaagatgattccagtgaacgcaagccttcaaagagagccagtgtacaaggagccgtctgagaagcaacaagagtagatagacaaatgcctctccaagcaaacttctcgaccaacgtcaggtaacatatcgcatgtataaactagtgcattaaaatcttattgttattggcacttatctgtttttgtcctcgcagagatgactttcctgaagtccgcacctgtccttaatcgcaagccagaagcgggaacagtgacgacatcgcctgtcgttcctcagaagaggaaaagcgatgttatggcaactcctgccgcggattcctccaagaagctggctaaggttccacaagacaaggggaataaaatcatgatcgatccagttgtccgaacttgcgacttcctgattctgcaggaaaagtttgtgggcgaggacttcatgtccaaggcggagaggactccttccgaagagcttattccgcgttctgtggagttggcttcgcaatccatgaccatgttcataaaagtcgttgctactggccctaaggaagctgaacagctgaagaggcagagtgcccagcttcaggagagcgtcaagaaactaaataggaggcggctgacaaggacaaggacc

SEQ ID NO: 57139 - DNA, 1183 bp, Cannabis sativa
taaccgagtctcatgtctagcaaaagtacgatctagaaacatacgtctcctatgacggttgcgtaccattttagacagtaataattgcaacatcatacacatggtcataatttgaaaatgtcatgtgaaaagaaatatcataatattttttgttgcatatccatatctattaagcattccatgtacataaaaaaaaatgtcatttaacaatcataaacactaaatcaaaaactatattatcatgaactatattgcataacaaacaatatcatagtcacctgtgatggtgtctacctaaaagctcccccaatacactacaactcactcacaggaaacaaaaagaaaaaactaataaagtttgcataagttaagcacttgatgatgatgatgatatataatttgtacaaattcactgccatttgcagcataaaaatgttctcactattagatcatttaccacttccctttagggacaaatcacaatttgacaactatttgttgtacttacaagaaccaactaaacctttcttacaatataataagagtcggtactaaatatattattagactatctttgtttatcttacaaagagattgatgaataggaagtataatgtaacaaacatgatcgtcattgcaaactcacctaaataagttgcatgatcaggaagatgtcttactgcattaatctaaatgctttctggcagaagacaattacaaaaagaacttgaaaagccaaccatcttttaataagaataatgaaagtctaaaacatattccttcttaaatccatcctaatgtacatctgctatatgcataggtaatatgatcattttaatctaagaacacaagtaacatgttctcatcatcaaagagcagagaaatacagtacaagttgatatatactacagggccaagcataaatggagcatgctcaaccacaatttactgactgaatttaaatttttaactaaacaaacctttgccatttattatttctgtcttcgagatatgattatgagctatacatttgtttgaactagcccaaatatcttggataagcttatgaagagctgccgtttctttttcctttttaataattttacagacccagaaggtgaatgatgaaacctggaagttgactgatgacatttgggataaaaagattgaagacatgaaagct

SEQ ID NO: 57140 - DNA, 771 bp, Cannabis sativa
taaaggaattctgtttttgtcaatattgtcctccgtgtcgaatagttcctttttgtagctcaaatgttccgtgtgtatctgggcctgaattatttgaggttcagacagagttcatcctaattagatatttttttttaatttcatgccagacgcattgcatccagattctacctttttgtttatattggattgtttcttatagtcctggattgcttgggtgcaggagaatataaataaatgtttatattcagcatttagagagagcttattcttacttttcttcgaattatcagtcatattatataattcaatcatataatataattggttgctaaaaagagacaagtgtgtaggtgggaagagaagaaaatgaggagtataagcgaacgatttgggatttatcagatataacaacagatgctttttgttttcgtgaagatgtgtgattccatttttatgttctcaattgtacaagaggttttctatttgctttcttcttcactgatattgatgtacttttaagattttgtttactttcgaatatctaaattaggatatgtgattaaatagagttaagtatttttgggttttcgtttgtagatcgatatttatgaggtttcacagtattgaaaataatttttagaatattcatttgttcatagtcaggaatatattattaggctgttaaaaatttctcatgaactattaagattgttagatttaaggatttttgtctaattttagtaaaaaaattctaatatggatgaaagt

SEQ ID NO: 57141 - DNA, 794 bp, Cannabis sativa
ttacacaagcagcaacaatggggtctaaaagtttgaaattcagtacagcttttcatcctcaaactgatgctcaatttaataggacaattcagatacttgagcatatactgagagcgtgtgtaatagattttgaaggttcttggaacaagtatcttcctctgatcaagttttcttacaacaatagttatcagagtactattggcatggctccatagagatgctttatgggaggaagtgccgttcacccattcagtgggatgaagccggtgaacgcatgtatcttggacctgaagctgtcaaaagaacgagtgaggctattgaaaagattcgagcttgtaggcttgcttcacaaagtagacagaaaaactacggagaaccaaagcgtagagatattgaattccagattggggattttattttccttcgggtatccccaatgaagggaattcaaaggttcgggaagaggggaaagttgagtcccaagtttattggcccatttgagattcttgagagagtaggtaaggtagcttattggctggctttacctcctgctctatctagggttcataatgtgttcaacgtctcgatgcttcgaaaatatgtatttgatacaactcatgtattaagttatgaagatatcgagcttcaaacttacctgtcatatgaagaacaaccagcacagattctggacagggaggaaaaattgttgcataacaagactactctgctagttaaagtgtgtggcaaaacagcaaggttgaagaagcgacttgggagttagagtcgcagatgcg

SEQ ID NO: 57142 - DNA, 615 bp, Cannabis sativa
cctgcgagagaggcattttgccttccaaccgtcaattctattcatgattttctgcttaaggaactggaagtcatcttttcttcgacccgtgaagaaaaacgggttttccaggtactactccttagcttttagcgtctgcatttggaggagttgtaggatagccattttcttactattgtgagtatttggagagaagacaactccacttttctctctattaatacgctgtcctgatcaagcttcatatttttcaaagattttcagtaaggtattagcattgtcttccgtggcttgtgtgaagaaaattgcatcatctgcataaaaaaggtgagtaatggaaggggctttgcgcgagaccttgataccacgaaccaaattttctctctcagctttaagaattagctttgataggacttcactgcacatgatgaagaggaagggggatagggggtctccctgtctcaggcctcagttaggattgaagggagcaagtggagctccattaagaaggatagagtagctgacggaagtaacacaattcatgataagaaggatagccttggggctaaatccgtttgctttgagcactctcgataagaaattccattccagcct

SEQ ID NO: 57143 - DNA, 834 bp, Cannabis sativa
gttcatgggcagaatgcaaggcgtgcaagggatttggctgtctttgcatcagtttttttgcagaacttttgagcggctcagcacagaactgatgttgcagcaagcacatctgctgccccaggcccttcgcaacagcctccccgatcacctactgctccatctccatggcgtccacctgctgctgaaggcttcaagctcaacactgatgcaacagctgaaacttcttctactaccattggtgtaggtgcagtgcttcgggatgcaaatggttatatcaaagcttccctttcaatgccgattattgggaattttaaatcccatgaaatggaagccaaagcactttttcacagtctcaattaggctcttcaacaacaattaccaattacacatattgagaccgatgctcttatggtggccaatgccttgaaagcttccttcaattcaaattcagaattctcagatttaattattgatgttcttagtcttttattctttttcctgaatgtaaatgtttcacatgtcaaacgttctgcaaacaatgcagcgcatgggcctcctaaatttgcattaggggtagatgaggcttgtacttggttggagattattcctccccctatatattcggttattgtaaacgaatcttgattgtttaataataactagtattttccctaaaaaaaaaagatatatttgtaactgaaaatattttaacagtacaattttatcatgcagcattcacatatgaaattttaaattaaatatatatgactttgatattatttttattaaattgctaattataatatacagtgttgctcatcttatgtcaaacac

SEQ ID NO: 57144 - DNA, 972 bp, Cannabis sativa
catcatcatcatcatcttctcctaaatatacatatgtccccattgctaatttcaataaggtaaaataactaaaaatatgcttaacactgtttttattttaaaatttattttaaaaaatagaaaataaaaatagatttggtaagttttatttttgttttaaaattaaaaaaaaaaaaaatgagaaagaaagtgatgaaagaaaaaatataatgaatattaataaaagaaaacacgaagtagactataactaaaatacttttacacaatatatttttttttcactttcctaattaaaaaaattaaaaataaattgtttaaataatggttacaaaattcatccataactttaaaaagtcaatttcaataaaagaaaaataaaactcatataattttgtttttgtcctataaattgtcctttttcaagaatgtgtttaaatttaaaatcacatgttagctacgtgcatgtttgttttatttgttcatctataattttttagattgttttttttttttcgattatttttattaaatatgaatttcatttttgaaaaaaaaaaagtaaaatattatgaatttggtttgttacagttcgtaacaataattcatcatcgtgaaattaattgattaaatttttaaaattgaaatccgtttaataatgttctcaaaaaaaaataaaagaatccgttcaataaaaaatctgatattaaaaaatgacacgtgatgtgacgctccactcacgagttgttctaccgactaacggagaatttaacttgaaatctaacggcgttttctgtggctgtaagtgaaacgacatgtcgttttatgttcatatttgttagggtaagtccaaaacgacatgaaaaaaaaagtgttgggaagcctttctctatatatcagagccaggtttcgatcctgggacctgtgggttatgggcccaccacgcttccgctgcgccactctgatttggtgata

SEQ ID NO: 57145 - DNA, 816 bp, Cannabis sativa
  modified_base (293)..(298): a, c, t, g, unknown or other
agtgtcctatttttactattttggaaaatatagggtcaattttgtcatttaacaaaatacagggtccaatcagtaatttttacaaaacacagggtccaaaatagtatttaccctaaaagaataagaaataacatccaaacaatatcaaaacaacaacaaaatatagcatacgaataataaaaaataaacaacaaattaacaagagtacaatataaaaaatacatcaaaagatcgtattttttataaataaaattataaaaatgttaacattttgtacaactgtatttttgtannnnnntttattatttttgtgtatttataacataattcatttattaagttcatttgaggcacatagtagcaccctaataactaaggttagtccattaaactatagtctaccataaataaagatagaaacccagtagctcaattctacttcttagagaacatatatttatgtatattgaatggtgagtgaaaaataggtgaggatagtagtgtgttaagggttattctccattcttttgcgtattttttacttgttttgtggttattgtagagatttgcaattgctaaaaggtagtcattggagaaacaatgtcaagtttaagaagtatatttattaccaaagtaatactctaaataaaatatttgatcttgaataatatgggcatgattttgtattgattcttgttgataattgtatgcttgtagtaattataacacagccgacttagttcgagtttgaactccattatatacacaccatggatgaactaaagtaaagcaaaagaagaaaaagacaaaataaat

SEQ ID NO: 57146 - DNA, 1322 bp, Cannabis sativa
atgattattaaattaaattatgtattgtctcatacttaattatattaatagtgatttttagttgttgtttcggtaatttttttgtgaattattatgtgaattttgattacaatttaagttgttttattagttagtatgtaaatttttgtaaaaatgcaaaaaaaaaactgctttgaaatatataaaaaaaaaccctataatatattagttagtagtggtggcttatagcaatgctcttctctaagagaaatgctaaatggtattcatgatatgtctagcactcttgtaaggtataatattactattaatacaatttaatatcgatttccacttattttattttaataaaaattataaaaaaactgctaaccaattatagtgtttaaccttatagtagtgatatatatggaccttaatgtctcattgttgtttctccaatggtacatatactatgaccaagtggttgttgttaataattagtgagtttttaaaataattattaaattaaaatatgtacgacagaaaaatattaagatatctagaacaacgttgcctggcaaggcccattttttatattatatataatttatgtaactagcttgtacgcattattatattttcaatgaatttatttattgctttaaaaaaataaaaaatattgtatcccaataggagcatcgatgccctaataggtgttaatagtgtttgacactatctaatatttaatatcgttattggtgaaattaattatttaattttacataatttaattgaataactattatggaatatcatcattcattcacaaaatattatgtcatagtggtgcaactattagtgtttaatagtaatactctcaatacttaattataccaatagcagtatgaaattttgtggtggtacacctctagtagccttaagcttaacttataaaagcatctccaaccacacttcttaatttctagccaaattttaactaaaataactaaaaaattaaaataatgagtcatttttattatttatgcttcaatcatgcttcttaatttaagtagtaattgattattataataatattttataatttaattttttttaaatataaagtaatttaataaaataataaaaacataatagtacttattaaaaattattaaaaaaatagaaggctctatctattctctattatagagaaccagttgaagctcatttttttaaaattccactctatattttagttaagaaatgtgtttatatagcatgattgaaaaggctctaactaaaattttggtagttttttcttttttcttttttatatatatata

SEQ ID NO: 57147 - DNA, 1258 bp, Cannabis sativa
ataattctttatttcaacatatatagcatggcgttgcattcaagatcatttaaacactagggtaatgaccctagaccatataaccgctcactttggggtgataaccctaatctcagtttttcatttaatcacaagaataatacccaacatgagtgccaccacgcttaactctacgtgctaactactgtcttacctggtatcccaagtatgtggagattccaaaccttcgagtgttcctgagcaagcgttggtaatcctagtcataattctcgagatttcacaaatagggttaatcctaaaatttactttcacataatcacaaaattttaattccatttacagaccaacatataggtaccaaaatgagctttccaacaatacaaagaacatccaaaatagattcccaagtcaaaagttatggtaaaaacaaaatagcaaaaaaaatataataaactgccaatgctatggtcgcgaccaaactggcgatggtcgcaactagagcccaaacaggggctcatcctctgtggttgagtgctaggtcgcgaccactgggtttaaaaacccaaaaaatgcccaaaaaatcatattttaacccaaaagaaacataccaaaaccattccagccatccaaatcatgcataattctcaaattcaatttaaaaacagcctatactaatattaacatccatcacaaaggtaatcaaagtttaaaaataccaattcatactcatcacacaaaagcttaaatcaaaaccaatataatttctccatttcacaagcttgaacacaaagcttttaaatcaacaagaaataccctgcaataatccatgccaaacctagatttcaaacacacatcacaaccctaaattcccccaaaatcatgctagatgcaatactcataagcctactagctcaatcaacacaaaaacaccatattttaccttaattcaaatcaacatgcattcaatttccaaatgaatatcaagaacatcaagaacacttaacaattcatcataactttaaaaaattagcaaaataaaaggttaacaatcttaccacaagttctcttaagcattaagtacaaaacttcaccaataagacctctaattcaagctaaactttaaattaaatgacaaaataataaaagagatgagaagaagaaggagaggataggctagggctggaaatataccagaaatgagtttctaattttttcaaagtcagttttttgttgaataatgcataaatggtcaaatgac

SEQ ID NO: 57148 - DNA, 1408 bp, Cannabis sativa
aaattttgcatcataatttggcatgcttttaacaaaatgaactatcttagagcatctccaatagaaatacaaatacaaaatataactcattttgtcaaaattctactttaatggtgtgccaaattgtaatgcaaatatctcacataacaaaaagtgatttaaatttggatcacaatatagcatgatataaaatttgcatcacaataaatattatacttttatatttattatatactatttttaatattttattattaaagttaagttagcatgctaatttacattaaaagacttttttttaattattattattttattattaaattttatatttacttttatattattattatcattataataattattattattattatatgtttttaataaagtattagatgagaattaaatgacattaaattttgtattaagatttacaattatgtttggagcataataataaaagttgattcaaaaatatcacaaaattatattttgtgccaaatatagatcaattttcgcattttcgatcttagagagctaattttattaaaaatgctaaactatgacacaatattttagcaatccattaccattagagatgttcttagagatttctaatgaagatgatatgaaggatgattgatgacatgaagacatttttattattttctaattgatgtttaccattacaatgaaaaagaatatcacaaaagaatgtcataacatatcttctctttcttattttttgtattataaagtatgttaaataataatataaaattattttaataatttttaaaaatgcatacaaaatcattttagaataaaagtagcaaaatcatgtaaaaataaaataaaataatatatttttaactaatgtagagatttgtgaccctcttcgaaaatataaaaatacattggagatactcttgtaatccttcttcgagatcaagaggaatcccttcagtctacgagtggtcaaagcctatgtttagaaacccctcaaatagaatgactgtcaaacaaatcagcctacagaccccaggggatatgcagtgcagggtctattctggagaagccttttagcaagtaaataaaattttgaaaagctttgacaatatctttttacctccagtatctgaaaaaattgccatacaaaacgaccaatactactgttctgtatggcgagaagagtgagaacagagggagttactataatattgatcataacacaattatttattatgtattattattaaagaaataaagttcataactcgaataaaatactggggtaacaacctaacactatgctcaacaaagtttcttgagccctgtactgcactggcacatatttatatataatataaatttacttcatgattaggtttggtgtggatta

SEQ ID NO: 57149 - DNA, 1238 bp, Cannabis sativa
tccttggttactttcttgtgtgtatggacccccttattatcatgaaaagaggctcttttggtctaacttgatggagcttggtcgtaaattcggaggaccttggctaatccttggggatgtgaattttgtgctgagtgactcagagagagtaggatcccggggaaaggaccaatttaccccctttatctcaaacctcatcaatgatcatgctctggttgacttaccaattaaaggggattgcatgacctgggacaaccatagagatggtagcaggcacatcaagtcagccctggataaagctcttggcaatgatgattggctaagactctttcctagggtggtagttcaatctctcgccacctgcaattctgatcataggcctctctttattaagtctgttgtccaagattccagaagcaggcgtccttttcgctttgaggcctggtggactagggacccccgtagctccttaattgtggaacatgcgtggggatctgtttctcatgattgggccccggccagagtttataagagagtgggtgcatgcgccttgctctgctcaattggaatcgggaacaatacggcaagctagatacgtgcatttccaagctacaagaccagttacaagctatccaaagtatgcctacgggtactagagcctgggctcaggagatggagataaggaataatcttaatgaggccctaagacggaagtcaatttactggcagcaaagatcccgggtttcgtggataaaggatggtgataaatgttctaagttcttcttcctctcggctacaattcggaatagaaggaactcagtggagagcatactgagttcggatggggtttggttaactgatcgagatgcaattggaaaagaattcactgattttctagggaatatttttaaaaacccgcccaagggccgttggaaagattagatcacctgatttcggaccacctctccccctcggaacaagcagggctggaggctatcccttgttatgaagaaataagacaaacactgttctcgatgggtagtatgaaggctcctgggccggatggaatgtctgttctcttcttcaaacattattggaattcggtaggaaaagatttctgtgatgctgtgacagatttcttcctcactggaaatttacatagaggcttcaacactactaatgtgacactcattcctaaagtccctaacccaaagaaagtgtctcagtttagaccgatt

SEQ ID NO: 57150 - DNA, 1422 bp, Cannabis sativa
acgtggaatcgacttcacatatctgctcgaaagagatatgccgaacagaacaccgtacatatctgcagggacgaagcctgcctagccgagtagtggacggtccgaacaacatgctaacactttgtaacttcaacacttgcaccgtgaatcacagaagcaatccctataactttaggatcatatcatagagatatggtaagctgtccaaatcccttaatcagtgtattctgtatttaatgtgtaatcttaccaattatagacattgtaaatagaggagaaactttccctcaagcttatagcactataaatagtgatttatactcactggcgaaaggtcgagagaattatctaagagagtatacttagagatatcgttgtaagagctttaagggaaggatcactgtattctttgtccttaagtcaatacaaatcaagtggagtaggctattaccgaactgctcggggccgaacctctttaaaaactctgtgtcctttatttattttactatattacatctatattatatcacttatcgcttacaattaagactcattgtcgttggctaaaaagtgaggtcaacattttggtgctttcattgagagcaagggtcacaaactcgctctttacttcaaggctcctcccatgaccagctccaaagacaagtcattgtccgccccagccacctgttcatttacctcagggactgatcgactcacatagtgggtaagcatatctctgcctcttttagtctcctggtgcaatccaagaggtggggcaggggccttaacctattcagacccgcttctgatcagtttggatccaccttttgcctgctcgaattcatccaaactccctccttgggaactcttggacttactaatttttgaggcaggagggtccacaacagtttgttctttagaaaggtcaatgaccacttcagctagtgccttctctttggacggagtctcaccacttttcgacttcttggctggaggggacaagcccgagcttccccccactctcttcttcaaagcctcaatcatcttctgagatatttctacacgaaataaaaataacatagtcagaagaaagaataagatatatgaaggcatgaaaatcaagaaagttaaatgcaagatgaagtactcttcacgctggtaggagcatttggccgaacaagcagagatggggcgtcatcatccgaggaatcttccatctcctccaggacggctttccctttccttctacagcggtggatggccgagcaggtagatcaggctctctaatccggatagtatgttcaatgggtctctacccggtcgggagggttttcttcttcttgagcggcctctcttgctctgaatattcctgagcctccttctcctactcagaataaacctgagcatactacttggctcctg

SEQ ID NO: 57151 - DNA, 591 bp, Cannabis sativa
agttttagcactggaacactctaagagggcacggaccatcgagccagagctgttgctgaggaccaccaagccagcgccgttgctgaggactaccaacctaggtgcagttgctgagaaccaccacatagaaccgattaatctcaaccaccgcgtagaaccaccgaggaccactacgtagaaccgtcaatctcttagcctgttagccctgattctctctctcagccccgatcgatctcctctctctcacaatatcgatcacctttctgtctctcctgatgtagagtttttcattttttttttttttgcaatctctgttgttgatatttctgtgtatacatattcccattcggatatttttgtgttctttggatttagatatgagaaaagataatcattgtggggaaataaatttaaggtttttaagtatgagttttgtggctgagatgttgtgtgtatatatatgtatatgtgtgtgtttatttatttgttagatttggatttgtttaaattagtttgagttttgttttgtaatttttttgtgttttggatttgaaaaataggttatgtggtgatttcggtagtggtgggggg

SEQ ID NO: 57152 - DNA, 1561 bp, Cannabis sativa
  modified_base (32)..(61): a, c, t, g, unknown or other
tttagaagtttatatttagggtgttaatcaannnnnnnnnnnnnnnnnnnnnnnnnnnnnnaaaataatttccaacacatcaaacattaaaactaataaacccagcccaccatcaccctaacatactaaaaaaagtacttgatcagaaatcagattaatcttccaaagaattataaataagacaccccatgcatcaacattccacacatatagtaaacatgtaatgttgcaataacagtagacaatgcctgaagtaatgggcaataaacagaagatatcaataacccaagaactaaatattcgacttataccgagaaatatctaacacaacatcaagagcttccaacaaaataaagtgaatgaattcatgaaaccaacttccttacaaatgaatcaaaatacatctaattacatatatacctgaaatatcccaaagagcataattgttaagcttagtacaatctgcaattttcaaagaactcaaacacttaaaagctccaagtcattcattctccatcaatattgtaaagtccttttttgacaatttaaatgccaaaatattttttattttatggtgagatttctttgcattcataaccgattttctcaccttatttatttgtatttattgctctttcctatcttaggaaagaatcatttttcagttggactttttcttgtatggaaacttctcttatggaaagtttgtttttaaaggaaactttgactattattattttccttaatgagtttgattgtgtcttgataagatcagatcaaacacactgtttatgggaggtgttatcctaatttttgcaccctgacatggcatcacacgatggtgacacatggaatcaactttatatacatgctcgcaagagatatgccgaacagagcaccatgtatattcgcacggacgaagccttcttaatcgggcagtgagcagtctgaacaacacgccaacacttagcagtttcaaaactcgcatcatgaatcactaaagaaatccctataactttgggatcatatcaccgagatatggcaagttgtccaaatcccttgatcaatgtattctgtatttaatgtgtaatcttgccaattatatctattgtaatcagaagggaaacttcttctccacagtttatagctctataaatagttacccattctcactgggcagggggtcgaaagatttatctaagaattcatattcagagatattattgtaagatctctaagaagaggaatcattgtattctttgttcttaagttaatacaaactaaagggagtaggctattaccgaactggtcagggccgaacctctgtaaaaactcttgtgtctctatttatttcattatatcgtatctatagtatactacttgtcgcttacaatttagactcactgtcgttggctaaaagcgaggtcaacattttgctgctttcattgagagcacaatcacaatatcgctctttatttcaaatccaatcataagcatgatggtggtacaaactcgtagaggcgtggttgatccagcgaatccacaggcagtggatcctgca

SEQ ID NO: 57153 - DNA, 1171 bp, Cannabis sativa
atcagataaacgacgaaccaaaactaagtgaaaactttttgaatagttacaagaaacagactgatcagaaacaagaagaaccaaaaccaagtggacacattcttttctacgattacaagaagcagaatgatgagataaaggatgaatcaaaattaaaggacgaaaaaactgattcatccactattaaggactcaggctatgccgaggcctagtttgtaaaattgtatgtgggtagagctctagctagtgctgcaatcatcaaagtttattagtcatgttaaattaatgttttatttccaatccaataaggcagtatctaaggcagtatctatctatgtgttgagctcaaataataaaaatatatatcatatatgttttctttaatggttgattatataatagaattatttttaagaaaatattttgtggtaattaatgactatgaaaatcaaatataataatctaaagtgtgtgttttttcagggcatttaactaattcgcacaacagtttttaggaaatctggaaataactattttagagccatcattagggcttggagtaacatcagtcaattttaactagggatgtaaatggggcggggtaggtgcggggaatattgttctcccattcccatacccatttcttaaattcaccctatacccgctccaatacccgtttaaattaaagccggggtggagcggggattacccgatgggggaaggattcccatcaggtactcattacatatatatttttgaaaaaaaaaaatgtctcaaagagaattaaaaaaaataatcatgaaaacttagtaaaacaataaacttaagtggaatagtgtgtatagtactaaaaaaaaagagtataataaataaaaagcctaaagcataaagttattttaattgtagtagttatgattttaaaacttaaatatatacatatatcatatcggggcgggttcggggcgggaatctattcccccgctcccgccctgattctgactcgggtatgaatctttaaacccatactcgccttcgcccccgaaagtcaacccttgtactcgtaggggcgggtacctgctgttagagattttataacaatggaagataaatcaagatatgtacaactcaattataaaaataatacaaggataataaaagagattgattaaat

SEQ ID NO: 57154 - DNA, 785 bp, Cannabis sativa
agtagcagttttttgtagtgttagtgacaatttgtaactaaatactatgttttagtcaaagtaacattttattgtgactaaaaatcgcatttaatcacaaaaaacttatcctgtgactaaaaaattattactaaaagtaaccattttttgtagtcacaatagaatagacataccaaataaactctgaaatgactaatatatatgtcaacatcacttaggtactatattctttaacatttctcaatatatatatcttcaaatttggccttaagtagaactagagcccataatttaagtatggtcgataattcaattaagattgagttattaataactaacttgtttgtgtcaatatatatatgccagcaatatagtttgtaaatacaaactttacttcgggacccaaaatttattatagctaggggtctatatatcaataacaatatttaattacttcttgttattaataaaggggataatttattttaaaagaaaataataaaagtttgtgtaaaaaaatattgtaattaaatatacattatgattccaatatagctatcatgaaaatgtttataactctaaatattagatatattaatttgttgtcgttaaatgtattttacgatatgtattataactaaaattaaattaatatatagtgtttctagaaaaaattaaattaataaatttttatatttaaatattattttttggttataacgttgttgttgccactaaacataatatttagttatgagaaaaatatacattaggataaaaatata

SEQ ID NO: 57155 - DNA, 1545 bp, Cannabis sativa
ataaattacttgagtaaacctgctattacatagaattaagtataagaattgaatcatgttagaccataatagatagatacaattgaaatcaataaccctaacttgtaatcatcattaattttcatatcaatctacttgcatcttgtttccttattctattgtttttattgcttttcgttctagagttaatcttttcttaattttgaacaatcaaatagaattataaattttattttaaagtacttaactacaattcttgtggggccgatctcactctttgtgagtctataacttgttaacgatacgtatacttgcattaaaaaatactacaacaagtttttgttctacctaacttaacaggggttagatcacgtatattaaggcaacctaccattgaagcgaataattttgagatcaagccagccatactatgttcaatccacaatccagtttaggggactgccatcagaagatccaatatgtatcttgcatattttgaagacttatgctagacatttatgatgaatggggttactgatgaagcaatacgattgaggttgttcccattctcattaagggatcaagtcaagagctggtaggtatctttgccaccaaattctatccacacttgggaggaattggccctgaaatttctctccaagttctttcatcctgctaaggaagaaagattgagatcaaagatcaataatttcatgcaacatgacaacgagtctatatgtgatgtctgggaaagatacaaggacttaataaaaaagtgtcatcgtcatagaatagaaaaatggatacaacttcacaacttctataatagattgaccaacaccaatcgtacccttgttgatgttgcatctggtggagctttcatgaggaagagtgaaaataaggcatatgctttgctagatgagatggccatgaaaaatcaacagtggccacctgaaagaagtcaagcaaagaatgtagctggtatgtaagaagtggatgccatcaccaaactaacaacccaagtggaagcagtgacaaagatgatgacaacccaagttaattagactcaagtggtttgtgaactatgtggtgggcctcacacctatgaaacttgccaagtagatgtcaactatcttccaatggagcaagctcaggccattggatattcaaaagatgatccttatccctaccctgatggacgtcgtcagtatcatgatccatagctatcgggttagaatcatcaaggcttcatcaactagagatataggccaccattccaaaagagtactcaacaacctgcccaacaacagaacaatagtggagtatctaacattcaagtagatctattgctccaattcatgatggagactagagcttccattaaaaccttagagaatcaagtgggacagttaactgctcatatggccaaccaaaattaaaattaataagataattttcctagtactgcaaaggttaaaccaaaagaacagtgtcaagaaaatttcttgagaagtggaaaagaatatgaggggacaagggctaagc

SEQ ID NO: 57156 - DNA, 536 bp, Cannabis sativa
cttgtttcatttgtttggagaaaaggctctaggttttgacggtttaaacgcccatttttaccaaaagcattagcaagtattggactctaatttatgtaaagctacttttcctgtcctcaatggtgaaaccgagatcactctcattaatgaaactgttattgttctcactcctaaaaagaagaatgttatgaaggtttgagactttagacctataagtctctgttctactctctacaaagtggtagccaaaatccttgctaataggtttaaaaaagttcttaattccaccatctgtcctaactaaagcgcttttctcactggccgattgatcttcgataacatcttcatagaaaattagattgttaatgacatttgcactagaaaacatgggaaattggctgtgctactttaaaacttgataaggagaaagctatcgatcatgttgaatggaaattcattgagactatgccttcccattttgggttccccccgttttgtcaccagtgttgttaattgtatttcctctatgtctttta

SEQ ID NO: 57157 - DNA, 1123 bp, Cannabis sativa
aatattgtctaaagaaccctggcatttccacaaccagcatatgatcttatgcctcccaagtactctgcaaaatgcttctatggaatcatacactatcactccattttggatccaagtatttcggttgcctttcctaagtaaatctgaatcccttgctaaaattctaggcaacatgataggcacattccttgaagtccatgaagactcacttaatgaaggttgggggccatttcttcgaatgcgtgtcgaaatagatgtttctaaacccctgctccgtggtcaatttgttacattcccttggatggctgatgaactttggttagattaccgctatgagagactacctgatttttgttatgaatgtggaatcattggacatgtttttgataagtgcccgctgttcttagaaaagattgatgacggtgttgaaccaagtttgctttatggtccttggatggaaggttctcctcttccaaggtctagttatgatcggtataggcaggatttttcaaaagagggtccttggccattcctcacaagacttgctcgaaacacaatcaagccgattctttcacaatcaagacccctccctgctgtcccagtgaatgttactaacgctgagaaagggaagcaagttttggactcttctctaatcattgaatccaataacaaaaatttacactccttgcagatcaattgcctctcttctcaatttccaaaggatcccacttccaaaggccaagcatctacttcaggttctaaggaaattaacatggataagcacattaatattcattgtaatactccccctgtcaccacattttataaagaaaattgcccaccatttgacactaccagcccctcttccacaaaatcttttcctgataatagtactcagaatacaacctctttccccattgccacttatccacccactaccactccacatttgctaaaacctgtagccatatctatgcccattccaccagcgtacatacatgtttctacaccagagatttcttctcctctgcaatccacctccacagctgttactacttctgctgctgactctctacagtatacggagaatcgaatgaattctctcttctccaaacgacagcta

SEQ ID NO: 57158 - DNA, 1589 bp, Cannabis sativa
  modified_base (1557)..(1563): a, c, t, g, unknown or other
ttccattgagctaaagttaacctcgttgtgaacattacatcggtcgtagaacaagttttttagttccaaataactccatttttggcctgccatattgacaaacaaagcataacagcctcctccataagttctggtgtattattgtcaaccaaacctttaaactttaagaagaaattgctactgtgtgtagaaacactagccaaaccagaccgattccagcaagatttgctgaattgacagtgcaggaacacatgaacaatcgtctcttcttctatatgttaaaaagggaaagataactcgacaggtatatgcttggaataaagctgggtatgagtaggtagacagttggttaatgccttccacataaggtgtaggactttcggtggggctttaatcttccacagagtttttcacaccatatcccccatgcccacgctccacgcccctttcaactcttggaggtactggtaggcacttttcacagtgtaaaaaacagcagtatctcttctctaataccatgtatgttcttcaattgagttgcttaaagatatgcttaaaataatatcttaatccctattgtcgaacatatcccgaataatctcttcatcccactctttttgagtcactttcatcaaattttgaactgtgtaagtactcaacccagggtgagttgatattacatatagatagagcatttgacagccatggagctcccaaaatactagtgtttggtccattaccaatacgaacctgggttccctctttgatcaaagtttgcatctcaaaaatactcctccatatataacttgggttattacccagcgtagcattcagaaaagatcctcgtgggtagtaccttgctttaaagaggcgaccaacatgtgagtttttatttttcagcaaacgtcagccttatttacccaataatgacatattgtaatcacgaagaatacgaaaacccaagccttcagcactcttgtgcttgcacaaacgtgaccaactgacccaactaacacctcgagacttctttgaattcaattgccaccagtatttggccatcatttgctcaagatgcctgcaggtttttgaaggcagtagaaataccgacattgcataacttggaatggcctgggccaccatttttaagaggatctctttgcttgcttttgacaagaaacgccccctcccatcgcttaattttctgctgcaatttttcttttgaaaaccccaaaatagcatccttgtttctccccatagtacttgggagccccaaataactagagttatcatcagcctccatcatgcccatcacaccacagagcctaatttcgagtagccacaggagtattggagctgaaaaagatatatgacttagcataattgactttttgtcctgaagccatctcaaatatgtttagcagacgcatcacactaccagtctctcgatcatttgcacgacagtatagataattttcatccgcaaataacatatgtgaaataataggtgcgccattagcaactttacaaccatgtaaatcctgttgggttttatgcccnnnnnnnaactccatttcaatgtaatctatttt

SEQ ID NO: 57159 - DNA, 885 bp, Cannabis sativa
cttgagatagtgttctttgccttccaagcattcaacaggttgtgaaagaatctagaattcgcgtccccttccttgaccatttgcacttgcattttagccaaatgtttctttctttctcaaagactttctgttgccaatccttttttatacctctcctttcatctgccaaggattgattccacattgaagttccttctaatttatcaatctccaatattcttctttccattgcagccttagcaattttgctatttccgaaggttgttttgctccacttcttgatattttcttgcacaattctgagtttggtcatgaatctggttcctggccatcccgaaacatttgccttattccaccagatctcaaaaagttttgagaaggatttattttccagccattgattgtcaaaccgaaatggactaggaccccattttggtggattggagtcaatgacaaccggactatgatctgataccaatctaaccatcatttcttgtctcacaaaaggaaatgacagattccattcctttgtaaatagaaatctatccagtctactacatattggaacgtctctaaaatttgaccatgtgagcctcccattgtttaattcagatcaatgagtcgtagttcccgaattagttcatcaaacatcttcatacttctagtgttcgagacactattgagcttttcccccactctgcgaaccacattaaaatctccccccaagtaccacgacgcaccacaaatttccttcagaccagccagttcatcccaaaaatctggtctgagtttgtatgagcaaggcccatatatcccagaaaaccaccaagggcttttgccttctgcttgaatcaaggcagaaatagaaaattccccaaccaaaga

SEQ ID NO: 57160 - DNA, 1442 bp, Cannabis sativa
aaagaaagcagaaggatgttgctgcgaaattcctccgtacatgaatggatacggtggtccatacatgtaagggtaaggcggtggagggtgtgatggttgtggcaatggctgcgagagcggcggtactagatgctgaggctgtgatgtcgaagatgtatgcatgtcagatgatgccgctgaatgttgagaatgtgcaggggaaccttgatccatgtgtgtctgagacggttgaggtgctggagtggaatacttactcttaagcatattaaacattgctagctttgcagggtccatatttgatgggtccatttgagatgaaaagagattaaacatcacactcatgtcatttacccaatcttgtgaaggtggctgtgattgggtggattgggcacgactacttgaagatttacccttcactctgcgaccaattccacgaacgtgaccccgcctctgaccgaacgcctcttcgaagatgctgacttgatcaggtgatgacccagaatcagtatctatctgagaacgagctgcttgaattgcttgcaaccgctcctatatgaaatcaaaaaattagaacaatatgaaactaatattgggaaaatataaaaatcaagtgacaaagacttacataatcttgtcttgcatattcattaacaaattgcttatcctttttgagatggacttccatccatgtgctgacgtaatccggtttctcctatagtttatgaagtaaacgttagagattatacaatttaatatatcttaactacaattatattcttttcaaaaaaaaaaaaaaactacaattatatttaaacttactaattcatgacgcctctgagctaaggattttgttccttgtgttgtaacatatttcatatttcctcgatttatcttgttttgttgtgatcgggcaagaaaagctgggcttgtaaaaaattcacattgttgtcgccattgttccggagtcatatcaatcggatgatgttttagcgcttcctcgtaatcctcaggttttgtataaaaacgtttgaaatgcacatgtcgactagttttctttgttctgtatctattagcgcactcggtgtcgagacaactcaatatttgttcagcatcaggattctcgtcaattttatagtaaaactacaaaaaaataatgtttaagtatactaacaaatttaattatagcaaggataaattgtctaaagtcatttacccgagctcttgcaagcacttgatccttgaactgttggggcactgccttccaatttttgtaatgtgtaggacaaaaggcaccaatgtaatcgctcaaaacgcgtgggaaagctgcatgctctactcccactatcttttgtgaaattggacagtactctaatggcaatggctcttttgcttccctccttcttttctccaattgttcacgaattgatggaccacgacccttt

SEQ ID NO: 57161 - DNA, 698 bp, Cannabis sativa
tgggtcttggtctaggttggatgcaagtctcaagttcgaatccagatctgagtttggattcggttctggctccaagtctttggttctgatcgtggtctgggttcgagtttgggtccgtgtccaggtctagctttgggactgattctaggagtgggtttgagtttgggtctgagtccgtgtccgggtttgtgtcaaggtctggaccacgatctaggtctaggttcgggtccaggtccaagttggggacctgagtgcaggtccaagtttgtgtctgggtcaagatctcggtccagatctaagtcccgtatttcgatcccagtctgggtcttggtccaagtccaggttcgtatctagatccctatctaggtcaaagtctgtgtatgggatcgggtccaagctttaggtccatgtttaggtctcagtttcggtctgtgttcgatattaggttggggctgggtcctggttatggtcctagtcttgttctagggtcttggttcgacgattctttttcaggttctaattttggaacccaggtctaggtttggattcgggtttggttctttgtctgggttctggtcctagttcgtatccgaatccctatctaggtccaagtatgtgtttgggatctggttccttatttaggtccaggttcgggtctcagtttcggtctgtgtacacgaccgtgtctgggcccgact

SEQ ID NO: 57162 - DNA, 1453 bp, Cannabis sativa
tcaccttgaggacaaggtgcacttttaggccggtgatattgatagacctcccgtgacgtatgtgtatgctcgaaggagtacaaaccctaacaaggggtctgccatagggaataatgtggctgtgtaattctgtttggggattttgtttgggtgtagctaaggctcatgggagtaaggtgtggattgaatataaataatagagtattgtagtgggaaggcaaagagtatttttcttagctaaggctagtaaggagagaccaggctctcgatttcctaggattgaatacagcagaatttccttttcttcattctttcttttcatttgttttcttctgtgatctgaatcgataaggtagacctatcagcatcttacacatgatggggaaccatttgaagatcttgagaaatatcgcagattggttggaaaattatattatctaactgtgactcgtgcagatatttcattttcaattgtgtcgttagtcagtttatgtcttctccaacaattcaccattgggcagtattagagtaaattttatgttagttgaaaagagcaccaaaacgaggtatagtttacaaggatcatggacacactcggattgagtgttcctctgatgcagattaggcaggctccaagatagatagacgatccatccaggttattgtgtatttgttgggagcaatctgatttcttagaagagtaataaataaaatgttgtgtctagatcgagtgctgaatcagaatatatagctatggtacaattttgtgtgagataatatggatttatcaacttttaactaaattcaagtttaagacttcaattccaacaaaatcatggtgtgataatcaagttgctcttcatattacctcaaatcttgtgttccacgagcgaactaagcacattgagattgattgttattttgttcgtgaaaaaattcaataatgcctgatctccataggatatatgaaaattgaaaaacaattaggagatatttttacaaaagctttgactggggtgcgggttgattatctttgtaacaagttgtgcgtgattaacatctatgctccagcttcatgggggtgttagaatattagttgtaaaatttaaggttatttgtatttagtaatttcctatttagtctcctagctttgtatataaatatatactattctattgaataaaatacacaatttaatcaccatattttacaggaaacaaagctcaaccaaagaagaacatggagccaaactcaaggatttaaagagcggggcttggagagttctaagaacgaaagcgagagaggaaagtgcgcgaagaagaaaagaggaactcatccacgtggaacaatcagaacagaaaagcgaaggaccaacgatccttcccgcctataaataaaagaccccatccttcgaaaaaggagacgaattctagctcacatcaaactagtcaaa

SEQ ID NO: 57163 - DNA, 977 bp, Cannabis sativa
aaaaatgaaagaggacaatataaaaaaggtatagagtgtaatttcctctttatttttagacaaaatcgtgggttaatgtcaccgtcggttctaggctaaggcaggctaaggtggacgggctaggcgtatgcatcgggccacctatgaggggcctaaagaatactttttcttttaaaaggacacaacttttttttttttactaattttaaaaatatcacttttctttaaataaaggcccaacaagatttttctgaaaggcccactacggcactgcttaaggttacctcttcactctaattataattcatattgttcttatgttttttttcttttttttgttgaagagtttctgcattatttaaattaatgtaaaattcacttggtaatttaaaaaatttgaatttcaagttacatgtgcaattttaggggcttttggcattatttgtctccaaagttatcatttcggtccctgagtttgttttttctaagcaatcaagtccttataactattttttttaaaaaactttacaatttgtattaattacatcaagtctaatagtttaatagataattactctatatactatttttttaaaaaagattatagtttgaatttctctggtagaatctacatagatttttgttactatttcggttgcttcattaattgctatgtgaatttctataaaaaaaaaactattttaaagtataaaaataaaaaaaaaaacaaccctaatttaattaataaagaaaattagtatagttttaatattttgcttaaaccttcttaaagcatacatacttaaatatataataaagaaagcagtttaataaaagaattaattgcatcaaccaactaaaatctaaaattaattggcacaatattgttggtcaattattttacacataccgtttataagcataccattaatatatatatatctttatatattaaaagtgtctatctaacggcattt

SEQ ID NO: 57164 - DNA, 793 bp, Cannabis sativa
  modified_base (49)..(54): a, c, t, g, unknown or other
ttttgaaaaatatttttacttttccacttttaaaaacagaaaactgatnnnnnnagtgttaccaaacgccaccctaaagttaattagtttactaattgtacttattcaactctttgtacaaatgtgtcggtctggattaatatttttgcaaataaaatacaaatcatgtttcgtgtgtggttgttaattttttttcaaaaaaaatatgtatgactttttttattaataaaaattaaacaataaaattgtatcaaatttgaatcacattaatattttttaatataattcttttataataatatgagaacctttttataaaactttaatattttaaaaagtatcattaaaaaaactaatatttagagttttcaactttgaagaatgaaaaaatatttttcttatgtggatctgtcaatagggtaaggcttttccatctaaatggagaatgtgtttttttttttttttccattttttttttctcagatgttaaacggagcaacaacaaattaaacacggcctagatagaattcatttaatattttatttattttttattagtgttgtatattatattttgtattttttttagaatattaaaattttcataattttttttatcatatgtagtaaatttactattttatatctaaaaataattatttattcactatacggtgagcaaatggtaatatttataaattaaaattttatttcaattaaatatattattatgtattgtgtgttagactaaaatgtagtatatgtaatatagcatatacaaacgatatgaaat

SEQ ID NO: 57165 - DNA, 722 bp, Cannabis sativa
tgtattttaataataaaagtgtgtttaattgtatacaggttgtgtttttcattagacttggatatgtgatataaatttcgacagaagtctgttttaaaatctctctaattaggataaagagagcattcattgttgttttaaaggttcaatacatcaacatctcaaagaaatttgattagatcacttcgagattttactaataaattttattctctaaattaatgtgatttcatagactaggagtattcgcaagaatactaataccgtgtgaaaatatcgtgtcatttactttctacactattattatgatctattctattctgatgaagcaaatttcgattctattgaaataaatttataacagtttcctattaattaaattattttttaatataattatttaaaatatcttaattatttaatttttttcaaaaattataactatgtattcaaaatacttaattttgaaagtgcaccgaaaaacatatattatatatatagtatatgatatatagatagaaaaatgttaaagcctataatattttcttacgtatcaatttgtgtaattaaatattgggtcttatataatttaaaagaaatgctaaaagacaccaataatgcctaacaccttactaccttgctatgtgaatatcgctattggtttaactaaatatcgagtaccatataatttaatataatagcttttagagagtatcgctaac

SEQ ID NO: 57166 - DNA, 844 bp, Cannabis sativa
  modified_base (413)..(415): a, c, t, g, unknown or other
gttattaagtcataaaaaagttatgttatgactaaaaagttatcactaaatgtagcaatttttttaagtgtattattacaggataacaaaacagagatcgatttccattcgacattttttagtcgttgtattttttttcttgcatggttaattaatttaggtttgatattgaagcgcgacttggtctttttattgaatgtgaatcactttgaatattggattattattctttatgataaaattctaaactctaaaattgtcaattagtttgattatattgactatcgtaaataaatattaaagattagaaagtaattaaaaagggcattcagtttgattattggactatattcgatagcatatgaaaattagaaactaattatgatacatacattcatatataatatatatannnatatatatatttataactttgattataagtacagtttctctgctataattaatgaaattgcaaactagctagaaaatgtcacgatatatgactcgggtacatttattatatagaaccatatttatagaatcatcaatattataatttataagcaccaaattaatctacttatagttaattgcatgttctgatttagtctattttcaccgttgaattttaaaatttattagtccttataataaattacatattgggaaaagaaatttgaatggatatataagacatgtttacatatatataataactattagtttttaattattatagattgtttttatgtttattaaagagtgtgaatgaattattcttagagaagaacctggcttcttagttaagatatttctcaattaatctatagtgtttgaacta

SEQ ID NO: 57167 - DNA, 1444 bp, Cannabis sativa
taagcggcattagtaagttattcttgatcgcaatctgaccagactagctcttggttacgcgggttgttctagtagtatggatgccaggcaaaataccagaagtcagtgtaactcggtcagatgaattggcagtcagggagttcaattcccccaaacgtttgtggctagagcagaggccttacaggcagggcacgaggttgggttgatgttaacccgccgcaggttccccaagctgcccaagattgggaaaataggttcgcagaaatgcaagccaggattaaagaacaagatgaagagatttggcggttgagatagcagggtgctcctgaatccatgttccagaaataccattagctccagcaattgctgtgcaggccaaacctgtagttgctgtgaacctgatggaaccccattatgaaaggttccgtaagcaggcacctccagttttcctgggaggtcccaatgtcatgaaagtcgagcaatggctaatagtgattaacagaatcttaaactttatgggtgtcaccggcaatgaccgggtggcctgtggcaccttccaatttcaagaagaagctctggtatggtgggacatggtgtccctgactttggatgtaactacaatgacctgggaaaagttccatgccaagtactacaacaaggcagtcagaagtgctaaaagaaaagaattcacccagctgactcaggaagagaatatgagtgttactgaatatacgattcagtttaatcgtttggtgaggttggcctcgggaattgtgcaaactaattttagcaagaaagagaaatacttggatgggttgaatgtgaagatcagacatgacttaatgatcactactgatgacaacaccacctatgctgatatggtgggtaaggcactacgagctgagggcgcagtggagtgcaccttagagtctcgagtgactcaatttgttggtggggctcctactcctcctacatcaggctttagtaggggaggtagtggctcggccactcatcagaaaagaaaggcacctactgcatccagcggctcaggtcagaacaagaggtttcgagggaaccagggtcgaggcaatcgtcatggaagctttgaaacccgatacacttacccagagtgccccagttgtaaaaagcaccatctaggggagtgtaaagggcacgggtgctttcagtgcggtatgccagggcattaacaggtcagctcttggtcaacaactcttatttctctgtgttgtttgactctggggtcactcactcctatgtggcagccataatttttagtaaattagatagactgcacaatagttatgaatcaaggtttggaaccctactgcctggcagagaattagtcatatccaaaagatggggtaggtctatgccgattagaattgaggatagagagttgagtgctaatttaatagaaatgaat

SEQ ID NO: 57168 - DNA, 1319 bp, Cannabis sativa
agaacacaaatacttcctcatgttctaaattcaaaatgaactttgataatattaaaaaacaatggttcctaattaaattacaattatctaaattgataacttgaaatagataatattaattgagaactccaaataaataaatgctagatctttcaactattcagatgatattcagatctttcaactagatctttcaaaatgctttctcttttttctacttgtcatgtattgtttgctaaaagaactgttttaacttttgttgatgctatggctaagtccatgcgactttgtaaaggttgctggcaggatgtaaaaggggagggattaccccctgtgaatcccgatcttttttgggttgattaatagaacggaggttcttttcaaaaaaagatgatgatatacactttggaaatctgaatgggagtgttgtaagaggttgatcatcagataatccttgactagctaaacccaaggtataacctaaggcaatacccaccactgcatttcctacttgcatatacctttgtttaattggtccactaagtttataacaatcgggaaatccttgcagccgtgctagttcacgtacagagagcaccctatcttgctctggatgaataattatctggttgtgaggttcagctctggtcactacagttccaatcgtttcgtcccatacgtttggttattgccacaaaacaacccttgtggaacttaacctggtccattatcacttggtgtgcaatagtccatacaaaattataggtgtaaagaccacagtaattgctccctaatttgtagtcttccaaaccaatctcatacaaattaaaatgtaaggtaaaaaaaggagtaagattacagtaattgtgttttctttcaaaatctccaagcttttatatcagaggaatggaaaaagataggatggaagagtgaataaattggagatataaagagagtaagcaataggggaagtggagaatataagagagtacgataggacgaaatatgaaatctgaatctagctactagctaggtaggcctatcaaaatgaattcttcccccacacttatctacctgggttaattattaaaaaaataactaatttatgggttaaatttagcataacaaaattacattccatgtttgttgattttttcccctttgtttaatattttttatttttctgattgttgcctcattacttttcttgtaaaataccagtagaaaagcgtgtattttgcaatttagctgtgaaattatttatagagttttggatgtattttttacaatagtggataatatgactagtttagataata

SEQ ID NO: 57169 - DNA, 1475 bp, Cannabis sativa
caactttttagatcatcaatggccaacgacagttattgtttgaggggtgaagagtccatttaatgccaaggtcataaacaaatattatgccttaaaagtgttgaatgccaatactcgaagtgtagcaagaatgtcactgacgagcttatccgagacattcttcctgagttagccaaaccaggggctgagtgggagattgacgagaatggcacttttcgatttcgaagaactgatctccaacatgatttgaaatgcttgtacagctttgtccaaacaagtatcctcccaacctcacatgattccacagtgagtagggagagaatgtggatgttgtacggtgtgatgaagtgaatgagtatcgatgttggcaatattttagctaaggaaatttttgattgtgcacactgggagaaagggaagatgttccttcctgcactagtcacaggactttgcatggctgctggtgtccctatgcgggatgatgaaagcacggtcacaaagaagtaggttattagttttgggcctctccgtgctcctaaacgccatcctgcagctgaatccacatccaatgatcaggtgctgaattacttggccaaccaaaaagctacgcagcatcagctagtgcaaaggcaagcacaactgtgtgagtggttgcatgcttactaggagtaggaaagagagagagatatgtgggtgaagcgtgcgttgcagaccaacatgcgcaaagttatcccgggatatccagattttccagattagattcttacgccttggcatccgattgatggtgaagagtcagactcttgagggagttttcttctttccttaatctatttgatttactataaatatgtgtgatagttctgtttgtttagtttaaatgacgtaagttatgtgttgttgttatgtgtgtttttgtttaaatcatttgtttttattgttgtcttagttgtttgtgtagtaacattgtgtagttaaagtcgtgttagtaatgttatgttcgcatgtttgtgctatgttgtgttagcttgtaactaagaagtatatgtcattttgctttagcttggtttagcgtaccgctcgatgatgaaaaatatccattttctttcatttgtgatgtgcactgatttttgtgtgttaaaaatgctaatttgtctaaatgcttgtttaagagtaattcttcaaaatagatgtgacttatgctatcccattatgctttgattttgtagaacgattaacactttgagagaatttaaggttctagaattggttagtgtaattcttgaagcaaaatctgggatagctttacaacatggaaattatttaggccatttttggaggattgagcctttcaagctaacccaaaaaattttgattctctatagtcacccctcattgagccaaaagcctagtttttcctaacacccatcaaagttaatagacccacacacacataaatttcatccttcacaacc

SEQ ID NO: 57170 - DNA, 6397 bp, Cannabis sativa
agacgtttttcatgactctacttaagtattttttaatatgttattatatgaattatgtcaaattattgataatagtgagaatttagtggtttggcgaaaggtcccagttgattagagttttagtgggtgtcgtaccgcgttataattgatgagtagtcaggaaatttttactctactattaaatttatttttgtttaaaccaaaagtactcctgatgacgtaaaacatcaatatttaatatgtggcaagaaagataacatcctggaattgagtagtctcgagtcatagcaagtcgacctgggaagggtccctaaccttatgcctaggttgactttgagaactctggaatggaagtttggacttcgataaccttttttcaactcactgtcttttagtgttttgtactgtgaagacatggagcaaccaaatccttatgcctcgggagatgaaattacatgaacatgcaccctagaattcaacctgggcacctagggtttcactcaaagtttagattgacatcataactaaggtttcaattttcagaatcgtcttagtgcaaatgggtcaaactttgcattgaaacatgaacaaggcataccatggacatatttgaggcatcagattcgaagaaagtttattttgagtacccggagcacccagtgcccagagacctagagccaaggttgacaatttgtcaatttgggcaactttcaagtataagatcaaaaatctgactcgtgcatcgattcttcgtcttcatcaaaaacggggaaacaagtacttttggggaagtaacaacacttcctaggtgccagaagtaaggcccaatgccaagcttgacacctggggctagcctagcgtctaggttgacattttgtcaacctgggccgattccaaggatgtttaccgagaacatttttgggcttgttctccgttttaacacaaattaagattcaactatttttggagaccaaacaaaattttaaggaggccaaaagtgggacccagcggccaggttaacacatggcactgggctagttctaattagtttctcgaaaaagtgtttcaggcttttttctgtcattagaaataataaagatgtaagcaaactcaaagagaaaaccacaaacttgagggtctcaaagctgagcctaacgcccaggttgacaatcaacctagtgcatcagtttcgatcattcaaatgccaaatctaatctgagtattctatttaaaatggtaaaaaatagggtaggagacctcgtcttaaagttaaagaaccttggaagtatcaaaactacatccatgaagctccgaaatattgagtacccaaggcctaggttgacaaatggcctggtgcactgggttccacttatccgtatatgatttcattttgaccgttcatctagttatttagaataactaagatctaagtcagagaattcaaatttacaacttcgcatctctcatttctaacataggaaaaactacttggaaatgaagagtttcgagtctctcatttttatagaacagcaacatctccgagtttaggtgactagcttcgccaaaatacagaaacagactaagtgatgtcaaaatatcacttaagcatcaaaaagtacatccctaggacaatttcccactcacccagcgtccaggttgacgtcatatgtcgacctgggtactgggatgtcaacttgggcgcggatgttaacctggacgctgggttataaactgtcttcattaaaacgtccataattcactcaatatttatctgattgacacaattcaatttacatttcgaagatatttcaatgctttatcaagtcatgtctcatacttcaattgcaattatgaagttatcgatctcaaattttatcccaaggaagttacgaaaataagttccgacttacctgaagcaagtttcgccgccgcgatgcggactcaaaaaattgattatcaacctcaaaagttaattttgaccgcaatatcatcatatacggtcaaaattagtcaatttagattttttttttttcatattttgaattattttttcctactttgaaggagctcattcacttataaaaaaagagctcttctagctcattttttatattcagaaaagtagttataaggtcagagcatctctctctagtttctctctttaaaaattagagattaaatacttagccatttttctgtaattccatctcgtgagaataaaaaaactcgaagtagacgtaactccactaccatcgcgatatgaggagtgaactactataaattttatgtgtctctctaaattatagacttacttttattgttcatctcgtcaatctagcgagctgttctcggtcactttttcagcgttaacagttttatttaaagttttaattatgaggggtagtatggtaattttttttataattaggaagatagactttatttcttttattataagaagttagtagaattgtactaaaaagatatggtaaccattatcaatgtcatcctctcttctttgtctctcttggccgagcatctaaaaaataaaaaaccttggattttatattcgagtattagaaattgtttcaaatacacaattactactacaactaatgtgacttaggatctttgatcatcactaaacagaatttcacttagattggccgacacgcacttgaattagattttaggtacgtattaactcaaattttcgttaacaataaatgaagccttatttataaagaattattacttacacttaaattttttgaataaataattatttgattattttaaacatttatgattaattatatgcaatatttattttaaaaatattatttttatgttttatttataattttacggtctaaactttttaattataaaaatattcttgtaaagttttaaaattacaaaaatacactttgtttagcaaaaagtaaaaaaaaaaataactaaaacataatgtgaaatcaaccccatgacaactataaataaattacaaaacaaaagaaatctcatgacaataataatacaactataaataataaattataacacaactaaaaaaataatttattatttttactgaagaaatatttttataaataaaaatgttcaaagaataaaaatgaagcaatttccatgttgataaattatttcaattttttggtcgtaaatttttcaagaatttacctgtagagctgaaaaaagctaagataaagcattaattaaagtgaaaatcacaatacatgttttttttaaaaaaaaaattaataaatggaaaaatctatttttcttaaataatattttccaaattcaatcgatgacgatattaataacatagggggatatgtcacgcgtaataaattttaatggaaaaaatgttaatgtaaatcaagaaatgtcagagtaattttctaaataattttctaaaagattttctaaaagaaaaaaaaaaaaagaaaaaagaaattaaatgaaaaaaaaatgtaatttcatttatttattgtggtaaggtattaataactctcgttaaaagatgtttctggatcacaacttgtacggaaaaaataataagacatgaaacataatttaaagaaggtacgtatagtagagcttaagtaaatatataaacctatattttctcttttatataaattcgtaggaagcttcttcattaagaataatatttttgtccctaaagagtgtggacataatataatttcagtacctttaagtataacattgtatatttatatatcttgtactgataaaaattataaattaaagtttcaaaaataaagttgaaagtacgtatagttcgttataattgaattaaaaccgaaacattgataaattttatattaagtgtgatatttctttttagaatttctcaaaaacaagtccactaataatatacatactatgtttttttttataaaaattattaattgaactttttattttattaaatgataaaataaaatttaatttttattaatttttttaatataacaaatttaaaatagatttttaacgcgaataaatataataaatataattacaaactttcaaattaagttattcaatcaataatttttataaaatactagtttcaaaataattctcacccttattacataaaaatattgtttaaatttttaggcattatagttcgtggtctaaggttttctttcattttaattttactatctaaactacattttcgtttaataaattttatacctattaataaatatttctattttatctcccaaaaataaaaaataaaatacatacatattaaaaaaattaattatattatcttcacacagcaaaaataaaacaacttcaataaaaaaataatatacaatattataaatccaaacacacatagacaaggcaagacaaatagtttaatttggctagaacaaaaaaaaatcagttttgaggaaaaaaatgatgattacttcctcatgaaagtgactaatcgtgcttcctttcttcttttttgatttcagaagaaacccacttccaaccaaaagaaaaacactaatatctctcttcttcttctctaccaattaaagagaaaacaatgtacagttactttaagttttttttggtttacgaaagacacttacttgtaatttagtaaccccaaattttatttttaataataattacttaccacccagctttacttttttttagaaagcagatcaagtatatatttttttttcttctgtcacgtgaggaagatgtgtaaagtcacgtgtaaggggtttgtgtgtaaatctgtcatttatattcatgcaaatattacagtgtgtgtatggtatgaataatgactgtttgttttgttataagagaaagagagagagaaaggatgtttttttgtttctgtccaaattctgtgtttatgtggggctcatattaatattttgattggttcactctcttagccatagcccccactttttttttctatctaaattccaattcactgtataagctagctaaggggggctttatatacaagacttgccttaaccttacctgctcaaggtgaggggtcaatgaattaaaaaaaaaagttatttaaagaaaaaaaaagcttaaaaaagccttaaagtttaaagaaagttgattgcagaaagcaagagcttttgccttactttctttttattttttttttctttctctatgagtaaagctgaatacccactattattctaacttcactaccagctgtacaaatttttttgttgggtttgtgttatagtttctccacttaaaaacacacaaacaaaatacccaaaaagaaaaaaaaggaaaaaaaataaaaataaatatatagaaaagtgggaaaaaatttgctcacacaataccactccatgctagaaaacaacaacaatactgcttcttcttctgctgctgctgttgctgctgatccatcttcttcttctgatcatattcatcatcatcatcatcatcatcatcaaactcactatggttttcctcataataattcttctgaaaatggggttgtcatcatcaataataccaataccaaaagaaaaagaagaccagcaggcacaccaggtatgtaattaaatttaatttaattaaaattaaaattaattatctcagctaattcttgaattaattgattaattaacagatccagatgcggaagtggtatccttatcgccaaagacgctattggaatcggaccgttacgtttgtgagatctgtaaccaagggtttcaaagagaccaaaatcttcagatgcatagaaggagacacaaagtgccatggaagcttctgaagagagaaactcaagaagttaaaaagagagttttcgtttgtcctgaaccgagttgtctacaccatgatccttgccatgctttgggtgatttagttggtatcaagaaacactttcgccgaaagcatagtaaccataaacagtgggtctgtgataagtgttccaaaggttacgctgtacaatccgattacaaagcacatctcaaaacttgcggtactcgaggccattcctgcgactgtggtcgagttttttcaaggtatatgttcgatcattacaaataaatataatattattttgcttgttggtaaccctacaagaacataagttttaatctaataattaactccatttctagtctaatcactagaatcattactaccaaactcttattataatattctaattatataattattttgttggttttctccctttgtcttttttaattatatcataattagagttgagagcttcatcgaacaccaagacagttgcacagtaaggcaagtccgacccgagctacaagctcttcaaccagcctccgccaccgccgctaccaccgct

SEQ ID NO: 57171 - DNA, 1000 bp, Cannabis sativa
gacaaaatcttgtccctttatttatatatgtagaattattatttgtttaattaattttttggtaatgatgataaatgtaatctgaaattaacataaaaaaatagtttatcttttcttgatattgcagaaatagatttttccaagttattgaagcgaatggatcggagctctactttaacttgtaaactcttttcaagaatatacatatagggtgagtcaaaaattttatgatatataatttttttctactgctactaattagaatagtgatattataattgaagtttttatagtattaatttttttccttttcttttttgcggtgtacatgaaatgacaatgtgcctatttttggaatagttaacaaagaagaatagattatagcttcgaagacgaactaaaattgtaagaaaatacttttaatatttctacaataatgtatttgatggaataatgagaatgtatatgcttaaatctgtgttgtaagcataattttttttatttgaattgtgaatataaattttattcaaatgtaaatacattattataattatttttctaattttagaataaaatgattctaaattagatcgatatatttaaacaatgaatttatatagaaaataatgattaatttgtattgataattaaaaaatatatatatacttttaaatataaaaaaatatgatatatataattaataattttataataattatttataaaattaaattggcaacactttttataaaaatgttgtcatatgtattttttaattagcaacatattgcaacacttttataagggttgtcttctgctaatacttttagtaacactctaggagacaacacatttataagtgttgcctttttattttttttagtttaaaaaaagtgttactaatggtgtttttctagtagtatatattctcatattatattccttaaaatatatcacttttgtgagtgggctgctcaatatactctcatcttccacttaa

SEQ ID NO: 57172 - DNA, 2214 bp, Cannabis sativa
tcaagtatatcttagatgaaacttaaagggtaaagtatttctccagggcactccagatttgtcgagcagtggaacacccaaccatttttgtaagaaagctctcagtcatggaagaaagaagccatgacaagcagctaatcttgtacctcccattccacaaagccagggttctaaacagaggcagctcgatcagcatcgctcaagaactgaggtggtggagcaatgtcttggatgaactttattacattcaattcccacgaatggctgcttgaacttactgcttctatagaagaaaattgtgatcattaagtttgatcgacaatgtatggttgaaatagatcagactattgtcgatcttacgagatcgatttcttcctgaaacttgagaaaattctggtggagctattggactggggttcccttggttgttgttgctagaggaggataatgcactgataccatattaaagctatgattgtttctcaccactgttgcagagaacacaagagcagagaaagaagaaagaagaagaataaaggaaagaaatagagtaaaacaaaaataagaatctcttcgattgattatgaagcaatgcacattatatacacaactcgaaagagcaaacagccaaaacagaaactatagcaaactcctaaccaaatgtatacaatcaaagactaacacaatgacatttagaaactaactgtcttaacacacccctcaaatttagaatatattgatcatgtcaataattctatgtttttatctttgaattggttgaatcttgagctcgtgattgcctttgtaagaccatcaattatttgagcataatgtacaaataatatttttttatatcaatacttctattcatttatcactttttcaattaaaaagtataatgaattagtttagtctaataaaactattcgtatataaaagttttacactattattgatatatagatacaatttattatctctcaaaaaatgaatgatggtattaatatttctttaagatatataggggagatcatatcatctcaacactattttggggaacttcaactaaatttaggcacaacatgaagcttcgtctcagttcaagccgagatgacaacctcaagatatctctttgaccttatgtggggtattcctcaccttgtgcatcatctcgacccaaggagggatgtgacacacatcatctcagcccaaggggaaagtcaacaaatatcacttcagcacaacatgtcatctcgaccctgtggggtgctcctcaccacactatcatctcagcttcagtttgcactaccaggacatcacctcggcccaagccaagatgacaacaccaagtcatcatcttggctgaagccgagatgacaacccaatatgctacttcgattcaaagagggaagagatcaagaccccatcatctcgactatcatcttcttcctgtagacatcatcatctcggtcctatcatggatcccctcaccaagcactaggccaagatgcacactactagtgcatcatcttagccctagtcgagatggtccacacctttgcacgtgcttcttacggcttaccaacattatgattcagcgtgtgttcctcgtgaccaaaataaggtagcacgtgtggattaaaaatatcttcaacaattattatttttccagacatttattttgaaatataatttttgttatcatttatgttttaaacctaacccaaccatagttgatataggaaggtgcgtcttaggttaagagatattaaaccctaagagagtcctagatgaaaacctatataattaaggcgatatcaattgtaaagaggaacaactcattctcaccaactctcactagctctctcattttaaaaattcacttgatgactaaactcttgaaaaatataactttatagagaatgggtgaaccactataaaattctcgtatttatctttgataaatttcttttcgataaatctatttatattgattgacaaatacttgtattcatcttacttgtttacgatttttaaattcattaatgaaaaattgcctcaacacaattaatatatatcaaatttttgttgagcaagcaaggagacaggtcactatattttcatacaatatacaagacaaagtatatacataacttgataaatactcgcgcatgtaataataataatgactatagcttatgatctagtacccac

SEQ ID NO: 57173 - DNA, 1171 bp, Cannabis sativa
agaagagagtaataatttcactaaatactttggtagaaatcgattgacattattgaattaactttttgggaagatatatatatatatatatatataaaattacaatggagagtataaattctttaactaattggtataataagtagtaatcctccctcctctcctctcctctccatcttaccaaaacaagaattaggatttgatctactaatcttggctctttccctctccccgtcgtacatgtaccaaacttcgtttgttattgttatttattaattattaatgtagcgaactgactctttttaataattgtcataatataaatatttcttagaagagaaatgctaaaaggtacagaagtctaagcactcttctacgtgttaatatcgctattggtctaattaagtatcgggttacatatactttaatacaataattgttaaggagtatggttaatgcgttattaagactaatggctttgaattatttaaaccgtaggggtgggggtgctccaacttgtcgtgtcgttttctatatggtcttctccttttgaatttgatgcataggacgagggcattatagtgatattcttttttgtatttttcttctcgcacgcctattacacatatgacgatatttatgttgtccaatattattaattttaagaatgaaaatggcatacgggtcccatgaagttgatgcataataatgggcagtcatttgtgatcacacaattaatcgtggctatttggatttctgttaggcgcttcatgttcggtatctacattttttcttcgtgctgatgggatggcaattacttcatatatgcaatttatattttagagatctatcatcaataatttttttcgatcaaaaatatatcatcaatcttattcgtacgtaattactgtatatcttcacctaaatatatgtacgtaaaagtctgtgccatacaaacaataccattatatgcctttaatttctcacacagagtaccgatattatatacaagtgttgaagatatatgagtttcatataatatacgttagaacgcaactaatggtgactatatagtggttattaagtaagggtttgtttgaaagtttgattttggtgaggaataggaaatgtaaggaaaaaaaaggtaaaaaaacaataaataataataaaa

SEQ ID NO: 57174 - DNA, 3474 bp, Cannabis sativa
ccgatcattgtagattttgccctctacaatttggcgtccaccgtggggccctaacaaactgaatcaggagcaagggacacgtatccaataccatggaaaattcggaaggagagatttacgttcaagcctaaatagctactcttatgtctcagatgacagaaactaatgaaagccttagaatggtacaagaagagaataaagcattctgggaagagaatgctttgctgaaatcaaaggtggagatactggagaccgttcaacgtagtatgagtctcagtcaaggtttcgtgttccaattccatccacgcaataccttgattccactctgaccacaaacttaggccaacgtccagcaatcacaggaacaccaccaaactaaacaacacaccaacattcaactacagcaaatactggagtagatagatcagtaccaggggatctactctaacacatggaccctctttggtatgtgacgaaactatgaccgatgcccaagtcacatcggttccaaacggaagcattcctgcgccaagtgctcaagaaggacaactcaggacctccaacctaatccctccaagtattttgatatctaatgttcctattgttccatctgcaggtcaagccatcataatgacacctaaggagatgatcgaacaaatggtagcaaggaagcttgaaggcatggaggctatgattcattaaatcccaaaagtcccgcacctttgaaaaagagcttaccaagtagctttgcttagagtccccattcttggatgctatagctctcgtggagatgccaaaaaagtttgtcttcccatcaatgaagatgtacagcgaaacaacggaccctaacgatcacatagcaagtttgaagcaaagaatgttcactatcgccatccctcgtgaattgtgagaggcttgtatgtgtaaaggattcggttgtagtctggtaaggccagccccataaaatggatgattaatattgaataagttttgtttttagatccacttaaatcttaataaaatattttgaaatatatatatagatatatatatatatttgtgatagaggggaagccaatcctccaccacagagggaggtgagaatgaatggaggaaaaaaaaggctcgatcttcacattttatgtacaaaaagtaaaataaaaaaggaactattaggtaaggagccctaattataactagctgataactaatggcactctatgtggattgggttggccaatctaacacttttttatctaatatttatgcatttttagtgaaatttattctaattttatcaaaattttgaaagcataacaattataataagacattcccaaaaatttcaaataaacaaaaaataagaaacaaaatacaaaacaatactacataaacaaaataacattaacaatacaaaaaattatctaaccattcgatcgcaatacatgtattcacataacctattttactacacataaaaatttaagatattcaaacctatcaaccatgcatattccacacatttgacaatagtgcaattaatcgcagagcatacttcactacggatgaatatctaaaatattcaaactccactaaaagaattttaaagtttttgtgttatacctttctcaaataacgctagccacttttacgctcttcaatcaacaccaagaacccatacttaaaaaataaatctaaaatatacatcaattgtaaattaacatgttaaattgagactaatcaatttacacaaattttgtatcatattacataaacttatctaattaaataataataatataccgaaaatgagatcactcagagaaccaatgaaagaggagtttgttggaccacccagaaaataaattaactcctaagaaaattaaacattggcaattgattaaaaataataataatagaacttttcaaacacattacatacatataataactaaacatatacaaaaattaaacaattataaattacaatacatgtactaaactttctttacatatagcattatcattaacttaaactaaatcacataaaataaattttttacctaaactttttttttaaaaaaaaagttacacttacaaaactaattattcttttcataaacaaattaaacaaatcatttatttacatatatttttttttaaaaaatacacatatttatatataaagtagattaaatttctacaaatatacaattaaactaaaaatatatatttataaattaatttatatgttaatttataaatatttattctttaaattctaaatatttaaataaataaattcattaaaaaaataaaaatataattacataatctggactaataaataaataaatgtgtacatataccgtgagaaggagagagcaccgaggtacaaggcaaaaatgaaggtttgggtcaatggtggtggttttcgtcaaataataatagaaggagagagtgagagatcgagtgagagagaaagagaggaggacgatgagaacgtgaaagagaggtttgggtggcggtggatagtgggtgttggttttcgccgaatgggagagcgagtgatcaagtgagagagagggaggaaaagcgatgagaacaagagagaaaatatgttttcatcagcggtgggtggtggttttctttgagaaaatggcgtttggggtttggatttgggattttcggctgcattagctggggtcggataaggtttttgctgtgtgaaatgacgaagttgtagttgttgggggtttttatactcaaggtatacacaatggtttataactgttattacttatactaaacagtgccttatagtataggcgacgattttaaactgtcgtcgtgtatactccctattacaaattgcgttatacttttaaaactatcacaaatttccttataacctacgatgaaatatgcatgaaaatatttaaaggcttataataaacaaaaaagaaagaacaggaatatttcaatatatgaatggatataccactaataaataaggacctttattgtcaattgcacaataagctacaagcatatatttgtcattcttacagctgcttttctccccttctcagctgaaaatatatatgaacaaaaatctccatattcttgaaaacgaccaaaagcttcgatacattcagatccaaccaatgaaaagtggagaagaattatattagttgtaaagagagaagtctatccatagatataactcctactctaagcatatgccattgcttaggtttattccatgatctttctactgagtctagaataatattctatataaggatctataatgcgttgcatgaaacacacactgagatcatagttggagatgaagaaaggaggtggtataatctttaagcaaaccagttatagggcctctctctcttggcacgtacattaggatatgactgatatatctagcaatatatagcaatgcatgtacatctacgt

SEQ ID NO: 57175 - DNA, 3495 bp, Cannabis sativa
tactttagtctaagaaaatataaaaagaaaaagtcaaagaatatatttaaattaatagtaccttaattcttttgcaatgggtgtcgactttcttattatctggcacttttttcttcatagaaacaattttctccaacttaaaaattttacgcttttttggtggtcgttcatgtcttcgtacaactttaggactatgaattacatgatcttcttgcttatcactatcttttctttttattggcaatccattcatcacattccaaaacattgtacaattctcattagattcaacaacccaattagcaacttcataaaatttcttttgcaactatcacatttcaacatttccattccaataaccattatggttgacattgatcattgtgtaatatcattttatatctttcctccatcgtgctacaatatacttttctggcacctttttgatgtgttcttttactaaaattgacaatgaatgcttacaaagaattcctttaaattcaaatagtcgacaagcacaattgacctcacatgtctctctattgaattgaactgtgtaaaccctttatttttgtatacctccaacaaataaagtctcaatctcatcaaataccccatccttttcaccattacaagaaatattacagtaaatcttcccaactagctcattttgtaattctttatacttggaatgagtatagatcatttgaaattgcttctctatctcaaattgtgttacacaagggatttgtgtgctaaaaaaattagaaatctgtaaaattttctttttcaactttgtctctcaaggaaatgtcatattgttcaacaaattgcttcatgatgtcttcaatgatgtcttcaatgagtactttacataccaacccaaaatattttttttcacgaatgttggaactcatcgatgtctttccttaaacaaatcacttaaccactcattgtttgaaagtttaaactcattcataaaatttttcttcaaattcttctactgttatggaatcataaaccacaattttcaaggcattctttatttgttcatatgcattgtatccccttaaattttcaggtatatttttcagtaattataccataaacaccaacgatgtcaagttgcgagaaatacaacttctatagcctttttcattactttgtcttggtctgtaattatagcaggtgattcacattcattcatgtatataaaatcatgtgctgaacaaccaaataaatgtactagtatccgcatttgataacaatccacaccccaacaatattgagtgcccatggtgattaacttctacaaacaatgcaaatggaaaatcatatttatttgtcaaatatgttgtgtcaaatgtaactacatcatcaccaaactcttaaaataaggctttgctccaagaatctacccaaaatatatatttgattctaccatcattatctaaacctatcatgtaaaagaagccaagattcttaggttacatactcataaaataatcatgaatggctttagcatctccaacccccaaaagtaaatgcctatctttaccaacaaaatttctgcaatctttttctaataagagtgatactttatcatgacctccaacttcaactacaaatgtttagaaatttttgccacactataaccttagcacgatcgtttaattctaactttatttttgctcctatccctatttctttattgcatgtatacaatcttgatttatgaggacttagacaatgattatgctcaagcatataacaaaaattaattttgcattgcctatcttcatacaaagtacacattaattcttgctttgtaatccgatattgtttgaggattaggaataagaaaattttgtttcttattgagttgagatttcctatctcaagaacatgaaagacaaacaaatttcatttttccatgtgttaaattacgacttgttttcttcttaacaccaaatccttcttgtttccatataatttatagtacaaaaacaaatcatccaatgaatcaaacttcattcctatcttaggtgtttccacactatcattcaaatatttcattgtgctttcaacttttttctcactaatatcttcattactagacaaacaaatatcttcttcttctagtgacatttgaaactctgtatatgttcctttaaaaaagttgatacatagctaactaattactaattaacatataattaaaaataaaacaatgtgtaaagataatctcatgcaatcatgggcatatatatatataaaaaataataaaactacatatatacacgaaataattgaccataaaacattcttaaaacaaaatcatttattaatatacgtactaattatgagtttaaaatttttatttttacaatgaataaattgataaaaatcttaaagttcttacttttactttttcttatgtaatttctccacttgtaattaatttatttttgtttcttcagtatctaaatatacaaaatatatgagataaaaaaatagtaaaaacaaattaactaaaatagctaaataattattttcaaaagaaaaagaaaaaaatagtaatcaacaagtcacttacagtggaattatagaattgatgatcaatagcaaaacttgtagaagaagaataaagagaggaaaaagacgaagagatgaaatatgtaaaaatatccaaaagcgcgtgtggttatattgaatagaaaagagtaaaattgattgtggggcccatataatttagtaaacagaaataaaaattaaaataaaattaattttttgtccacattttgacataagtggactgccacctaattgtggtgttcggcacctccggtgccgtatagcaattctcaacaaagatacatcatgtcaatattatgttattattttttttaaaaaaataagaaaagaaaaaggagagagtcatcatgtttctcgcgccccaaatctatcacttcaagtcttcaacccatttaaaaaaaagtctgtcatttcaagaaaaaaaaataagacactcttttttttctaatctaatctaatttgaccgattaaattcaatttaataaaaaaaaaatagatatctaattatatttcgattggattagattaaatgctaaaagttaaattttaattagattagatgtcaatttcaaaatttaattaaaaatcaatccaatctaattatataataaaaaatattaaaatatatattaattatatttttattaatttttttgtttgtttgttgaatttgtaatacttttcgttattttgtgtgtttattttaatgatattttgttctattttattacttaaaaatattgttgttttaattatttaaaatttttagctacattacacttgtaacaatagtatgtttagaaattattaaatttaaataaaatgtgatacttagtttttacgtatttttttatatatatatttttaagttaatattgaaatttaggtgtgtaattggat

SEQ ID NO: 57176 - DNA, 1526 bp, Cannabis sativa
agatatgattttttctatacatataatagtataagcctatcgcctatatatatataaacattggacaaactaatcacacaataactcattgaaattgatcacaacagttagcatatattataaactaaaactctcatcatttccaaaaatggccaaagctcttcaaacaaccaccctaaacctactcatctcactaacttttgtgttctctttcttgagactcaccaccgcaaatgatgattactacaacttagtacaaagaaaacacgggtttaagcatgagaagctgacccactttcacttctatttccacagtaagtggcaagaacccgacgaacgtccaagtggccgaggcgccaacgacgaacacttcggccacattttttggcatggtcgcagtgttagacgaccctttgacggtgggaccagagccaacttccaagcaggtgggaagagctcaaggaatcatggcaatggcttctctgtccgatgtgggacttttaatgagtttgaactatgttttcactgaaggtaaatacaacggtagctgccttagcatattgggacacaactccatactttcggcgcttagagagatgcctgtagttggtggaactggacttttcaggttcgcaagaggctatgcactagcgaagacttatatgttcaacgccactagtcatgatgctattgtggagtacgatgtctatgtcttgcatttttagttggtattaataattgaacatcatcatgatattacaaacatatacatatacatatgatgtattgtgtatatgtatatgtgactactgttctttcatgtttttcattatttgaggaccataatcgtgatatctctccttcaataataattattgatttttatataaatatatgtctgtgatctagttttctttgttaatgctctctattattgttgtttcgtgtacaatgtacaatattatatgcatcgatctatatatcagtctacgtcatcaaattattttccttctgttacagccaaatagaaatttaataatgaaatgcatgtaataatgactataataataactgtctcgttcttttgtgtacgtatataatgagttttctatatacttggcacaacatgcaatgcatggggagctagcattgaatagcaagctagggcccaactagagaatgttaaagggcaccagtagtgtcttacactctcttacgtgtcaatatcgttattggtccaactaagtatcaggtcccatataatttaatataatatttaaggagtatcgctaaccaattgcaacgcgagaacatattcgagtgcctagacaccactggtacttaatagcaatgctcggccaactattatgttaaatatacatttcaaaccacatagatataatcatcatcaatattaaaattgatagccgtagatttatctcatacattatttattaaatataagattatttttattttaggaaatatatttctatttaagaaaataaatttctatttaagaaaat

SEQ ID NO: 57177 - DNA, 587 bp, Cannabis sativa
  modified_base (142)..(142): a, c, t, g, unknown or other
attttaatatttttatggttacataattttaatatttatctttttatttttaaattataattttatagtatcttataaaaataatataataaaaaaaaagagaaattacttcatatattaattttttaactttttttttttnttaatttacggtttgtgtttctaaagtagttgcagcgctagttgcaaaagggacagtgctagttgcaataggagtttctatgtagaatttcgtaaaactgcaaaagaaaactattttgaagtgtaaaaataaaaaagtctctaaaaaatatataaacaagaaaataacattaaactaacaaaaaaataacagtatttcaacacaaaaataatataaaagtatcaataatttacattctttgcaaataaaaacttataaatggtataaatatttgtaattctgcaccaatgtatctttgtaatttgttttggtttttttttttttttaatgaaaatattccttaacaaaaatatcaaatccttctaaaaagttgcacttatataacatatcaacttcttttttaatagatttaattacatcaaacacgacatttacttaattacta

SEQ ID NO: 57178 - DNA, 939 bp, Cannabis sativa
aagcaccgtacctgaaacttcatggaagatcgatgatcatgttaaacctattaataatataggctcacatacataactatattggttatattctttggaaatgaaaaacttgtcaaacctagcttatatactctcaaacactggcccttcacttgatgtaaaatttgacaaattaataacaaagtctaaaaggggcctacttatttcattaaaatgaagaaaccaatcttttctcccgctagtttagtttcagtgccactgctgaattttccaggccacgaaaaccaaattttattgtttgacacatatggacaaaaaatgtcaggcaggtccaactcttgtctggtaatattgcagggattcattaattggagtgtttgactggaaattaatcaagtttgtatcttcagaaataaagtattttactcttctgcataagaaaaggtacgcaaggtggtaactttatcgcttcctttgtttcaaataatttttctattaattaatttttagcagaaaagtgcagtactgctcaactgaggtacaggttttgttttaaacattatttacctaataaaagtggaatattattccaaattcttaagatcacaagatatcaattccttagggtttaaattgaagagtgatatattagacatgtagcaagtagtatgcctatcttgaataaaaatgattgcttgaaattatttgttaattaaatttgtaaataatttatgcatgcacatgttatcttgataaacatattttcccatctatcccttttttttcttttcttttttttttttaattttttttttattatttctgtggtggctgttgacattatataaaaaaggttaattaagatttttgtcctctagactttaacaggtaccaaattatgtgtactgaatttttaaggtcgttaaaaatgccccctga

SEQ ID NO: 57179 - DNA, 2044 bp, Cannabis sativa
tttttattcaattttgggacccaatccgtgggtcggtctgtgtccgagtccgggtactagtccggttacaattttgggtctgggtccaggtcctggtccttaacctggtcctgctcctgagtcccgatccgcttctggtttcgattctagtttcagtccgagtttgggttcaggtcttgatttgggtttcgagggaggtgggtttcagtctcggtgagggtccgaggtttggtctgtttccaggttcaggtctcggtcaaggtcccagtcccattctaagatcctagtctggttccaattcaagttttggttttggttggcgagtatgggtcatggactgggtatgtgtccgagtcctggtttgatttcgagtttgggttcgggttctagtctatgtcctaaatcctgacaccgactacggatcgggtctaagcatcgagtcccggatcccaggtcctgaggtgggtcctaggtccaggtttttgtctggggtctagtctcgattctcgatttaggttttgaggcccaggttttgctcccagtttgggggcccaattcccggttctgggtcccccatctatgttcaggtcttaggtccctgtctggctcaaaatttgttttcctgttcgggttcgcatctcgagtcctagtctaagtcctggttccagtttgggcttaggtccgacttcgggtccatgtcccagtgtgggcctgagttttgggtcccaggtctgagtctggttcttttgtcgtggggccgagccttatttttgggtcagggtttgggtttcggtccgtatcccggtctgggtccaggtcccggtctttgtttaggtcccaatgcataggtcccaatctacgtccaattcccagtatgggttctagtttgagtttgggttttggcttggatcctattactgtcccaggtgtggtacgattcagattttgggtcagggtcctagattcaaacactgactacgggtcaagtctaagcctcatgtccaggttcagatatcggtcttggatctcgttcttgttccagttcgggtcccgggtcttgggccgcgtcctaagtttgggtttaggtccgagtttggggttgtgtcccagtagtcaggtcctggattctaggtatagggtcgagtctcgtgtctcgatactgtggtcgagttttaggtctcggtcccagttccgggtccaagtccctcatctggctctggatccttagtacaagtctgggtccaggttcaggtctggggcccaggtcccccatctaggttcggatccttggtcccgatctaggtccaaaattagattcgggtttggatctcgagttttggtgcgagtctaggtcctagtatgagttcaagtttgagtctgggtccgggagttggtcaaagtccagatccctgttcgagtccgggtcgtccaggtccctgttggggtccgggtcggggtctcgatccgggtcctagtcaaggtctaggtccaagaccaggttctggtttgggtttgggtacgggtttaggtcctgagtttgggtcttggttcgggtctcaattcgggtctgggtcttgcttctaggttctgatctcggtatgggtatgggtctaggcccgtgtccaagttagggtttaggaatttaggtttagtgtttatggatttaggggtaagtgtaaagagtttaggatttaaggtttaaggtttagggtttagggtttaaggtttcgcttccagttctgattccaatttcgggtcacagggtacgatttaaggttcaggtgtgggtctaggttggagtccgtgtctgggtctaggtccgtattcgggttcacgtctgagtcttggtcccaaatccaaacaccaccacatgtcgagtctagttcgagttctagtacgggtacaagttttggtcagggtctgggttccggtcaaggtccaattccctaatttaaacaccgactatggggtcgggtccaagcctctggtcttggctcctgggtcccaggtccaaatccaaatcctggtccagatctagctcatg

SEQ ID NO: 57180 - DNA, 1467 bp, Cannabis sativa
attttacaggatgtcttaaataacaagagtgactatgatccttgtgtgtagaacaacaatgaaccaatttggttactgttatatgttgatgatattctcatcattggtaacaaaagaaaggccatagatgatccaaaacagagcttgaatgctaagtttgaaatgaaagatttaggtgaggcaaggaggatacttgggattgacataaagacagacagtccaaaaagtttatcactctcacaaagaagctacatacaaaaaatgattgacaagttttgcatgagtgaagcaaaagcagtaagcacacccctgacacaaagtcaatcacccaaaacagaagaagacaagatgtacattgatgtagttccttatgcatcttgtgttggtagtctcatgtactgcatggtgtgaacaaggcctgatttggcttatgctctaagtatggttagcagattcataacaaatctaggaaaagaacactagtctatagtgaaatagatacttaggtatctataaggctcaatggatgggggacttgtctatgacaacaagtctaaggaagaggttgaagtgaatggatatgcagattctgaatatgctggaagcatagacacaaggagatccatcactggttatgcattcacagttctagatggatgtgttagctgaaaatctaacctacaaaaggtagtttgctttgtcatctattgaggtacacttatatggccagcaacagaggcaattaaagaagttgtttggctcaaaggtttcacaagggaattgggtttcaaatcagaaagtataacagtgcattgtgacaaccaaagtgccctacatttgatgaaaaattccatgttccacgagaggtccaaacatattgatattaaactacatttcataagagacatcatagctgaaaaaaagtaaaatgtgaagaaaattggcactaatgagaaccctgcagacatgatgacaaaaatatttgagtttagctaagtttaggctttacctaaacttactaaacatcctcaagtgctagatgaggattcaagaccaatttagcctcagatctcaatggctctttcctctcttaatgaccaaggtggataattgttgtgattggtctttcagtgaggaaacacatttagctctaccaacttccaactattttaactaactgtcagttatgacaattagtattgagctcaacaacaaaaggctatttatagccatttcctactactgtttatggtatgagttgagggagtgttcggaggctttttgtgagctagttgagagaaagaaagagagaaaagaagagtgttgtattggcctataatgtgtttgatccatagtgccacaagtgaggatgtatgtaaattgaagttgtgcttcattgagagattgtgtcgagtacacattggagatcaacaccttgtaattcttttcatctagctcaataaagat

SEQ ID NO: 57181 - DNA, 1238 bp, Cannabis sativa
  modified_base (56)..(59): a, c, t, g, unknown or other
  modified_base (1051)..(1055): a, c, t, g, unknown or other
ctgtaataaatactctcataattaccaaagacttgtggactaaggctcattaatgnnnnaaccacgtaaaaatctcgtgcattaagcttcttacaactttcttatatattattatattagttaccgagaacctcggtaaccatgttggtttagtgggaagaattttatcgacattttagcgatatatatcgaaatagtttttattaactaatggttttccttcttttttgcagattcaaatgtattttgtcgacatgttagcgacatacgtttaattaataagcaactttgatgttctgcaaaatttagcgttatctggcaatgctattaacgatgtctgatgacaacatgttgttatggaacatgtcgtcaaatatcgcataacatatcgctataatatcgtgaaatatcatgagacgtcgcacaattgatacaaactgataaaaatgaacaaaccatagacgccattggggacgatatcgctaaatatcgttatcattgtcgacaaaagtcgataaatacataaaaataatggaatcgaaccgctaccatcaaaattcaagcccaaacacaaaaaatcaacttaaaattgaacaaatatccttaatctcaaccataatcaacaaaaccaacacaaaatttcaatacaaaacttaaaaattggaagaatcactcgtgggtcgtcttgggtgcttctcgtgggtcgtcgtgagttctcgtggtcatgggtcgtcttagtcctaggcggcggtccgagctcgcgagaagagagagggtcggggatttgatgcttcttgtggattttgatgctgggaattttggagttaagagagagagagggagggggaagttagatagaaagagtgggagaagagggtgttttgaattgtaagggtaattttgaatttaagagtgtttggagaatatttagtgtatttgtttatatgtagtatattaaaagaatggtctaaatttttaagtacgcttttccaaatttccttttagaaaacaattccctcccccccctctaaaataaataaataaataatannnnncttataaattttttaaaaaaattcgaatagtttacagtgtcaaaaaaaaagtttgatatttattgaacacaattgttaaattgaaatatcaagaactatattttcgataatctacactatttaaaaaaatttaaaaatttataaggatgatactataatataataaatactaccatgcaaaaa

SEQ ID NO: 57182 - DNA, 1183 bp, Cannabis sativa
gaagagaatgatggagttttcttccatgaaaaaaatatgataatttaccaaaaaaaaaaaatacataataaaatacaaagttataaatgtagatattattttgtaaggacggtatgtgattaaaactttgggcattattatttatttttttttttttttgacagttaaagatctctcaagttgctggattgttgtttgaattagtgttttcaagctctcttttaaaaatatataaatggaaattgattaatacctaaacgaccgtgaatataaaggtaaaggctgtcaattattttgtaattttaaatgagatgtcacacagcacgggcgaactcacatataagcgaagtgagacaattgtttgtacaaaaaaaaattaaaaaaaaaatatatatattttaattaattacaacatatatttataataaaaaataataagcataatattaagttatgtaagttgaaaaataaagattttaatcccactaatggtatttattttttttttaaaatttacttttatccccctcatctaccaaaaaaattacaccccactttaaatcttaagtccgagacaaagaatgagatgagacatattagtgggagaggtgatctcagttctttttggactttttcagctaaagtaatagcttatataaggcaattattaataatatgattattgtagtgtgaacatgcagtattcgggaccttattgtcaagtcaaacttagagttttgctaaatgaatctaatacattataaatatatctattcaaaccaaaaaaaaaaaaaaaaaaaaacaaataataggttaagagtttccagttgatcctatggcgtccaaaataaaaccccacttctttccaataatcttaattttggcccttctccacaagctcaacttctcaaacgcccaaacgacaataaaatctgcgtattggttcccagagagcggattcccagcctcaagcatagactcatcactattcacagttctctactgtgctttcgcttcactcgacccccaaaactatcaactcttcattccttcccaaaatgcccaacacttctcaactttcacctccaccgtccaacgccgcaacccctccctcaaaacccttatctccatcggcggtggaaatgccaatgcccaagattacgccgccatggcttccgactgg

SEQ ID NO: 57183 - DNA, 1594 bp, Cannabis sativa
taataaatatttttagcatatttacttaggcatacaactttaacaaaactattatccaattcttcaaaaactaatgtagttgcaatctaattgtcaatatatttttaaaatagatctcaatttattagcaactgctgttctacaaccttgaataaactatttccattgaagaaagtaatatcaatctatcaaactaacttttcaagctgtaagagttcacatagaaatttaaacaattcaaataaatgtgtcgtatctatttaattgcttggtagtggcatgtctttcggttgtgaccttgttgtccacatttgctgcacctattctatttttttgtatcccaattagctatgaatcttatttttcttggtcttttggatctcattttcgggtttggtggcagaataatgatatctttgatgttttgtggtacataccatgttgtgtgattgtgtacagaatatatggacccactatatgtttcaagccatgttatcgttatgtaatactgtgaacagtaatcgaaaacatgtaagttcatctctttcgtcacagaaagagcataagaacatggtagttcgtcttgttggaatccattgcaacaggatgtcttttcttttagattgaccacccatgaccttgttagttgtatcacttcgaacatggtctcgtttattggtttcacctgcatattaggtgaagataatcaatgtattgaatgttatgaaaactaaaaacaaactacaacaaaactattatgcaacttgaagtttcatttgatgttacattttttgtcaatgagtccacaaagttgttgattaacttcttctctgcagtaggtgtcgaaattgttgtggttttcatgtttgtgtatgtatattgttgtatcaaagatctcaatgactccattagtgttgtgattggtagttctctagctgctaaatttgttgagtttagagattcagcaatgttagaagtcgtagttatatacatattatttttgctgtggtaccttgaccatttgtgcactactacaatttatacatttagtgacacaatttagtgacacgcacaaaaagtgcgggtcactaaatgtttaaatcaaattttagtgacacacattgcttgacagtaaaaatttcacatatatgtttcataatgcgggtcactatacatttgaagtgtcactaaaaacttatttatttatttatttatttaaaaaatataaaatatatagtgacacgcactggctaactctaaaagtgttcagagtcatatgatgcgtgtcaccaaagactcaataaaaaaattaaaaaaaaaacaaaaaaattgaaagaggcggctgatataaaaaataaagcctcctttatctcaaaaagaaaaaaaaagcctcctttatctctcttaattaattatttattaaaggaaataaaaaaagataaaaaataaataggggtataaaaaggatatggtgaaaccctaaatctaattcaccatcttcatcaacctctctcttccgttctttcaaaaaaaaaaactctctcttccgtctctatctcttcctatctaatcatctccctttgtttttgcgtgc

SEQ ID NO: 57184 - DNA, 1058 bp, Cannabis sativa
acattggtcggttttaaggatgttcctagattgatcgttcggttttcggattgaaccattccaaatcgaaaaccgaaattcagatttttatttgaaaaaaaccgactgatgctcagccctagttcagggagcatttttcagggagcatttttaacgaccttaaaagttcagggggcatttggtacatgtcgaaattcaggggataaaaatcctaattagccttaaaaaacatttatcttataaaaaaaaaacatttaattatttgtaaaaaccctaaagtttctctctctttttttcttctcagccgcatcttctctctcttcccttttttctttcttaggccatctctaacccaactctaaaacaccaaatatagtgtagtttcacactataattacttcaatgagacactaaaactatactcataaatgggtttgtctacagtgtcccaccaaatttagtgtggcactgtagaccatactatttttttttaaaaaaaaagtttttaataattaaataatacttttaagaagaaaaattaaataattatatatatttagtattaaaatattcttattatattaataaaataataaagaatataaaatttagtgtaatttttagtattggggttggaattgaaaaaaaatagtgttaaaatagtagttttttggtgttgatttaacactaaatttctccattggagatgcccttagtcgcacgctcccctttttccttctcaggcatcgcactaaaaggtcgaccctgactatcttcttcgatcaaagatgtcgtttcctttgcggctatatctcgtctcaagtatgcccttttctcaatcctatcttcgtcttctttttttatttttttcagaccaagttgtcctcttctctttttttcttttctttgtgtgtaaatcgcacaaaaagtgcctcatcatggtcatcattcttcctctctttgttttcatatttgtcggttctgaacggcggtaggtggatttgggcttcatagaggcgggtctggtggttcattcgaccagtggcggttttcaaacc

SEQ ID NO: 57185 - DNA, 782 bp, Cannabis sativa
gtagatagtaaagaatgttaaaagatatattgaaacttaaagtgaattatttataatatttggattgatcataaataatatatatcaagattgctactaaaaattaaacaaaaaaaaaaaaaaaaaaagaagcactgagagaatatatgtgatatataatgatttgaaggtttttttttggtaaagataatgatttgaaggtttatagttattagagatatgaatatattttttttaaaaaaaataatattgatgaaaaatgggaaaaaaaaaaaattggtgattgatatttttttttagttgagactaaatctgaaaaaaaaaatgtatttcaatgattgtttgtttatttttaatgttactttttggtaaaaataaaaaaaataataaaaaattagagaatatttaggatactaaagattttttttaattaattaatcaattacaatttataaacctaataaaaaattaagaaaatgaaagtaaggagagaaaaaatagtactatttagagagattttaaacggttatattactgtctcatatatctcctttatatatagatagattttcattgtctcgctaagagtattggcttagagatatattagagttgctattacttaattattaatttaaataataataaacttaaatttaatataattcaattatattttttaaataactaaaatttaatataatttcaaatttatttataaaaaaaatatgtatctaactaaatttattaaacaataaaagaaataaataagtttagatatt

SEQ ID NO: 57186 - DNA, 1139 bp, Cannabis sativa
aagaacgaggtgtgaagagacgagtgttacctcgcggcacacaagaacccacagtcgatcagcacgaggaggagaaagtaatcgtcgcaagaatgatcgaggaagcataggtacgagtaaggctgcaagtcacttagggacgaggtccataagaaggacacagtctatgagtaggacgaattccgccagccatcataaccaaccacatctacgagaacacttgaacccagaaatacctgatcttccccaacaacttggtccaaagcgaggggatctgatccaattgcaaatagatgagttggagaataggttcaggaggtatcaagtcatggagcaaggaaaaaaaaaggggtatgattcagatgaagaactcaagtcgtaccatctagatatcatgaatactccttttccccagggacttaaaaacccccacgtcttgtcatacgacgagaccactgatccagtctcgcatttgaacactataatgcgagctagcaagaaacaaaagaagcacaataagtacgtgccagtttacactatctataccgagcttaatggaactcagaataatatctacctcgcacatgagcacaagcttgcatttagtaaacctaagcccatgaggcatgcgagatgtaaaagggatcccaccagatactgtaagttccataaagatattgggcatacaacagaagagtgtcgtcagttgaaagatgagatagagagtctcatcgcgcgaggccattttaagcaatatataaaagggcagggcaatgtacataactagtccaatccacccaacaacctaagcaaccaaggattacaacgtcctcctattgaaggagaggatatcctggttatctcgggaatactgcatattgcaggagaggaacaataacgcccaaaagaggtacgtgatgaaaataaaaagtgaagagcctctgattatattgtggtataactttggggatttattgggtgaggtacctttgcgactgagactttttgattttcgactcgtcgtcagcttgcaatatactactgggtcgtccagtattaatcaaactaagggcaattagttccatcaagcacttaccactgcagtttcagacaccaatgggtgtgggagtagtgtgagg

SEQ ID NO: 57187 - DNA, 1019 bp, Cannabis sativa
gttgacgtgtattcccttcttctttgtgtacagtaaagcacttgaagttgttattcattaatatgatttgctaacaaaattaacgttctaaaatataaaaatataattgaggtttattttttgagtgtaagttactaaattactacacatcaactaataatcatatcaacactaaattaggtgggggtttatataattaagatttctatcatttaaaatacattaacggttaatacaaattgatcttttatttacaaaaatatttttataaagtgtagagacaacatttatattttttatgtacttttaattaccaaaatacttcttacactatcacttacacatacaatcaccatcacttaatgtgtataccacctattaacttttttttttttcatgaattcgaaacaacctctattttgattgatttcgttcgtcttctcaagtgaagtcgccgaaattaatggtggttctctttctgattggattgcatttcagttgttttaggttgttgggtggttgcccgaaggttgcatcagacaaaggtttcaatctcaggaagcatgaatcgtgggttgaaggtgggtgtaaggtatttgtttaattaatttttttttttatttgggttgtatatttattcatttggccggctgaaatttttttgtaatattgactttgattttgctccctcgtggctaaaggtggtcgtcgtccagtgaagaagaagtcgatggtgtcttttgcttgaaaaaatttcaacattgacgaccagaagggaaagatgaagtcaactttaaggcaacggtgatgaaactgtaatgcaacagttatatctgaataaaaccataaacaattaataatacaacatatttgatacaaataaatattacaacaatcgtgttttatatattctggtcgcatatttgaataacgagccatgtttttataatactatgatattgtaatactaaaaccattattcaactaatgtgcaacttaattgcaactaaaaatattaa

SEQ ID NO: 57188 - DNA, 710 bp, Cannabis sativa
tctctactcgctaacaacacaaataaatgagataattatcctcgcactattaatatcccaagaaaaattaaatactattttaatttggatattacagaaagccacgttacgtgagagaaaaagatgttcaatagattcattctctgtcccacaatgaggaaaagtaacattttcaataggaaaccttttacagatctcagttcgcattgggattgccttagacagaagacaccaccagagtgtcttcatcctttctgtgatcttacaattccaaagcctattccaaagtaaaggagcaacgtcacaagagggagccctatcaacagcttgggccaggtaggctgacttgcacaagaatttaccattattttccaaagtccaaatccatctattatctctctggccagacggattgcccccttttaggattgtagaaacagtctctctatcaaaaagattgtttaacttttagatatttcagccaccttatccactccagaaatagaggaaccattagcaccattagcacgatggctaaaatatttcttatgtcatcaagtattcttattaatacttgcaccaaagtgtaccttttagtatttttatagggtgcatggaaaatttccacttctaaaatacaatacgtacgtacacacattattattattattattttgcttaagtgtatacacattatctttattcgaaaa

SEQ ID NO: 57189 - DNA, 2002 bp, Cannabis sativa
aaaccaatcattaactaattttggtactctacataaatttggtgcttctttcattaaattaaatggaagctattatattcctatatgttaattaaaatctattttccaaagctaatgaatacagaaataatgaagtatttgttggcaaatcaagaagaaaaaaaaatgaaaaacaagtttggtggaatactaaaaactacatgcatctttaatatagttgttgtaccatttcataatggcataaattaactaaaaaaatcaactaaattttacctacctataccgttaaattaaaaaaaaaaattgtaaataaaactaaaattaattcaacccaagctttgtcagttagtactgtatattactcattcacaaaacaatacatacaatttttaaactattttccaaagaaagcaaagaaaaaatcaggtgaaataggaaactaacttcccaatatcctcagcaatatcaaaaaatcagaatataaaaaatatacctcaccaacaccctaaaaaaatcattcgaaaaaacatctgaatcacataaacaaaccatttcaaaataaaatctataaaagactttcttgactaaatagttgaataactacacatcacaaaattaaacaattggttgtataaaattaaactatataatgatgtttcagattatgacataaacgacttactcattaagaatcgccaccagttgatcgttcgagtcaacaagagcgaaccaggtcgactcaccaatatgacatttctgtgaatcatcgatggccaaaacaatcagcaccgaccaaatggtgctgaaatgaggtgtttggatttggaggaactggtgtatataatgatttttgggattgcgatattttttccctttgtttcttttcttcctattttttcatgtagagatgctttaatttcaaacaaaatcgagcacaaattggtgaagcacttgcggcagaggttagtattgtaccagtaccttcaaggctaatggctcttattggtcagtctttgaagtggcagcaacaccaaggattggttcctccaggcacaaaatttgacttatttagaggaacaactactatgaaacaagaagacacatattcattcccatcatcaatgcttgcacataccataaagtttggcacaaaaagtcatccagaatgtgctcgtttttcccctgatggatagtttcttgtttcttcctctgttaatggatttgttgaggtttgggattatgttagtgggaaattgaatggaagaacggacatggggcagtttgatagggccggctcctcctggtgtaatttaggggtgagggtttgggagatagtgctaagtagggaactgaaaatatggagggaaaagtttgggatataccgccaaaaatgaaaatttttaaaaatgaataatgtgtatttttagtaatgaataattatatttctcccctccaaaaattaattattatatcatttattattttggtatattatttaatattttaataaaatattcccatatcatattttaatatattaaaaataatatatcaaactaatattaatatatttagttactgtatttttaagtagtagagttgtatttactacgcactaattcaataactatttattattatgcaagatttagtaaagttgtatttgctactatattttttttaaaaaaatataacctatattagtcatatttttttttaaggattaaatttgtagtcacataatatatatccaatatagtaataattaatcttatgttttaaggcgactaaataattgattggtacatataaattattaataattgcacaaataattttttttatgattaatattttagttgtagaagatcattaacttttaccaactaactatttcatcacaaatttaggatttttagtgacttaataattttagtcaacgaaaattattactcccgctacaattataatttagcgtcaaagttctagtgactaaatacaa

SEQ ID NO: 57190 - DNA, 1243 bp, Cannabis sativa
ataaaagatcaaggattgatgccattgaatatttttatcaggtttgacctagactcgacccggtcaacctaaaaatttaaagaaactcgttcaatgcgggtgggttagattcaaaccagtggaacttttgggcgggtttcgagtttcaagttggacccggtctcacccatgaacccattatttttatttatttattcttacataaacttttataataatgtaaatttacactttatatatattggacctcaaatataataatattaactatattcgtaaaagaaagaaaaaataattacattatacaatatgttatactattttttgcactatggacagaatacataagtgacacatgtcctgcattcctcgcatttgggcggagatgaatgtctcgagtagacttcatattatacatctgtatgtatgcttctaattacccaagcagggtggaaggaagattatccgagcaggagcaagtttggctttttgaattacttatcaagacttgactacttcagaacgatctcttgaagtccaagcacgaagataatccctacaatcgggggattgagtcagaagaatatggcaatgtgttcaaattttctattttgtgcattgtaattatgtaatgaatactctttcctattttatacattgtaagcaaaagaaaaactttccctgcattaaggccctgtaaatagtgacttagcttcaatgtgaaagggatcgaaagaattgcttcatagagagatctaagagaattactcagggatttcattgtaagagctttgagagaaaaacactttgttctttgttcttgagttaatacaatttaaggggagtaggctattaccacactaacggggccaaacctcttcaaaatctagtgttctttattttaattatattctaatcgcttaataattgactcactgtcattgactaaaagtgaggtcaacattttggtgctttcattgagagcgaaaacccaagtttgttctttgtcttaagtcttaacaggtatacagaatggtggtgcaaacttgcagagtcctggtcgatcagagcgacccaatggtgacagatcctaatgtacaaacccctaggaatacgagaggaccaccagggacaaatcccgaacaggccaatgcgcaaccacctattgtgggccatagtgtgacttcccctctggctaggatcacaccaggtgtgcaagagactgggaataccagttctgcag

SEQ ID NO: 57191 - DNA, 1439 bp, Cannabis sativa
aacacgatttaaaatataagttgcagtcaaaagtgcttcaccccataaaaactctagaagatttgatttactcgtcaagcatctaacatatccatgagagtgcaatttctcctttcagcaacgccattttgctcaggtgaacttgacatagtgtattgagaaactacaccatttttttggaaaatattcagcaaaaggcctcatgtgtagtccaaattttgaataacaatcataatattctcctctacgatctgaaagaataactttgatgactctttctaaatgatctcaagaacatttcaaaagattttaactttatcaagagcgttatatatttttttttgaatcaagtgaagccatattaagaaaaatcacttaggaaagttatgacatacttgtatccttaacatagtggaataaggtccattaatgtcagtgtggataatctctaataaagattgactacagttagcaatcttctttcgtcttttagttaattttctacaagtgcaatcaacacaagtatcccaaccagaagtatcaagaggaggaagaattttagctctaattaatcgttcaaacttgtttcagaaatttgacccaatctaagaatgttaccttaatataagagctcttacgcacattattcacaaaattgaaagaggaaactaaggaagttaatgataatttgaaaagacgatcagagtaaaaacagtttccaagtattcgaagtcaaacataatgtcaacattatgattggcaaaatgaaaagaatattattattgaactaaaagcggaagcgaaattaaatttatcttaaaagtagcaatatagaaggtattgctcaaaacaatctgaacattacactgtaattcaagaataaatgtgccagcatagataacgtcaactccaatataagtgcccactttaagctttgactccctctcacttgtcttcttaagatcccttagcccctggttgtgatttcttattttcatattttctttatcctttgttgggcttgagttaaaaaacaaagtttgaagattcattcttatgcttctttagtttctttcctcagctacacactgagaaatcatgttaatgacactacatgttttattataagtgttgtaggttgacttcataaggctaaaaagaggtaggaagttcatgaagaacttgaagaatgatgtaagagtcgggaagaggaatattatggtctatcaactcggactgaacattaactaattttcagaatagaatctcgcactccttttaattcatcatacttaatggttgtcatttcatctataagatgtccagcttcgacagttcaccagtgtcatataatttttctacagcattgaaaaactctttggcatttgttgtgtctgacaaaccactcaaaagatgttcatgaatggatcttttcatag

SEQ ID NO: 57192 - DNA, 1118 bp, Cannabis sativa
taaaataataaaaaaaaattaatagtttcaattttcttaactatgtaaaacatactttgaaacaactatgagtgtggtatagatttttctctttgataatattgtgaataattaaccaaaatacataagtaaaaaaaattaaacagaactacaaactacaaaaatgtaatttaataattatagtttagataaactacaacaacacatcttaattatcagcatattgaccatgaatataaatcttactttaatgctttaatgattaatgctttcaacacataattgtattacttacaagaatgatccaatctaaaaaatccagtgctctatcatcacaaaaaaaaaaaaaaaaaaatacaattattggctaaatatatcatataaaattatcaaaattagtacaaaactaaaaaacgatatgaagacaagtatattaaaataaggagagtgagataattaatgtttaaaaataatataaaacattccttaccatataattataattattaataatttgatcaattagcttcagaaatcttcaaaatgtttgtgttgacaattggcttcaaaaatcctcaatgtttgtgttgaatcaagtgtagtagatgatgattattctgtattgggaaaagaacaaaatatatattatgtcacatatatatgaaattggtagtattactttagatgtactacgtcgtaccatcaaagacattgcagaattaattcaatagtaacagaattatactacaaaatatacaaatcatgcatgaatagcaacatagagagacgtcgagggagagagagagagagcaattaagagaggaatgattaggaggatatggttgtgcttttaaatttagggttaaggcttgttatattgtgatttagtattaatagtacacaaagttatttattagggatcattttgtaatagatattttagatatgttgtttaatcattaattaatgataaagatttatacggttgatatttttatttttattattattagtattatataaaactaataattaagtgacggtataaaatagatggattaattaatgtttatagatggattaattaagtgacggtattagccaattatgctttgaca

SEQ ID NO: 57193 - DNA, 599 bp, Cannabis sativa
ttcaactgcacccaaaatcaaagatataaattattacatatacgatatatatgtggatgatttaacatgtaacaaataattattaattattaggaattaaattaacttacacaagttggaaacctgtgtggtcagggcgatgggagtgagagtagtggggattggagtccataagggttacgggaagaaagttgtgatggtcataggattgggaagcagattgatcaacattgttattattattattattggagtctgtgttgttgggtctggtagtagcagtggtctctgtgggcatcaaattcatttgttgctgttgttgttgctcttcttcctcattctgttgttgctgtatcctctcattttcagctatctgtattattgtatattaataattatagttttatgtgcaccaaaattcatattttttagacatgtcacatataataagtggttaataatatattagttttatttgcctaattaatagatttgttcatatatatttgtaaataaaattacataaagggaaaaaaaaaagaagataattagtggtgtttaattaattaaccttggctcttagatagttgttatggttt

SEQ ID NO: 57194 - DNA, 1122 bp, Cannabis sativa
  modified_base (27)..(29): a, c, t, g, unknown or other
actaatcagattgtaaagagttttatnnngggcataaaacccaacagtgcaatcctttaaacctgataatagcgttatcataaatcatccgcccgctgacaaaagcactttgagcactggaaatcgcatctcccatagtcaacttatgtctctcagctaagcacttagacacaaccttatacaccacattatgcaggcttattggtcaaaattcagccacattagtaggcttagaaaccttcagtataagggctatccaagtttcattaagttggtgcaacggaacatcattattcaaaacttccagacacacccaagaaacatcatctttagtaaaatcctagaactttggaaaaataaaccaggaaaaccatccatacccggggctttgattggattcatactcttgaccactcactccacatcttcccccgtaataagagccaaaagtagtgcattcatctccattaaaattttagactgaaccacaagaagcacttcctcaatctttgccaaggccggctgagaagtagtaaacagtaagtcataataactttgtactaaatccttaataccatcactgtcaacccattcaaccccgtgatcatcaaccaaagagccgatatggtttttctttttacgctgggaagctttgtgatgaaagtatttagtgttacggtccccatatttcatccaaacggctctgctacgctgcctctaatacatctccttcttctctaaaatagtattcaattgtttctcttccttcttaagtagctaccaatttgacgggttcatattacttgataattttgagatacgttgttgaatcactacaacctgttgtgcctcctctttccgtcaaacaatattccaccccaacaaacctttcccacactgagagcttttcacttttagcatggccagattcacacaagaagtaccatccatccaatgatctctaatgattttttttacattcttcctcgtcaccccatgcctcctgaaccttgagtgcttttttcttaggaacaatacctgaaggtacaacagtataaccacaactaaaaaacatcgacttatgatcagaaccacaaaagtccaagtatatgaactcacacc

SEQ ID NO: 57195 - DNA, 1295 bp, Cannabis sativa
aattaatatcccaatgcaaggatgtgtgtgagcaacgagacaacgcccaacaggagattacccgccttaagtaggaagccgaaaagccgaaggaggaagcagagacagcaaagaaggaagctgagaaggcaaaagaggaggccgagaaggccatcaaagtctaagctgatgagtttgaggagaagcttgctgagaaacttgccgagaaagaaatcgagatcgtagaacggtgcaataaagttagtttttacgctgtataccggtcctggctttggaacgctaacatggataccaacttcatggaggagaaggaagaggaaactttagctctctgggagaagaccaagatggaagaagaagacgacgaggttgaggaggaagaagaaattctgtccaagtctcccagcatgtagacttggtttatttatctcctttttttttaggaaatggccttttggctgagacaatggttttccccctagtggcacttttgttttttgtaaagacaaatttgcaaggttggacgaccaactttgcttttttaatgccttaaccttttaagcatgaactttattatgcggacttttacttgcattttattcacaatataaactatcacaggcataaattttattaggggtttacattgattgtcctttctttcgatgttaagtaattaatttcctactttacgtgtgagcagcttatctgcccgttcctcaatccgctaaccatcatcaattccatctcgcgatcatcagaaatgatctcattttaagcacattcaaatatattttgaatgaacttgtcattttatatattcttttattgcttacatgagttgttaaaatttctacccacgtgttgggtttaattattttttcaagacatttggatgtctcgtttaatacttccccctagcgcgaaccgttagtattcagttttatgcgatagccgtaacttttgattttcatttctcgtaagataggttataaatcaaaaattacaattgtttgatccctttctcattagaaaggtttgttcaaggtgttataacgattcgacccctcttccgtcgaaaaagtttggtctgggagttataacatttttacccctcttcagtcaaaaaggtttggtcgaggccctttaataaagttttctaaatttgaaactatgggtttgcattgtactatgtatttccatatcaattccggttaaccatacatatatgcccctcaagtaatttaaaagattttacgctttgtaagtatttgtttgaaagaaatgattatttt

SEQ ID NO: 57196 - DNA, 1160 bp, Cannabis sativa
ctctctctctctctctctcttttcttcattttcatacatttgcaatcttcctcaaattgtattgatgatcttgcttggtgtttggaaatattggtgcttgagtttgtaaggagcttgaggtagttttctagcactctaatttttagttttgctgctgaattttgatgttgaaaagcatgttttttatgttgctagtgttcttgtatgcatgtgtgtggatactggtttaattttgatgttggatgcatgattgtgttgatagttggtggatattatttttggtgtatgttggatgttattttagagacttaatttggtactttaatctgattttagactctgaatattgttgtttcaagcttatgagtatggttttgttgatcaaacttttgaatgaggaaatcataataatttttgctcaagtttagagcttatcttgattgttgttaaatatgattttaggatgcatattttgttgaggactaaaacttgatttatgtgttctaaagctttgctatgataattataatctatggaatatgaatttgaagtgtattaatgttttggttgggatctttgtgcatgttgggctgaaattcaaagttggaattggggttctttgcatttggaacccatgcgtcgcgacctggccccttgtaaatcctaggttttcaacccacgtgccgcggcccatgtgggatgtgtcgcggcttgccttgtggttctgggcagtttcgaacccgttattcgaatgctcataactttgtgatctagacttcgatttgggtgatccgagtatccttagaaggctcgttttgtgctctatatgtttatctgaatttgaatgaaaattttgtaattatgtggaaatggatttagggattaacccaatttgtgaatcctagaaatttgtgactaggattaccggtacttggtcaagagcacccggggatttggaatctccacatttacaagacatcaggtaagattgtagttagcacgtagagtacagcgcggtggtgctcatgtcttatattatcatcgacataaacctccattttcgccctatttcgcttgcggatatttcgtttactagtcactgatacgttgccccagcgttcttcagttcaaacggtatgactttataacaatagagtccc

SEQ ID NO: 57197 - DNA, 1312 bp, Cannabis sativa
agggcataaaacccaacatccatgagaatcgatgagtacatcttgaagataaagaatcttgtcgattctcttactgctgcaggtcacaaattatctgatcaagaactttccatgtacattcttggaggtgtaggacatgaatatgaaacagtggtggttttacttactacaagagctgatgctctgactctacaagaagtgtagtgtatgcttcaaaaccaggaaatgcgaatttaaaaaacagctcctcagatcttggattctgctcaagtaaactatgctcagttcaataaaaatccctctggatgcaatcagagcaacaccggtagaggtcaatctaatggtcgtggaaattcctaaggttgcggctctcaaacaagaggacgtggtccctcaaatggccatagacgtggttctcgtccagtttgccaaatctgtggcaagattggtgaccttgcttacaaatgctatcatagatatgacacagacaatcaaggctcctcctcaaattctcaaaattcatgccacaacccacaaacccttttctctaacaccaatacacctgctgaagataatggttggtatgtggacagtggagccacacacgacatggcctctgatgctcagaacttcaccaccaccaatgattacaaaggcaaagccaaaataacagtaggtaatggctcttaaatctcaatttctcatataggccaatctacttttgatgcaactaatcctaataagaaaattttgttaaatgatgtcttacgtgctcctcatattaccaagaatctattgagcatctctaaaattaccacaaataataacataattttattgtttgatttcgatacatgtgtgatcaaggacaagattacatgccaagctcttcttcggggccatcttaagcaaggcttgtatcaacctggtatgacagtaatggacaacaaatgggtacatcgcataaaatataaccaagatggatcagttgacaggtttaaatcctggcttgttgccaaagggtttcagcaaacaccaagtcttgattattttgagacatttgactctgtcataaagtcgtgtaccatacgcattattttttcttttgttgttacaaacaattgcccaatacaacaaatcgacatcaataatgcattcttgaatggagatcttcaagaatgtgtctatatggcccaacctgcagaattcaaaagtgagattcaccctcatcatgtgtgctaggggtgtacgtcggtcggtttagtcgggttatagcatatttttattaacccaatataaatatcgggttgca

SEQ ID NO: 57198 - DNA, 572 bp, Cannabis sativa
ttttgttgtggtgatggcaatataagatttatatgcttttgttctcaatttattgtcttattagcttagagaaccaacttataataatggctattaagaataaaaaatttcaaccgtgcatatgcttactctcttgtggcttggtgatgatttattatggttttgtcctttgtgtcttatggttttggcatatatcaatttattaatttttattaaattatttgttttggctcaatcacttggatactaagtgtagacatataaaataacacaccttcttacattatttaagctgatcaaatgtgttcccttttgaatttagttagcttgaggccaccttcactttcacttttgttatatccctactttcataaattaatctagcacaagggcttatgtgcttttatctcaaatgcttttatcatggacataaattaatgtgtttggcaatttgggtttctctttcttctactaaagtatccttttgcaggtctacatatgcaacaactatacgtgactcaaaatacagtcgagagagggaatttcttaaagcggtatgtaaataacaaaca

SEQ ID NO: 57199 - DNA, 1222 bp, Cannabis sativa
agcgctggcaaaaattacttttccaagcgcgtaaatgcgctggtaaaagttaaattttagccactgcaaatgtatgctggtaaaactttgacctctttcccagtgtggtttgcgaaatgtgctggtaaaagttacttttaccaacgcaatagcgaactgtgctggtaaaaataacatttcttgtagtagaaggactagctgtcctgaagactgtacccaaagtgaacatgatagtcatccaggaactcccttctagattcgactatcattccacaagattcctttcaagatcggtaaccgcgagtgaatcagcttcccatgaaataactttaaaataccttttcatttggagtaactataccacaaaggattatttgaaaatctcacaatgatctctagttttattattagatgatttctacattttactatgtatatattaattttgattattgtttggtattattattattaatataaaaaataatatcattttggactctcatttacaaaaattactgatgaaaccgtttgttttgtccaatgacaaaataaactctgtattttttaaaattgtagaaataggagtctgaactcaatttttaagaatttttttttagtataactaatgtgaaaataattcttaacacgaatagatggagcaaacgtaactaattttatcataacacctctaaatcgagttattattaagttttattttgtctaacaattcaactggtactattaaatactattttaaaaatatagatctgtaactttaacaaaatatggtttcaattagtaactttaacaaaacacatctaaaatatacatatggccaatataataatataattaacaaaaagtgaattttaattagggatatgtttaatttgtagttattaattaggctggagaatgaattacagcataaaggtacctaatgatcattttactaaggcaagactaaataatgttgaattatgtgcatatatttttaaattctttaacattcatagcatcatatttaaagtcaaactacattattaatattataatatgtacgtttcataaataatataatcatcaaaaattttatttcttatgttatatttatttaatttaatttatatatattttcaaaaaatttaaattatatataatatataatagtatattctctgtttctcaaattcgccagaatacacattagaaatttttc

SEQ ID NO: 57200 - DNA, 1291 bp, Cannabis sativa
tcttcctcctttggcttgtctttgcttggcccatcataggtcttaccacttctcaaggtaattgcattacagttctcctttggatttacttcagtagtgctcgacaagttaccttgagccctgctagtgttttgagcagccaactgccccacctgagtttccaagaccttaatggaagacttaatctctgtcatgaattgtagcagtgtgtctaactgaggattagaccctccactcgaggcttgttgttgttgtggatattgttggctttgttgagattgattttactgaggataaagctgttctggaagttctgctgacgaccatgattatatattctgatagtttccaatggcgtgggcttgctccattggcaaactgtcgacatctatagggccgatgtcagtggcatgagatcctcgacatagcttacagacaacttgagcttgtttggcttgtgcagtcaccagctttgttaatgtctctacctgggctgtcaacttggttattgcatcaacttcatgcatacccgaaacctttttagttgggcctctctctgttaaccaatgttgattagttatggacatctcttcaagtaattcaaaggcctcattagcacttttcctcatgaaagctccaccggcgacgacatctatcagtgttcgggtgttgttcagttatccagtatcaaagttatgcacttgtaaccacttttcaatcccatgatttgggtacttcctcaatatgtcaccatattatcaagacctgaaaaattaggagtcatgtattgtattttaaaaagaaattgccgacaattttaaaccatcagttatagtgagtcaccttaaaaaaaatttagatcgatgtccaccttcgtcatcaatcgtcggggattatctttttaaaaatttcccattctattttttagccattttaaatcatcgaaaatactaaaattcagttttattaacgatggtcttaaaaaacaatttaagtattgatgggaatagtattttttttttgtataacaagtttaattatatggacccaacctatattatgaaatagttacaatacatgtacaagccacataaactcggaaagatatatcaatcaaactaattcgagattaataatattttttttttcttttgacattagagaagaaagattcaaacttgagactttatttatatgagaagacatgtaaaactatacgtatgactatgttattcaacttttttttttttttaaagagtattgttatttgatattttgtagtacctaatat

SEQ ID NO: 57201 - DNA, 879 bp, Cannabis sativa
ctcaagcggagttagggttcgattccttttttcggcaaagctagtggttcgattccggcgtagttggtggtgcgagttttcctcaggcgaatcgagttgttcagacggagatttggttgctcaggttcgattccacactctgcttcttaccttactattctcccattaaaacttttcttaaaaaataaaaataaatgtgcaagtcgaattcgaacacagacctgcaatatttcaggcgatgtaggatcgatgaatttttgcaagcaataggaataggaagcagtgtcattagtgaaagtcgtttaattaatttggaattattctcttaggaataggaagcatgaattattcttaaagtcaatatatgtatatatatttttacatgtagtttcaaaatacagacagtaggttattttcttatattgttaggttactttgtaaagcatgacaaacacacctggttactttttttcttcttcattttttattatttttctttaaaaaaaaaatattcaaagtttgatcaatattcatttaaacaaaagaactaatatttttctaaaataaaaaatgtaacaaatcattacaaccttatgtagtatggtgtccattacaaccttgtagggaagctcttttctttgataattttcctaatctttttcaatgaatagttgtcttttaatttttgtttcaataactctcagtaacaaaaattgggtttagtagctaagcccagatgatgaactgtattatataccaagttactttataaatcataatagacatactaagttacttttttttcttaaatcaagacatcaatttttataagtaaaaaaaattaaattataattagaaacaaaaataaatctgaataaa

SEQ ID NO: 57202 - DNA, 1125 bp, Cannabis sativa
ccaagcttgtttagccataaggccggtcaagggtgcttagctagctcccgagaacatgttggactgtcatttgatccccgtttgagtgttaatttcatcgttggcttagatgttgacttggccttctttttaatgaattgtactaccacgtggtctaggctcttccacgtatgtatgccacgtcatgaggacgaaaattgggataacatttgtcccctaagtccctgtgcagatgtctgaacggatagggactttaccagcaagaatgatgttgttgggactgcagctacttttgctgaaataaaagtggtgttgaagtattttgtcttgattgtttgttcttattgcaatagagaaataattcttttatgtgcatttatgatgagttggtcaagtaagtggagaaaaagggggcccacatgtacataagtgagtttagggggaaacccttttttcactttcatttttcacttttacattctctcactagaatttagctcttgaaaaagctcctccttctctctaggtggccaaacctctaggctttaatctccctcaaatttttgtgttatttcaatgatctaagcttcccatcttcatcttcattggaatctagttgcgagtaagctttctattccctctccttcacttaatttgaatacatgaatgcatgaccaacacaatcgtcaacaagtaataaagtgataaatcgagtatcgtctccacagggattgaaaattagaaattaatttataaaactaattactgacaaattgatttaaacaaatataaaatgaagtgataagaatatataaaaattaacaaacataaactttgagaaagaaaataagctggaattattaaattggactaaaaatgtaaagttgatatatggtgcaaatgaataatattctaaattgataatgtcaactaggaatttaaaatgtcataatccttttccaaagtatttatggtttaattctctaattaattaacatattcatatgcctaattaattttaagaatatcaattaaagtacaattccttcgagtcatacaaggtaaataacatattcctatgttatttacaaatcacacttttccaagttgatattcatgcatcat

SEQ ID NO: 57203 - DNA, 2506 bp, Cannabis sativa
tatttttagtcacaatacttgttgtgacgaaaactaaattagtaactaaagactatattttagtggaagtgacattttgttgtgactaaaataacaatttttttttgtagtgtgggacgatattattgaggaaaatgacaaaatttcaattgaaggtttgcaaccaccttccaacttaaaagagttgacttgagggtatggtttttcaagggtgtgacatttggaggttaggagttaagcaattgcaaagaatagagttggtcaagaatcttatgaagaagctcgtttagaggaagctacgctttttgggacacattctttgctttctaagatggataaatcgattgtgggaattcttgttttgtctcaaaaactcatgcaaattcaagctagaagtatatctcgaaacttacctgaaatagtgaaaaaaaatcaatgataattaagttgagtcataacattgttgagtttaaggctcttcctaggactttgacttctgtgggtgaagccatgagtgcttttatatgaagatcattggtggagtcaaagagtcattaaggaaagttttgttgagaggtgaatttgatgagtttccaaatgataagaaaatgcattgtaaagctaggttagttgagatgctcaatggtttttcagatgagcttaagaagtgtccagcgagtgacccaactcgaaatttcttaatggatgagataaagcatttggaagaagctaaagagatttcacttcctaactttcttcctaggaatatatttctctccatattgcaagaaaaggttaatgggatttcgagtattcccaaggcttttgtggaaaagctatttggttatgtagaagaagttgttatgactgttttgatgagtcatgttcaacactataatcatcttcaaatctcagccaaaagagctggactttatatgatttatatgattaagaagatgaaaggaaaatccatgaagtgggttaaggagattgtggagatggagaagttgactgattatacttgtaaccccgaattcgaaaccaactggaagaagttcatggcacaaaaggatgtgttcttgagtaaggtcaacatccaaaattctatcaatattgaaggttttggcaccgttgacttggtcaacccaaggaagtctcctcacttgttacctgaagcttatgactagaggatgagattggtggcttattggagcattgtacaaagaaggcttgttgactcaatggctctacatttacaactgagtgttcataggcttgtgaatgagaatttggaaagagagcttgtgagtcaaattatgggttcaaatgaaaatggattgatgagaatgttggaggagtcaccctcggttgcttcaaagcgagccaagttggatgggagcatcaaaaaactcaaggagtgtaaggaaatcttggcccaaatcatggaccgaaatcatgatcaaagctagttagtcttgcaattagctttggcttttgggggtctagttttaagtatatatattcgttatgataatgttgtgcttttgtgttaaactattttgttattaagtacttaatgttgttctgtttattaattattatgttgtgtaatgctaagtactctcttaagttagcattatgtaatattattatcagaagaatattatgttatcagaagaactatctgctttaaactcctcaaattaaaatagcattgaaaaaacaaatgctcaatagattcattatgatgatcacagataagacaaaaaaaatcagaagtcatactaaaacaaaataaatgatctcttgttgttaattagtctatttttcaaagccaatcacgaaatgaactttgtgcttaggcacacttaagtgatcccaaataaaagagtaatgccagcgattaacattctccgtcaattagtataaacacctgcaattatataattgttcagtagctccacttgctaatatatgaacctattttactacaaattatcctcattagcgccagttgtccaaataaacttaccaattgcacaattattccacaatgcaacatctctgaagccaaggcctctttgagctttagacttacaaatctcttttcaagacacattactgggcccattataatctgatttcttttccaaagaaaagctcacaacaaatttgattaattcttttaataatagtttttggcaaaataacaatttgagacgagttagtgtttatagagaacaacacaaaattaatgaaaacacaccttccagtgaaagagagattcagagagctccaaattaaggtgcgtcatcttgtcaaccatacactcacaatcaacctttgagatacgcttattatattgatcttcatacccaagtaattaaaaggtaaagaccctttcacaaaccctatcatagaaatcaaggtatcccacacacttcttgattcatagttgctccataaatggccgatttgcctttatttgctttaagccaagaactct

SEQ ID NO: 57204 - DNA, 2559 bp, Cannabis sativa
tggtcagatgcccactttatttttaaatttttttttttataggactggcccgatgagcccgatgtagggcccgatggtcagatgactggcccgaagcccactttaatcttttttttttaattattttctgtttataacaaataaagaagaagagagaggggaggcggtaatgtaaatggggtattttagggatattctaaaatgtgttatatcccacaaatattaaatgttatgtgtttagagaaaaaatattaggtatatgtaagtataaaaaattaaatttcccttttataattgaactaactaatataacctcaactttcattaatagaattgcagactcagactcctccatagaaactgaactcacgcaagctccagcacgagttactctaccaccgattacaaccgcaatcgctactgtccttcaatatttgaatatgtacgtaacattttctttctattttcttgctttttgaatttgttttagtttgtctctttaaatcttattttccctcattcaatcctctatttattatggtttgtaatacctatgtatatgtgtataagtttatgcttattttctgatcattggtcgaaaaaggaaggaggtggcagaggttatggttttaattagagatgtaattgaattttttttttacctaaggctataacgggaacaaagttttaaaaagtgggtataaattaaagaatattaaaagggaggtaaaaattaaaatgggtacaataaaatggatatagagtgtaatttcctcaaaaaaataataggactattcatatatgggctcttctactatctcttgtctttcaattgggcttcgacctcaaaatatgtagtatttttttttccaaatatacctataattagaagaaaataaacttaccattgagtttttttttaagaaaaaaattacaacatcaatccttgttttaaaagagaaaaagaaaatagaagtgttgttcgaaaaactaatgttttaattttttctaaaacaagacactcatgttatgtttactaagaacatttctaaccatattctctaaatacacttttaaactaaaaatagagtgaactttgaaaaaatgaacttcaatcttataaaaaaatagcttcttataatagaaaaataaataaagagctttctaaatataaggagctctttttttttttttttgttaaattttttcaacattattttaatcaaaaatattttattaaaatatttaacaaatttaaattataaaattttattaaaacaatcataagttaagggtataaatggagaaagaataataaaaataactcaatattttaacttttaactatttttactaaaatttgactaaaaaaatagagtagcttggagatcacgctctatggtcattacaaacaattgacttgataattaatgataaaataattaattattattatggtcttcacactagttgagataatgtcttatagactcaattaattgattttattaatcaattataattataaataagactatgtcttatttatgagttttcactaagcaatatcttattcgagaataaaagaaattatagagtttgtttattaattaagagactttgaaaggtctaattaataaataagttaaacggtaattctatttgataattaattataattatcaatagagctatctttgaaagttcggttcccatgtcatctcagtttggatttttggttgaattggatttttggttgaattggatgctcaactaaaggtgaatacgatcaagattaacatcaatagagctatctttgaaagttcggttcccatgtcatctcagtttggatttttggttgaattgaaagttcataatcaaaatattttgaaagagttttacagttaagtatagatgaagagtcagtatttaaacataattacatattacttttatatacaaatatagtatgaaagatcaagaatattggaggctccctttcctcggtaggatttgggatatttggggtcggcttaggatgggcaatcggagatggagagctcggtttggccttggggggtggtaattggggtcactctttcttcagccgattctctgaaacaattgggatgtgttgaaagtttttaggtcattatctatgtgggagaaggtgagttttttcttaatgacgtttatcttttatttactttggaaatgttttgatgcataactttttgagtcagatttccttttgaatttgtgatttaatttgcatgtatatgttttctcttttgatcaatctgatcaagagtcttttttctctgtaaaaatgtttggatgctgttttatttgtgaatgtttgatttttcgttggaacccagaatttgcttctgtttcttccgtttttttgaaatatgcataggttgttccaattatagaatttaaatcctagttttttgttgttggatttcttgagtagttttattgcatctcataatatccttattccagtattttgttttttaccaaactatattagttttgatcttatggtgattt

SEQ ID NO: 57205 - DNA, 1073 bp, Cannabis sativa
ttagtttttcctttccaccatcctaatatgtcaaagtcatcagatgttggatcctctgtttgttccacaaaataagtatccacctctgttcctccacattgtttggcttgttgttgtaggatccataactgtttgacaccaatatcctcatcattcaatgagctcaactctgagacattgctagaagtttgagatggggtttgtgacccactaccattggtgctaggagtaaacctctcaccatattcagcaaacatgccccgcagagtctcttcaacagatttaatcaaagcatcaacatcgttctcatcaaaaatgaaactcaaacaatgtcttgaatatgccaacttgtatcttggatctaacaccataccaagtatcaacacatgattcattctctcacttttcccccaatacttgttaaactttttatgcatattgccagccatcttactcagtatgggatcttgacaattaactagacgtttcaattgtctatgaacatcagatattcgatccaaatacaagtttgaagtagaatacaaagacccactaaactttagtgtcaatgtgtaaaatgtattcaagaacctcacaaagaccttggcatttgcccaatcatcatcacttggtggaccatctattcttttttcattaaatccatcactaaagtaattggagtagctctcatcatcttccaatctctcaaaggctttttgaaacttcaacgcagcttccaacatcaaataagtggagttccacctcgtttgcacatctaagcatactaagcatagaagagatttagacttaatattttcctcggcaacatactccttaaacttctgtaaccttgcaggtgaggacctaacatacctaacagcatttctaatacttgaaattgatgtatgcacgtctttcaacccatcccccactatcaaatttataatatgacaaacacacctcatgtgtagcatcttcccatttaaaaccatgacgtctttcttcttctcatatttctttctcaacttatctatggccacatcatttgaagaagcgttatcaacagttacact

SEQ ID NO: 57206 - DNA, 2474 bp, Cannabis sativa
tttttgaataataatattaggtgtactaatataaatatgtcacatgtacaaaaatgtagatataaacagttcatggtgacagttaactggataacaccttaaatttggtattagttcagtagtttggaagattttactgtcaaaatttaagcttagagagttaaatgcaaatgaaacgacagttaagaaagtttagttactaaaaactcttttgaaaatagcttctcaatttttttttgggttgcaggtctgagtcccagactgggtccgtgtttgggtctggatttgggtctcgatttggatcccgtgtcccgggtccgggttcgggtccggatttgagtcccgagtccgaattccaatccagctcataggttcgggtcccaatccagctcccaagtctggattcgagtttaggtctggggttcaagtccaggtccagagttcggattcaggtccgggtcagagattgtagttaatcccgaattctttatgaatattataatacaagttaatacaaactatttattatctattaaataatagaacatacattgtattaaaaatttcaatcgtaataattaatacaatacattattttatccaaatataatattatttattatttaatacaacacaactcttatacaacataccaaacaactccttcaagaatatactatagaattacccatttgtatatagtactcatcgaaaacaacacataaataaaaaagaagaagaaaaccccctcttctcaaatactgagcccatacaaattaatgtatatgttgttaatgaatatgggcaaactgaagtgagttctttccatcatgtgcattcccaaaaaagttagccatataatgttgaaagagaacctctctatagcgaggggacccatctctgtccaccgcctgagccaggggtccaatcttctggtttggctttgggatggtgaatattgggactgacactcttgattctttgcttgtcgttctcaccctgtgttctgcactcttgtaccttccattgctcattatctatatatataaacacacaaaaatacaaccaacaatattcatgtttacaaaaatactataatatttgacaatactataatttagaagatttttgaatgtgaaatataatgaatagttgaagtgtttttgttttcattacacttcttattatatagctaaaatgttagtaccaatggctaaaatttgattaattaatcaataggttagattcatcaaaatagtttgggaattttcatttttatgggaaaataattttttaattttttcattaattattctttccatataataaatttttttaaagaaaaaaacaaccatatttttatacaaattatataaaaacccataaaaatttgtaaaatagttattactatattttaaaataatttgttgcatataagacactataaatagttaactgtatcttaaaaatttgtgagaggttataaataactacacaacatacaccatctcaaataatgtgtatatttatataacctacccatgtgccaaacataaaacatattatttagaagtaaaacaatattttatatgagtgcaaaataaattatttttagtggctataaatataatttaataatttcacatttttcttcacaaaaaaaagttcttctcagtataaaaaaacaaattatttttaaaaaatctactactatatctataatttattataatgtaatacaaaatataattttgataataatttctcaaagtaaatccaattagttattttgctaaatttggaaaggttgatagttacaaggtacctgtaatgtatcaccaacattaatgaccaaagcaccagaaataggagggatctccatccatggcccttcctctccttcaattttcacatatagtccaccaattccatcttgtagcaacactgttagggctcccatgtccgagtggcgaccgacgccaacggttagctccggattagggcatgccggatagtaattcatgttcaccattttgagaccaatcatagcttcaataatctctgaggactcctctatgggcactccaagcttagtaatgagaacttcaaggatttttttcaccatgtttattgatgtttttagatactcaagtgacacttccctaaacataatttacatcaactattcatttaattacttaatcaaaataccaaaatcattaattttataattaagtaatatttcacacatataatttagttagacgagccattctaaaaataattagagatttttttatttttatattttaaagttttttttttttttgtatattttaatgaaaattcacgtaataactcacatagtaatcaacagaccaacttaataatgacaattaaaatctacaaaataactcatatagtaactataagaataattatcagaacaacccaaaccgtaaaaattaaaaaaa

SEQ ID NO: 57207 - DNA, 2043 bp, Cannabis sativa
  modified_base (52)..(63): a, c, t, g, unknown or other
  modified_base (112)..(113): a, c, t, g, unknown or other
aaaaaaaaaaaaaaaatttaagcctttattataaagataaatgatatttttnnnnnnnnnnnnaaaaatatgtatattttttaaaatgtattttttttatttgggcccctannatgagtgggccctaggcgcgggctccatgcctagggccgacgctgaaagtagaacctctgtttaagaatactctatttaagaataacttttaatttgttttaaaaaattaagttccaaattacaatacatctataaatattatattgtaattagttatacattttttaagtctcgtattgacaaaatatacctctatataagaataattacatcttgataaaatatatacatatatcttataaatttatttacaaaaaattaataattttattccaaattacaatacatctataaatattatatttactctaaaacaattctattatgatatagtattaatgattgtttattcttattattgttacattgatattttttggtttttttaattttttttctagtataactctatttagttataacatttcaattagaatataatttgtctgtcccgagtatattcttaaatagaggttctatcccatttcctatcccatttatgtccccaatttcctatcccatttatgtccctccaataattaactgccacctatttttttttcacatcatttgcttactttttttctaaacgtttgctctgttagttagttctgtttatttcttaattttcccactcacaaccttttctacattaattacaatatttcttggttttaaaaaaaatatttacaatatatctccacaaaattcaaaatcgtttcaacttcctttatttatatcctacactattaagaaaccatcaatacataacaactaatattaaacacataattatataattatgcaaaactaagttgtttgagctacctagattaatatgcaacattcttaaaaaaaaaaaaaactatcaacataattatataagaactaatattaaaaatattaataattttgtatctaaagttaaatttgtatctaaagttaaatttgtatctaaagttaaatatatatctaaagttaaatatataaaagttaaatatatatatatatatatatatatattatgttttggttttattttaaaacataccaggagtatacataaatttttgtaaaccgcataacccaaataaaactacaaaacaaaaaacccgacaaaaatgtaacctgcccaatctttatattgggttagttaaaaataataacaacctgtcgaatcaacccgaactaacctgaacaacccgattaagagggttcttatatatttatatatcatataagttatatgactatttaaaaaatataaagctcaaactaatatgtttttttttatggtagttgatttgaactttgaattcaatctatatatatatatatatatatatatttgtttcattattacaattaactaaaatataacaattcatgaatgtaaaaatttacaaaaaaattaaaaagaaaatattaatggtcggtttaaacgagttaatccgaccaaaccactaatttcattaggcgggttagtactattttcttttttcttaattggatgggttgcatataaatttttgtaacccgatctttacatttggttgaatgaaatataacataaactgatcaaaccaactaacgtacacccctacatataaattattcaaaataataaaaataaaaattttgatttgagaagtaatactttttttaaaacgaaaaaataattaacataatggcaaattaattattgttggattatattattcaagaaatatagaaaactatagcacacatttttatgtaagccattttcatttaatttttttttagtacaatcattttcatttaatcgaatgagaataaatttaaggagctttttaatttttacacttcataacagtttttttttgtatttttacgaaattctacatagaaacccccattgcaactagcgttgcaacctaaattgtaaca

SEQ ID NO: 57208 - DNA, 683 bp, Cannabis sativa
ttttttttttcaaaatatatatcttaagtaggtcatgaaagatgtggctatatgaaactgtaaaactatatgagtggctcttatctataattccatgtcattcatggacctactgaattttcaaattaatcaatgtttatggatataagtcagacattaagtaaaaagtgtgtgctacaatgttttttgccatgaattgagtgtaaagaaaaatacttgattttgaactattcttcatgataaatgtgaagtattagatcaagacaagccttcacttcattaataatttttttttaattaacatgataagcaaatggatctaattgaactataaaaagtacatactgatttgaatcttcttgatttttaggattaagtactttccaaataaaaattattttctatgtattttacagccaatgcttctttaattattaatttcaatatgaatatgagtgtgacccttgaaattgggacaagtcttacacatattcatacaaattttgtgatctgagttggtatgctctgtggtggggttgggaaatgaagagaaacaaaactataaagaaagattatgatatgaatagaaaaggaagacagtaccatgtgattgcccaatggctaatgcctcctcaccagaccccattgcctcttcactcttgagtctcatctgtcctacagca

SEQ ID NO: 57209 - DNA, 1259 bp, Cannabis sativa
tgatgacattcaggaggatgtggaattttggaattccttgatagtatgctacgttctgggagctaatccacccttgacagttctagaaggatttgcaaggaggatttggaaggataaaatgataaagtaggtatgatttcttatggcatcttccttattagattttttaacattgaagaaatgaattctatgttgaatgggggttatacattctttaacaagcgtcctgtcattatgaaaccttgggatccaaatgtgaactttaagaaggaaaacattcgtactgtaccaatttggattcatttagaagatctggaacttaaatactgggggtagaaattgctgttcaagattgtagggcagattgggaaaccattaatggtggatgcagtgaccaaagagaaggataagctgaatttcccacgagtactgatcgaagtctctatgacacaagaattccctgagttagttgattttgaaaatgactttggttccaatgtaacagtgattatcaattatgagtggaaacccatcacttgtgctcattgcaaagggatgggtcatacagccacggattgcaggaagaaagaagggaagaaacaggaatgggtagtcaagaaaaatgcgaggaaaattgaagagaaacaatcggatcctgaagtgttccaaacagttgtgagaggttggaaggtgaaacctattgttgacgctacagcacctgttatctctaatgcttttgatgctttaggtgtagcagatgtagcagaaatgccctcagaagaaatacaacagcagccaggaagtttgcctcaatcgcaattgaaaggaggaggaggagcacctcctctttccaatggataaaatcttgagttggaacgtccgagggctcaataaccagcacaagcaaaagaatgttaggcgattaatctccattcaacaagctggtttagtgggtctcctcgagacgagagtcaaagccccaaaacttggggctttgtatgtgaacatgttctctagatggtgctttacgactaacatagcttggcatccaggtgggcgtattatagttgcttggaaccctctcaggtttgttgttaacatccttagatgcaccagccaactaatccacttgtttgttattgctattgataacaaaaaggagttctatgtgacttttgtttatggatttaataaagaggaagaaaggaaaggcctctggaatgagttgaagatgcaaatgacgaatgatccttggctaa

SEQ ID NO: 57210 - DNA, 1119 bp, Cannabis sativa
tttttgcaaccaattaaataatagaatgagaaaagctatagaagctttaatgcaggtgatttttacgtggttcgatcattaatgagccttagtccacaagtcttttgtatttatgagagtgtttatacagagaatgttcttgttaaatctctctctatctcttctttaccccctttgattccttaattaatcgatcgaccccttttctattctatctatggggtatttatagtgtttttcgggaggatccctagaaaaggatcacttgtctttaagtgttagcctcttaggggcacaaattcctagcagatacaaaataggaaatacgtgatctatgccgcaggtatcttggggattaggtgaatataaccctttatcctccctgattgatgtgagttttcataatggagccatcactagactcgtcgattgtcgtgtaatcgccgtaaaaaaggctcacgccatctgtcaaatcctcttatggaggttttgatacgtttcctcccatgcgacattaaatgtgaaatgattgttcgaacaaactctttccctctcggagatgccttgctacaattctagcctcccggagagtaaaggcatgtcttatgctctcctctgggaagctcactcgtgagatgcacttctctgcctatgacttaaccaatttttgtaagtggatgttctttgagatctacgtgtcgcacgcagtcgctgccacgtattttaggaaaaatcttaggcaacaatattattatagtaaggtataatacgacaatagtgttgttgaatgtagagataccttattccatagcaatggtagtgctaaatgtaaatgtgcccaggttgttgttggccaatataaccacaagttatgtatgtaatgaccatgatacgataaatggcatgatatagttatttaattgtattatggttattctatgagtatgatataagagttatgatctctacgtatggtattatggtttggattagcatagaggcatataatataactttccatgtataaaattatttacttatagttattagttaaagtatgatgttaaaatacttaatacattaagaatatgacggtattgtatatagttgtattgttgt

SEQ ID NO: 57211 - DNA, 2449 bp, Cannabis sativa
tccgcattgtgttggaagtggcaaggttcttgacagcggatgatttagcttgggaataggagtaagccatcttcacaccagtctacgtggaaatagcattaaaacctgaactagtcaaagagaaatgaaagaaaagtgttaaaaaggacttactcataaacgctccttcaagactccccccaaaactagctccaaagacaagtcattattcgctaaagcaactgtttgttcacctctgggatcgaccggctcacataatggttgagcatgcctctacctctcttggtctctgtgcacaataccaaaggtggagcaggagccctaacttgttcagatccacttctgatcagctcggatccaaccttagcctacttaggtccatccgaactccatcctcgggaacctttggacttggcgaccttcaaggcaggacggtccacagtaggttgctcctcggaaagatcaatgacctcttcagctggtgccttctctttggacggagtctcaccgcccttagacttcttggccggaggggacaagcccgagctccccctactcttttctttagagcctaaatcatcttctgagacatttctgcacgggaaaaacaatacagtcagaaaaaggcataaaatatatgaaggcataaaaattacgaaaaataaatgcaagatgaagtactctgcacactggcaagagcatctgcccgaacaagtacagatggagcatcatcatctaaagaatcttcccgctcctctaggatggcttttccctttccctctgtaggggtagatggccgagcaagtaggccatgctccctgatccggatagtatattctatcagcctctgctcggtcgagagggttttcttcttcttgggcgacctctcctgctctgaatattcttgagcctctttctcctgctcagaatattcctgagcacactgcttggctccagcatcacccttcaacttagcctaacacttaagttgaatgagctccttctcttgctcagctccctcagcccggccagacttggacttcttctttctctctttcataggctagggtataaagtttgtcgaataaagcttgtacttcacaaaattgtcctatgaggtcaacaaagtgatattctgagcagcagccggcagttggagaattttctaggccctttccctaagtgccaatgtgaagggtggatagaaatacacagagatatgttgaaaccgagtataggtggtatccatgccttccacaaagtaatactcgtcaataaagcccccaatcttgctaatctccgtgtccacggtgcccgtcagccacttctagtctggctgagagaagtagaagtaccccgacctgctctggttaggggtagacttcaaatcaaaaatccaattgatgtcgtgaggggaggacacaccccatccttgagaggcgtagagaacaaacagggtagataaatacttaatgcccttgggagtgaactgggtcggacaaaggcaaaaatgatccgcaaccctcttgaagtacgagtgtaaaggcaacatcgccccttgcttagtatgagcacccaaccaggcacagaaccctttctttaggttagttgcccagtgatttagggaagggagataacacttaagtccacccaggtatccagccttgtccaactctctcatttggccctcaattatgttggatggaggacacacccatctggcccctaaggcactttgcctcctatgggggaccgcctgggtaaactcctcagtgacatagtttgccccctcaaccaagatgtcaccctgctcggatactagcttcccaatctcattataccctccaaaaagtggaggcccgaccactccttcctccttagctttggaaggactatcaggacggatatcgtcttgctcctctatctcctggacctcaatgctaccctcgtaatcctcctccccctccatagtgggtaggtcctgctcggcacttggctgcatggcgtgctgggccatgtgagggtcagatgcactaacttttcacattgtctgctttgtgtggaccatcatccttctcttggacaaaaattggtttgtatgttgcgtaacagtaacaggagggacgactattgggataccaaagttaccagaacttggacggccaacgggaaggatatcagcaacactaggttggacaatatatgtccatctagatggaagataacgtctccaacccttctttagttcccaaataaaccgaacgtacccttctcctgcgatttgctcagagtaagaatggtgttgcacttcgggttctcgagtaggagaacatttgctactcacttcccaatccttgaagcttgaattagaaagtctgtcactcgaagaggatggactagcacgaagacgaggttgatcctcatacaaaagttgaagcagatcctggtc

SEQ ID NO: 57212 - DNA, 1267 bp, Cannabis sativa
atacataaatataaaatttaataataataataatacaaattatttaatataaaataatatattaactaaaatttaataataatttagcacattattagagtagacttttaataaagtgagttataatttgtgttaacacatatttttgttaatcaaatatataagtttttttttttgtaataaatttatgacaaaattaattattgtaataaatgaacaccatatatttttacgtgattttgttgttaaaatttacgtactccataagtccatatatttacaaagtacaataatctcaataaatattatatctagctttttctctcaaattgatcgtaccttttaccctggattctgtctttatttataggtgtatagggtgacagttattccattagatttaatcatttgtaactattcataaaatgcagatattcctcacgttttatttttatgcacatgggataatatttaataatcacccaactgctcttttgtcattatttcttaagcggttatgctgactatgttggttgttcctcgctaagtgtgagttgtctttctttactatctttataggaaaaatgctaagtatagatacaatgctcatcacaattttctctttccattatgatattagtgagatggttacttcaacgtatggagggcgagatggatgaatgtagttattctctccatatacaaacatgtggatcaattagttggaagctcttattctcaagtatgtgggtcaatgagctacgagttcttattcccaagtatgtgggtcaatgagctgcatgctcttggttatctcttcttgaacaacttttattatgtactctgtctatcccgagatggacttgttgtctcaccaatctctacgggtaatagttattactcttacctcgcatctacttacgtgggagcgagtttgaatttgaatatttcatatttctatcaaccgtaatacctcaggcaagaggcaagttatttagattgcatttaataatgcaattattaagctgatccatatttcttttgaggtacacgtgtcagctactagttgttagctgaattttaagtataacaattgccccttaaaaagtgttttttaataaaaaaaaaaggcattttataattttgtacacattattttaattaattacaaaatatgtgcaaaaaaaaaacttataactatttttccatacatttttatatataattaaaaactttttttcaatttttttttataatatatatggta

SEQ ID NO: 57213 - DNA, 1254 bp, Cannabis sativa
ttttttaaaatatgtatatatagataattattattttaatgtaaaataatagtaatttaaaattttaatagataaaatatatagaatataattttaaacaaaattaaaattttatttgtacctacaatgttttttaattttttatttgttattttatttattttaatttatttttaaagatataaaacaacaataatttattttattttattgttggttatgtaatttttttaataaatattaaataattcaatattgaaaaggaactaatttaaataaaatttgagctaatatgcagattgaatttaatctaaaatataaaatctacacttagtgctaatcaaattgtatataaattattataaaccgctcaacccgaataacccgcctaatttgaataactggcccaaaccaaaccaagatacacaataaaaaatacaaactaaaaaatctgacgaaaatataacatgccccaactttatattagacagattaaaaataatactaacccaacaaatctctctaccaaccctattaaaaaggtttatatatgtatttattatatatttatgtgtcatggctatttcaaaaatttaaagttcaaactaatatatttcctttacggtaattaatttaaattttgaatcaaatctatatatatatatatatatatttatctcattattctaattaactaaaaaaataattgaatgtaaacataagaaaattaattcaaaaatattaggagtgagtttggacaagttaaccgaactaaaaataccaattttattatgctaattactatttttgttttttttttaattggacaggttgtatttaaattttttgtaacagtagcataaaccgaccaaacaaaaccacatacacgccatgtattatgagcaaaatagtatagattgaattggataaaacgcaatactactactcctctttcacataatcttccctacatgacacgtgtagtaagttagtctgtcattctctctccgtgaacgccaatcgtatgtattacggcgaaaccaatcgctcaccgtctcgtcattttagcgtgatcaaagtctctttcttctccaccgaaaacgctgcgttttactaaaatacgcattctctaataccaaaaaaagtctcttcttctcttctcagaacgctgcgttttgctaaaatgcgcactctctgattcttctatactttctattcggcaaaaaaaaaaaaaaaaaaaccagacttataaat

SEQ ID NO: 57214 - DNA, 936 bp, Cannabis sativa
ccctaaaaagcatgtaaagacatttttatttataaataaaaattaatattttgatacatgtttgactgttaaattattaataattaattttgaataatctatatataaatataaaaaaatttcattcatgtatgaagttgtgacttgtataatacgtagaattaagatctcttagccataaataaaaaagtcaacatcatattaaagttataaaatctttaactaacggttgctagtgtagttcactaacgctcgttattcggtgcaagcaatctcgatttagattgctgatgtagtatgacatctaagtgaaggtgctttatataatagagattatatatgacaaggaccgatatataattaaactgtctttattaaacatatcatttactataaagattttattcatatcataaaaaaagctaaaattttaaaatctagctattttaaagcaattattgagagtgctctaaattataaataatataacataaacatgatcatattataaataatagaataatttgcggtattaatacttaagtttaacttctagttataaataaatgtataagtttaatttttgatagtaataattcctaagttataattttagaacttccgtaggtacttgggttttaagtgttaagtaaattaacacgtgacaattcttgattggtctatatcattaaatttttattttttctttaaaaaaaataatttaactataccaataataaaataacacatgaataatgacttaacatttattggttaggtacatacataattctagaaatataatttaagtattattactgtcaaaaattaaattaaatatttatttacaacggaaaattaataaattactctaaataatataacacatgctttcttctcacaaatagaatgtggcaaatacaattttctttttct

SEQ ID NO: 57215 - DNA, 1793 bp, Cannabis sativa
  modified_base (39)..(40): a, c, t, g, unknown or other
  modified_base (1049)..(1083): a, c, t, g, unknown or other
  modified_base (1474)..(1484): a, c, t, g, unknown or other
ccatgcaacataaaatataatttctgatctttattaatnngtaaatttgattatattgaaataaattttatttaggacacaaaatccaacactaaattcatccgataacatttggtgccatctgcgggaagacgtatttatgaagatttttggaagagaatcaagatggctacagaccagacaaacgtgaacaacaacactagatctttcaacgttgggacccttcatgttcctatttttggtggaggaatagaccctattgaggtcgttataggaggagtagggcgtacccatgtcactcccctcaatatatttcttgaaacaacaggacatgctagagaaacctcgacaccaacaaccaacaatcctacccttatcaccttcataaccaaaggtgatcagaaataagccatcaacatgcttggtaacagaaaccaggaacctacactgtgatgaccagataccagaaagggttttaatgagagagggacgattataggatcgaatggtatggagtttaagaagaagacttatagtggtagggaaagaggtagatgaactggcatcataggtaaagatggtattttcattaggtggaaagactaaagcattagagatagtgttgagaaaatcatctatttttagaaagaagaaagcacaataacccacaaaaaagaaagctaaagaaaaagaaaatatatgaggaagactatacttgaatctcgctatataaagatagaaccatagccttctgagaatccttctcgagtaatcccttgtcacatccctagcttgcaccatagtagcatcaatgatgagaaaggactgtatagctttgggaacccagacgtccacccccattttacaatctccaaaggtagaatgatgaagagcgatttggaaaatcataacaaagtacaaaactaagacaaaaaaaaaggtaagaaatcaattattttttttttttaaaaaaaaagtaagaaatcaattttatgtacaaattgaatttgagtcctccttcctgtattttaatttattattattattannnnnnnnnnnnnnnnnnnnnnnnnnnnnnnnnnnattattattattataaatattattattaaaaaatgcagttagaaaattatatgattttattatttattttttacaaaaataaataaataaataagacaactgtgttgcgatgtatggggttgactatgtttttattataaataataaaaaaaattattaattttttataagataacccatcataattatcaaataaattactattattagattaagaattaaagtagggatgcacattttctctatggcaacctgcttctaatgagacgagaattttccgtttaaatgagaaacatgacggggacggtgattactttttgtccctgaatgttaaacgtggcagggcatgaatgacactccccgcctcgatggggacccgtttagtattttnnnnnnnnnnnttaataatattttataatttatatgtttgtagtttttttagtataataatatcctttatagattttaagtttaatttgttttggataataattagttaatgaataataattaatgtataatattttaatttttatttaatttgatatttttgtatatttaattttttattataaattttattctcttattaggggatttctcgccccgcctcgtccctgtccctattaggtgattccctgtcccattcccaataaagaataaacaaggatgaaaattaaaattcttagcggggatagagatgaggaaag

SEQ ID NO: 57216 - DNA, 3481 bp, Cannabis sativa
cattatataagtatatagatagatggattatcaaattacaataatttttaatatattgtgtttttttgggtaatctattcatgcttagtgttgtgtcgtttgtttaccaatatctttagaaactcaatataataaaataagaattaagaaaatatatcaaatagaagaaaatagaaatgaaggtttttacgtgacttgggtattaatgaatcttagtctacgaattagttgtattgagctaaatagccttgagaatggaaaaagcttcaaacagattgcatcattacttactctgttcattctgaatgtggcacataactctagaaaattagtgatatgtatatttagatcttcattaggcagcctcctgaacacaattttacactatctgaattatggcagacttgatttcaatgttatttgcctctacagcaggtggacgaatacatgagtgaaccctcgtgacaattgagagtacataatctctcaaaagaatattagcttgagctgcttttttagcattggcggcattggctaaattagggtgatcaaccacattattgttgttattctgaaggttattatctccatgggcaaccatttttttttatttcacctacaagttttttcaattttaggatcaagaggcactagtgactccaaaccttgttgtcgcaaaaacttttattaattccaaaatttaagaagtaagaagcaaaccaaatagaacatgttaaaataaacaaaagaacaaaaaataattaattttgataatagtaatttagtctccgataacagcaccaaaaatttgacaggaaaaaaattataacacaagcatacattttgtttcaagtaataatagtgcataagcacgagtatcgttccatgaaggctattaccaagtactaataattatttttctactttctatttggcaaacaaaaatttaggtaatatttttaaaactaagaaaattaaaataagcaaccaatgattatgaaaattaatgaatgaaacttagggtattaattttatcaacttgttaatttatttattttactaatctgttctacaattttttcttccaattttaatagtgggttaactaaaataaaacctattctttttcaagatataagacttcaatccatctgcaaattttttttagtatttgtaataagtttcaacatatacattaagaatgaaaatcctatttgctacacaagttatacgggtactgtcgctcaatatgtaacctatgtctatataactatagcatattcaactctcacctctcaaatcttgaattgaaatcataaaaacatgcaaatagtgattaagtatttataagtattaagtattaatcatatagattaaaataaagaggacgaaatcaatagaacatcatagcaaaataaaatagaaattaaagtgaatcaattaacctctagataaaaaaaaaattagtgcatgaaaattatattcataaccattacattcataataaaaaataagttcataaacaaaattaaagaagaagaagaagttgatgaaaaatactaagtagttgctaattaagagttttgagtttagagctctgaaaaacgtactaaaatcactaataataatgagtttgtataggctaataaagctccctaaaagatactaaaaatatttggaatttaaacttgagaagataaaaatgtcctcaggagctgcagctcgaggtaccgaagtcgcaactccacttgagaaagtcatctttttttcacgatctttttatctttttttttttcaaatttttgcttaaggagccgcagcccctggtccattctgctatttttcttttctggagccatggctccagatttcgaagccatggtcctgactgactagtttttaatttttgcctttttgctccattcttgctctcgaacatcgccaaactcaccaagataaaaaaaaataactaaatttaagcccgcttttacacaaatttagcttatttctttattttttataatttttttaatattttcctgaaaaaaaaagaaaataagcgtcaaactaaaccaaattaacataaaagactctaaacttctaaactaccctaataaacgagtataaatctcgtttatcgtcaacctggatgctgggtgactggggtgctcaaaattgaaagtactccgattctgattctattgcctcaaatatgttcgtgacttgtctaattcatgtcccagtacaaagtttagccatttacactaagacggatccaaaaactaaaaccctagttgaaatgtcaacttgggctgggacatggttgtaatagcataatgtgaaaataacataatgttttattctagagagatgagtaatttgggaggattatggttgtaatatcccgataagcctaatggtaaataattagggtttataattatactagagaactaatccgcgcttcgcgcggtgttatatattgttaattattttatttgttattatttttttatgtcaaatgaataatataatataatatatagtattgtgttgtgttttaaaaattattgagatggtagattttttagaaataattttcaataataaataatctattaaaagtattaatttgttaatttgatgtattacatgataaatgaaatgagaataatattaaaataagattacctttatttttaacataataattatgtttgtgtaatgaatttcacatggtataataattcaaaaattaaagatgcaaaagataaatatttgtaaatttttttcattgggacattaattttaacgcattgttgaggataacccggccgctagaatgacaacactaacataagtgtagacaaatacccactctataattttgatttcaaagcaaattttgctctcaagtcaattcgagtaaggttgttctctgaagaatagctgcatgttcaccttgattgcatgcacaatcgatatttttttttttcattgtacgacacatcgatgtcttttctctttcaaaaaaaaaaaaccattaatcatttaaaacacatcaaccttatttaaactcatgattccaaaggaaagaaaataaaatagtacaaatgaaaaataaaaatgataagaagttaaatagtaaaaatgaaagaaaaacaaaaaataaaaacaaaatacaaaaaaaaaatagagaagaggaaaatctagactccaggacattcttttcatttatattcaaaaaaccaatcaataaacaaagtaacatctttcaagaaataaaaaattatgcagagtttaataaaaattatataatttaatactcatcgaccaatgtactttgatacccttttattgaaattttgagcaataacatttctatgatttacttctcttccttctcttatatcatttaaaccaaacatatatttttgtcagttttaattcttgaatattgaattaagagaagaaaataaca

SEQ ID NO: 57217 - DNA, 904 bp, Cannabis sativa
attctccccacgggggataagtttaattcttctagtaactgctttgtgtgcctcaccaaccatgaaactccactccatctttttgctcggtgcaaccttgcttctgctttatggttctcaggtcccattcctgtgagaatcgatcgtattcctggtgatgatcttagtgctctgttgtgcaatctagtgtcttctctagatcccatgatgagagcgagaatgcttgtctatgctggggtgattatggattgtatctggaagcataggaatcaaattgtccactctaatggggccattcaatgtgtcgactccattcgtctgaatgtttgtagaagatttgctgaacttgacccggcgtttgatcagatggagcagcatccccggttgtgtcctcctattgaaccgcctcgtgtcgtgacggataagtgcattcttgtcgatggatcttacttgaaagggaattacggatgtgcgatgatcgccgtttcaaagaacttccaagactggtggattagtgtcactgctgggacttgtcaattggccttggaagctgagatgtctgcggtaaggttgggcctgcaatgggcgatcaaaaaccagtgggataatttctcaatcttgactgactctcgcattctggtggaggctttagccgcgaaacagcctccgcactggaagactgctgccttattctctgatattttgcatttgctttctcttttctctacttgtcatgtaatgtttactaaaagaactgttttaacttttgttgatgcaatggctaagtccatgcgactctgtgaaggtcgctggcaggatgtaaaaggggagggattacccccggtgaatcccgatcttttctgggttttctaatagaacggaggttcttttcaaaaaaaaaaaa

SEQ ID NO: 57218 - DNA, 725 bp, Cannabis sativa
aattaatttcgaaaagaggaaaaatacaaaagaactgaaagagagtagagttagaaggtacagaggaacagtgtgagaaagttggggtatttatagggggacaagagtagaagaatatgctggtgccacgtggatattggaggaaagagataatataaaaggacaagtggatgtgcggaggaaggagactggtgcaagttggtgaattgcttttaataataatggctgtctattacccctgaatgaagcagagctagctcatccgttgaattcaacgagggtatcttggtaattgtagaatacagtgaagaagaagaagaaagagtgtgtgaggcccatttagtttgggccttattcaaatttgaacagtggtgataacgctcttacttttgttttttgttttttcttttttgatgaagtctctatcaggactctgttttgcccactacttcctttttagtattatatatatgttttattcataataatagcgaaaaaaagaattttatgtatttctttcttcaaaacattcaaatattcggctactttcttttttacatatgcggcttcttcacatttcaattttaggataatctttattttttgaggaattccaaacttttggaccatataaaagtgaaaattgcccacccaatatgtaagatcatttctattggccttgttagattcttaacagtacaccgatctgacatttttattttgtt

SEQ ID NO: 57219 - DNA, 1028 bp, Cannabis sativa
gctttcggagtcgcagtgttcttcttcgctggtgcagaaggggattttgaagatgacatcgtgaaggagcccttgaccttcaagatatttgcagcagcaagaaagtgttatcaataaaatgttcatttttagttttattttttgtggttaatttagagagattatatttgatttatgttgaaatacattttactttgatgaatttttcttaatttatagtcggttttatatggttgttatggtgctttccaatctagtctggtggtggtggttatgtatgttctcgattaattatcgacagattctcgataggtaatcgacaagatgttgttaaaaaaagtttgtttttagttttttttttgtggttaatttagagagattatatattatttgtgttgaaatacattttattttgatgattttttcttaatttatggtcggttttatatggtagttatggtgtttttcgatctattgtggtggcggtggttatgtatgttctcgattatttatcgacagattctagataggttatcgacaagatattgttaaaataagtttgtttttggttttttttagttagatcaattatacattatttgtgtttaaatacatttcattttgatgatattttcttttaatttatgtacaaggaaaccttaaacatactccaattttaaatcatactccaaaggatcatacattttaattatacattatttgtgtttaaatacatttcatttcatttgtgtttttggcgttctttcttaataacctctggcggaatcattttcctttcatgtacaaggaaaaaatctccaattttaaatcatactccaaaggatcaacctccaactcttcatataaaatctgacgcaattgttgtatggttgtgtcaattctaactattgacgtcaatctgtcttcagctttataaatccaattaaaaccttaaacacaccaaacaccatcgtacgatataacaagaaacacaattgatcctataatttgaaacaacaaaaggttcg

SEQ ID NO: 57220 - DNA, 2990 bp, Cannabis sativa
gactaaacccgagaacatggacccagaccgagacctaggactcggaccttgacctgcgtcttggaaccccgacctagatcggaactcaggactcggacccatacctggagctagactaaaaccgagatctggacccaagccaagatcggaactctgacccagactcggaccaggacttgaaccctgatcgggtcctggtctcagaacgtgacctaggactcgaacctggattggggacttggacataggacacgggcatcaaaactaggactgagacctagaatccaaccccagagccagaccaagacctgcgacccgaagtggaactagactgggacctgagaacgtgatccacatctacactcggggcttggacctaactcgtagtcagtgtttggatctaggacccatacccggactcaaacccaaacccagactcggacccagacccagaccaagacctgtaccccaaacttgggtctgagtccgagtcttggtttgagttcgagaactggaatctgactacgacccagacccaaacctggattgggacgcggagttacatcaaaactcagatcgggactcaggacacgaacgtgaacggagacacatacttggaccttgacccaaaccaggattggtgactcaaacgtaaacccaggacccaaacctagattagggaccaaaactcaaaatttgaacaacaattaggacccaggactgggactgggacccaagacctaaccccggtcttgatcccagacccggacccagacacggacacagaccgggacctaagatctgaattaaaatgagactgggacccaagatttggatctgaatcttgaccaacgacccggggcttggaaccaacccgtagtcggtgtttggatcttggaatcataccatttccagaccaggaactaaaccctgactcagacccgggacccaaaatgggaacaagaaccagaatgaggaccctggaataggaattggatctggacccaaaactggatctagacgcagaaccgaacatagacccagacccagacccggatcgataccaggaccaaggcccaaacccggaccagaacttgctccaagacttgtgacttaggacccgtgactcgagacctggaccagaacctacacccgtacaagaactcaaacccagacccagacctagaccaagacccggaccaagacacagactgaaacccggactcagacccaaacccagacctagacctagaaccaaacctggactagtactataactcgtactcgaacccaggactaggaccagactaagatcaggattgggatccaagcccggattgagatcaggatcgagtcctgaacctggactaggactagaactcagactgggaccgggactgggacctaggacccgatactcagacctgggacctgagaaccaaaccgtgacctagacccagaccaggccaagacccgagacaaggatcattactgaacacagatcgggacctacacgcaaaatgggaccctaaccaagaccgggaacttccactttgacttgaatcggggaccaagacccatgactttgacctcagacccgaactaggacccaagacatgagctagaactggaccaagatttagattttgacccgaatcaggacccaagacccgaggcttggacccgacccatagtcggtgtctaatttagggaatttgacctcgaccttgacctagacccagacaaaaaccaaaacccataccagaactcgaactagactcgacatgtggttggagtttggattggggaccaagactcagacgtgaaccaaaacatggacatagacccaaaccaggactcggactaagacccacacccaaaccttaaatcgtaccttgtgactcgaaatttgaaccgaaactggaagtggaccattaaaccctaaaccctaaaccttaaaccctaaaccctaaactctttacagttacccctaagacctaagccctaaatcctaaaccccaaatccctcaatgctaaaccaaaatcctaaactctaaaccctaatctggacatgggcctagacagatacccataccgagattggaacccaagaacatgacccagacccggatccaaacccaaacctagacctaaacccaaacccaaacccagacaagaacctggtctgggatctagaccttgagtgggacccggatcgtatcccagaccaagacacaaatagggacttggactcagatcgagacccgtacccaaactcaaacttcaacccatactgggacctagacttggacccaaactttggagccaaactcgaacctgaacttgcaccttgaccgagacctaggatccggacgtagatgggggacctgggccccaaacccgaaccttgaccaagatttggaccaaggatcaagacctagatgaggcacttggacctgaaactaggccctaaaaccgagacggagaaccaaaacttgaccctagactcgagacacggcacgtgaccttggacccaaaactgaggacctgactacagggacacaaccccgaacccagacccaaacacaaattaaggacccagctgaagacccaggattgggactggaacaacaccgagatccaagactgagatccgaatttggacgtaaggctttgacctaacccgtagtcagtgtttgaatctaggacacagacctggatccgtacctatacttggaccgtgaaccagaccgagatccagacccagactcagacccagaccaggatccaaacccgattttggacccagacggggacttgtgacgtgtgacctaaaccaagagtgggacctaaacccagaccgagacccggacctagaccaagaactgggctggaacctgaacttagactcgaaccctaactaggacctggactcggaccagacccgaacccaaaccgaaacatgaacttggactcagaccgggacctag

SEQ ID NO: 57221 - DNA, 1942 bp, Cannabis sativa
  modified_base (43)..(66): a, c, t, g, unknown or other
  modified_base (1077)..(1083): a, c, t, g, unknown or other
  modified_base (1217)..(1223): a, c, t, g, unknown or other
aaataaagatatgaacacagggtttttacgtggttttgcagtnnnnnnnnnnnnnnnnnnnnnnnncaatcttattcagatttctgattgctttttttaggaactcttttgtatgcattttttcgtcccttttttttttatcttgtttgtcactatttataattacatagtggacatttaattacaaagttgaccggaatatgtttacaacaatcatccctaaaatcatgggatttgattacatattacgtagtgtaaattcggtttatgacttgaaaatcatatagctgtgatttttccacttttattgggtcaaaacaatcgtgtattaaacacgtctttagctgttgtatctggagatgtctcgacagaaacttagttccagtgatctcagaagcgagctgggaccattcttccttccgaggtcaacgatgtatgtttggtgtcgatcgcggttcttatcctcaaagaattctccgaggctcacttgaatgatatcttctggctcgccaagattgtaagcctcgctgacgctaacgggatgaagttgcattaagtctttctataacgagacagtcatctcgcttacttgttcttaagccgatccgacttttacacttagtttgttcattgtatgctaaggactttcacgattgatgcgtgtcgctttctttggtgcctcgctattcgcacatttagcgacatattgttttcttgctaatatactaagtgccagtttgtacattgattcctcgcctaagaccttacagttagcgggttacaaatatactctgacacttacgtaattaaatgagttatttcacataaaaaaagcaaatgacatcgattcacattccctttatcgatcttgacatgcgtcctccagtcgaatttcgagtataacatatatcattcaccaaagcatatatactaacaataataataataataaaaaacatatattactaatgcatatatgtgtatactatactaaccaaattatataccacaactaaaataaatatatcatgacaacaaaattatatatcaccgttgtatataataaaatagaaactnnnnnnntattatttaaaataaatatatatcataaaatatataaaaaataataataaatatatgtagcatgctaataaaattatatacttacattaaaatatttgtattatgccagtaaaattatataccactattatacnnnnnnnaataaaaaataaatatcatttaagaataataatatactatataataaaatagaaatatactgtacaacaaaatctatataccaacaatttataaaaaattaaaaaaaattcgatacaactttcaaataaaaaagattttaacaaaactaatatagatataccataatctttaagtaatttgcttctaattctaaaaataaaatatgaaaaaaaaaaaagttttgatttttttatgtggcaaataacaatataaataatgaataatttaaaatggtcattttgctacaagttttgaaatgagcacatttactaacatagtcctatgatttggggtcatttactataattttttttatatatactatgttgatgttacgtgcaatgcacgtatatttaattttttttttaatgaggtttaattaggtaatgcattttttttttttttgaaatgggctttgagattttaatctttgaggattttttgttagctacattggtgtgccctttgaatgtgattatatatatatgtattttatatgtacaataaaatctaagtgagatatcgttgtgttgtgtgcctagttgagcggaatatgtcttttgttttaattcaaagttaaattaataaagtgaaaaatatttataatatttttaagtattttaaatttaaattaattttttatgtaaaatatttccataatttttatttttaaatatat

SEQ ID NO: 57222 - DNA, 743 bp, Cannabis sativa
ttagctatgtggtaggctgactttacagagaagataccagagttgtcttgggtccaaataagcgagtcagttttttgggggccaccaattggaattttgagaatagttgagaccgagtattcatcaaagtattgctgcagtttttccctatcccaaaatccagagttgtctatgaaaaaacttaccttatcatcaggaggttgatcacttgatcactgcttctcaattttttttgcaatgaatactttacgtacaattttgattctaagacaattatataatttagattagtattattataaataatcatattaaaaattattttgataaaatcgaggataaaatcaattttttttttgaatgatttgataaaatcgaggataaaatcaattttaatacaaagttaaattaaaattatttaaaatccattgatggaattctataataaaatttttcttaaaaattattattattatttccaaagaaaacaaacaaatctaaggttataagtatttacaagatggaattagttagtcaatagggaggtaaaagactcttctaccaactatagactttccaccgattgccaaaaaaaaaaatcaagaaatttgtattataaatagagactattggctgggctacacaaacacagcagaagattcaaaacccgaatagttgaaattaagataatggcagaaatagtgaagctttatggtgtcaggggaagcccttttagtaacaga

SEQ ID NO: 57223 - DNA, 1067 bp, Cannabis sativa
atatatatatatatatttgataatattgcaaacttcattgattcaaatcattcatcactaaagatgcaattacaaagggtagataaaaactattaaaagtacaatcagcctcataaagagaagatcgtgcaaaagtatgtgtaaccttattagcagatcgtttaacaaaattgaaagaaatagtagtgataacaacaaataatgacttacagacagacaaaatatggctataaggagaagtcatatatttaaaactttgtaaatctctattgattcctagacaatccgactccacaacaacattagtccacctattagtcatgatccaactcaatgcttctttaattccaatcgcttcaacaatatgtggttgtaagacccttactttattcattgtcttcgctgccagtaccagaccaacaattgtatgagccactaagccaactccaaaccgtcgctcgtgctccatcaacattaactttaattgtaggaaattctggggggtccaatgctcaataactaccacatttgaaacaccatcatttatagtagcaaaatcttatttttgagcattataccattcaataaagtttagtttagctaacgaaatcacctccattacatcaagttgtttggagttccataccaaattattcttgagcttctaaattgcctaatatatcattgcagcttccatgcaatcagctttgttccaaaattgtaaaccttctttaagccatcctacaaatgtcactgcatcagcagaaaccacaggcacataagaggcagaccagcaaccttgagcaaaatcatacctcaccaaaacatgaatggttgtttccggagctgtaaaacaagatgaacaagtagttataatcgacacatgcttgatgtgtagctgaaatcttgttggaaggcaattcgtggaggctctccatataaaagattggactttgggaggaatcttaagctgccataatttgttatctcttaacaccttatatatgttatattattttataatataataagtgtagattaaaatgtagtaatatatattattatgt

SEQ ID NO: 57224 - DNA, 1822 bp, Cannabis sativa
  modified_base (474)..(476): a, c, t, g, unknown or other
acaagagttaaatattaagaaactaagaaaaagggaaactaagaaaaatagaatgttaattacattaatggtaataaataaaaaatttgtacatctacctaattaatactatttataacatatatgaatatatatatttatatatatttgagtaatattagacacactttcgaattgcatttattacatagaataatgtatatttaatattgaccatttatatttttaagtatgatcatattattttttattatatagtggagattaattacacatcattgtgattgtgtgtaaaaaatgtatgtaatttgagtgtgtgccaatcatttttcatatatcatattattcttttcgatcctcacaaaaaaaataaactaaaaaatactctcaactttcacctttcatgactgcgtagatcgtttaaattacttgtttacaaggttatataacagtgggtttatatatatatatatnnntatatatatatatacatatgtttgattagttttgtgaaaatacaatatttgattaggctatcgatgaattagatcaccaattatttgtaacaaaattgtaggtattaaaaaactgaaataactgacagactttaataactaaaatatttaaaaatatataatatatgttatcttaatctgtttgccccaacctatagattctaaactatatactaatgatcatcaatatgtagctagctttgattatgcttacttgcttgaacgatggctttaggcttatattatttaattagttagaagctacgtactttttttttttttaattataatcttcttataataaccacattgttaattacgaaattaatatttaattatagagtgatatgtatttagagttagggagtggtgtgaagtatgataacttgtagtagaaagcaaagacagaaataaatggtaagagtttcagaaggtcatagggacagagactgatgcaaatgatgatgatgatgatgatcaccagtgatgataatgatgaatatctgaggctgaggaatgggtgcatatagggttttcatcaattgtacgcaacaatttgtgaatggtcactactcaaacacctgccccagcttaattaacaagagctcagcctatatttataaatttttatattattttttttggagtacaatgttatatataaatatataatttgttcccaaatttaaatgaaatgagaattgctatagtgccacaagcatttgaccttgtcggcctaaatatggcatattaatttgtctatctatctctttgttaatagcttttacttgtttatacaaaacaccccccacatggtaaattcagactagttatagagatagaatatatttttttaatccatgccaggtcccattactgtatgtaatccacttgactaagttaccctactactatgtatactatcccaaaagaaaaataaaataaaatctgatttgaaattgcatttaatgtcaatggaaatatttacaagtgtatgccatattaaactccaacaatgtcatgtataatatctatatacatattcggattctattatttaacagagatgtgatatactattggatttttcatcaaccacttaagcttagcttaagtggccataaagagatttgaagagtttatgtaaaatactaaaatcaaatttcaaattgtgtaatgtaagatatatatatataaacgcttcagaaaaaaaaaattgattttgatcttttcctctaaaaaaatattggatatatttatatactatttgatcttaatttaaaatttatactgtcatgaaatctttg

SEQ ID NO: 57225 - DNA, 728 bp, Cannabis sativa
ctctgaaccaaccagctatcatgaagcagtgggatagcttggttacaaactatagatgaggagaagacatctctagtgaagaacaagaataatggttagaaaaccataaggatgcaaactggtaggctgcaagtggattttcaagcacaaagagggaactcctggtgttgaagccaccagattcaaagcaaggttggtggtaaaggggtttacacagaaagaaggtgtagatttcaaagagatattctcaccagcggtcaaacaagtctcaatcagggctataatggccaaagttgctagattcagtctagaagttgaccaaatggatgtaagaactgctttcttacacggggaacttgaggagcaagtctacatggaggttccagaagggtttgacaaggaatatgcaaaccaggtctgcttgctcaagaaatcactctatgggctcaagtaggctccaaggtagtgaaatctcaggtttgattcctacatgatcaagataggattcatcaaaagtaagtatgatccctgtgtctatttcaatgatcacatttacttattgccatatgtagatgatattctaatggttggaaaggaaaaatcaaggttgaatgatttcaaggtaaagttgaatgaagagtttgaaatgaaagaccttggaaaggccaaaagaattttgggaattgatatacacaggcctactaaaaattgtatcactctgtcacaaa

SEQ ID NO: 57226 - DNA, 1293 bp, Cannabis sativa
cacaagggtttaattttaaagctattttatcttttttttaatctatatttaaaccctaatctaaccttaataagtacagtataaatagataattataggctcttatttgttagatgctgataacctaattttactttgtcagacaaataagagagctcctataatttttgaattcccttctcttctcccctcttaaatttgtaccctatagtgaagagagtacatgtctacacatatcaagtcaatatattgtgaagaattccatcacctaagaagatctaggtttagatcttggtaatactttgcgacagaaaggaataagggttaaatatatgaacagaatgagccattatattctgctgtcactaatgtaaggttttctataactttatatgtatttatttcattattttaggaaattcatgtttaggatgttagattatagattataatcaaacatacatgttagtaaatttaaatcatagtcaaataagttccaacaacaacaagcatattacgacgatactagatttctcaagaattaaagtaggaaaacttaattagagcgacagtaaaaatacataaaagtccaaacttggagagatgatgatacacacaaagctagccatactcttgaatatgtctcaaagaatcacaatcccaaagagcatgatgaacagtctccaggcctttcaaacataaagggtaagaagtagccaattgaatatctctatacactagattgcaaaaagtagacaacaaattatgaccaactttccataagaaatgcttcactttaacaggtaagttcaatttccacaacttagaccataacaatgtaccttcattagatcctgaagccttacgaatcccatgctattaatgaattaaaatcataattatcacataaattataactataatataaaaaaaaaaccaacataacaatgagattttatttaagtataaaagaagaaatttttaaaaataccattgttaaattcaatagaaggaaatcatccattgatttttatttgtgttaagataatacatataaacgagagtgaaaacgtagaatggttaattttttgaacctgtttcaaattgcgagaactaatagcctaatggcagtcgagcaagtatacccccatcatgtaaccatttaggacatctctcttctaaggataatacaaataaacaacaatgaaaatgcaaaatgatgttagaattaatattatggactaatataatcctgataactctagaaattagagttatctttcacattttttt

SEQ ID NO: 57227 - DNA, 3121 bp, Cannabis sativa
aaaattctctttcatattaataaaataatataatttggtgttgtgaaattcactcgacaacaactactacaatgtaagcctttaatttcctctttttcaacccaatttataaaaacggaagctaaagggggtgaaaatatctgcattaggtttagtagcttatgcttagcattaaaacttctccccataagttcttcgtgctagttcgatgcattgtacgggatgggtgccccccaagtgacgatgcaaacaagtttattggtaactttctattcatcaagtttcacagaccttgcatgggttctttcttagggtgttatccaaagtacgcttgtggaactgaaagagtaactttaagaagtcaatcttgtgagcaagtggtttagacacaagaaatagagcataaatattcttttttattatttaatttgtcttttttgctgtgcaacttacataaattgaatctacaagcttacgttacacaaatttagcttatagatgtcaaatggctaccccttcttgccttgtagagcagaggccaccgttgaagaattgtgggagaccttgccaaaaaggccatgggtactagatcgtttttactctaatgttgagtaggtagaatttctactttggagtagtgttctgtaagctggttactgatagtatttgcaaaagttctctccattctagtatcttggtaggagaacgagctccatgttctcgttataccttcccagcttgtaggctcccttactagttatcactataacttgataggggccctcctagttaggtccaaacactcttgttgctgagtctttagtgttcaagaatactcttcggaggaccaggtctcctacaatgaatgatctgttcttgactagcttattgaagtgccttgccaccttttgcaggtaggcttgcagctttaggttggcttgatttcttctttcttctacatcgttaagggactctgccaataaggtgttgtttgtttattggtcataggttgttcttaggtgagacgatggcactagctctacaagtaacatggcctcataggcataagctatagcaaacagagttttcacaagtggttgtcttctctgtagtcctatgcgaccataggacctcttggaggaattcaggctagttgcattttgcttgctcaaggtacttctttaaggtgtccttagggttttgttgatagcttctacctgctcatttgcttaaggataggccacgacaaagaagcttttgatgattccatgcctgttgcagaaattagtgaacatttcactgccatactgcttcccatattttgacacaatcttctagggaagtccaaatccacatatgatgttcttgacacaaaagttaaggactttttttgaggtgattattgtcaagagttcagctcctgcaaacttgataaagtagtctactgtgacaataacaaacggtaaccctccttttgcctttgggagctaacctatcaagtcaatcccccatactatgaagggccaagaagactacatcatcatgagcttgttgggtggagcttttagaattttttagaatcttctaagataggctttgtcccctagcatggttaccgcagaagccttcatatgtttctatcattagccagttgacttaagctttggtgacacacctcaagagaggcatggagaagctttgtgtatacataactctatctaggattagatacctggcagtttttcttcttagcttgtttcctacattcttaccttctagcaaggctcttgtttggaggtaatttgtaataggtgtcatccatgttggagtgtcatccaacatgttgacttcttttgggatggtgatgctgggttcctctaggaactgtattgacaccaaaatttccttgtcgggccagacgggccagtgcatctgctataacatttttgtctctaggtatctacttgattgtttagcctttgagctgaattagtatgtctttgatttttctcaagtaagccaccattttttcacctcgagcttcgtattcacctaggaattaattcacaacaagttgagaattactaaatacgtcttggtgctcagctcgtacttcatgcgccagcttgaggctagctattaggggttcgtactcagcctcattatttgaggctttgaagtcgaatttgattcctccatgcagctgttgtccccaagtgtaataaaggcaatgcctgcacgagacaattggtcagtccagcttccctcaacatggagtttccatgtaagtgcttcaagattttgttgttgctcttgctcttgcttcttctctagctcttgattttctaatgaatcttgacaaatttcaagagatgagtttgtgcactaagccacaaagtctacaagggcttgaccctttatggctgctcttggttgatatgtgctctcaaattagccaagctgtatggccgatttgcgtagccggcctgatgcttcaagttcctgtaaaacttgccacaatggttgataggtgtacacctttatgaggtgtgcctagaagtaaggtcttaccttttgttgatgtagtatacagggtgctgtataccgtcttcttcatttgtaaggacagcactcacagcatgctctgtgactactaggtaaacgcctagctcttcattgtctaagggtttagacaacacacgcggttaagccaattgtttctttagctcttggaatgcattttcacattcctctatccactcaaattttttgttacctctgaaaatgttgaagaacgatacacatttgtctgtagacttggacacaaatctgcttaatgcaacaatgcatcttgttagcctttgtacttccttgacagttgtgggggacttcatgtccaaaaggtcttggatcttgtctgtgtttgcttctattcccctagcgttgactatgaagccaaggaattttctagagcctatactgaaagaacatttaagggggttaagtttcatgttgtagctgcgaaggatttaagcattctctaagtcctccacatgcccccaatcctttatggacttgactagcatgtcgttcacatacaccttcatgttgcagctgatga

SEQ ID NO: 57228 - DNA, 895 bp, Cannabis sativa
  modified_base (822)..(839): a, c, t, g, unknown or other
taaatttaaaaactacaaaatagagaaaaatgagattttgaaaaatgtaataatatttatgtggtatttaaatatttaaaaaaatatataacaaataaaattaatttattttttattaaatgattgattagataaattattagatttttctccgtttattttttgctaaaattttttagatcatattataaaattataaaaataatatatatgtataaataaaagttaaaataaatgattatttcttagtctatattaggacatgattttttaataaataaaataataatcatgactatttattttgctaaataattgtaagcatatgtgttatgattttgttttagagaattttttttttctaatatatattcaggtttaagaccatctccaataacactttaaaaacttatatttaatgtaatttttcccataaaatgcttcaatattattttttttaattaaatattttacttataaagtaaatatttttattatattaataaaataacattataataaagaatatagattttagtgttgtggttagaataaaaaaaatgctaaaatagtactcttttagttttaatttaatactatatttatgttttagcattggagttgccctaactaaaaaatagtaggataattttattgtgatgacatagttgtaatagggtaataatattatatctagttattaagtacaaataaagtaatcctaaaggatgatatttgtcactaaattatagaaagagtgcaaaagagagtttccttagtgttgtgaatattttactaggatatagatttactaacaagtannnnnnnnnnnnnnnnnnatatgaatatctctaaaataataaaattaaacacataagagttttagaaaacctta

SEQ ID NO: 57229 - DNA, 1051 bp, Cannabis sativa
  modified_base (1017)..(1024): a, c, t, g, unknown or other
aaacatgcctaataacaaaccaaaaagataaaatagttgtttattcataaatccgaccacaacacatgtattcgcagaacttacactactacaaaattagcttttcccaatagattaaaactgtcattcatattattcccaacggttcctaaaattgttggctatgtgggtgtcataaaaatgttgaactttaaaagacggtttataactgttggaaaaagtaattttaaatgacggtttataactgttgagaaaaattactttaaatgattgtttacaattgttggcaaaagtatttttttttatttattttatttattttttttatttctgctaatatatttatcttctatttaatctaattttatattattaataatatattattttcttaaatagttattaacataaagagaatcttttcatcaattaaattttaacaaaaaatatgaattttatttacataaaatctgaaaatctgaatactaattaacataaaatatgaatgttatttacaagcaaaaacatacacatttactttaatctaaagagaaaataaaatcagaatacaaaatcttaaaaatttgtataaacacacttggaacaaaaaatcctaaaacaataaaaacaaattagatctagtttaattctcaaaaaaaaaaaaatcagatctaacttataatggaaccgcgccatcagccacaatctgcaaaccaccaccgtcagttacaaaccccgaaggagaagaggactttctgaacatccaccgtattgaaggccgttgctggagaccggagttacgaagggttcttgtccgctggtggagattgaagactgaagaagagaaagacggatcgagaggggggagttttagctgccgacaatgacgatgaagaagagaagtccgctggtcgccgtcggggtacacgcagagagacaaagggagaaggagaagaagggccaaaaaaaatagtggctgctaggaagagaatgagaaatgtaaagcccgcttagttnnnnnnnnaattagcagttaatcatgattatttat

SEQ ID NO: 57230 - DNA, 836 bp, Cannabis sativa
ataagacccccactcttccctttggcttccaccacaaagcacccttcaaaacctaacttgacacgcaaagcttccgcacgaccattgttaagcctcgattccataataaacaccaactgaggagtatgattgatcactagggattttaagggtccaagggttccccaacccttggacgttctagatcaaggtattcattgttgtaggcgaccctgacttgcagggttcgcctcttccatagctgtagtggctgctgaatctcgaatctgagaaactgtctccaccgtacctccattcttccccttcttagcttttgaatccttcttgaccgacactttccttctattttccttagataacattttctcccctatcccaaccacgaaagaagaaggtccttccataaatggtatgtcttgagcatatgttattgggacattgtgtaggctgttaatctatgcttctaagtctgcctgtgtacttgttttttgttgcttgccttgccatgagatgccgtggtcatcgatcaatcttctcttccctctcccactttcatcatcgggccttttctccttttccaattccaccatacctcctgtacaatctttactaatagaagcctctaaaccgtgcccctctgttgtagttttgtgtatcaagtcggtcttagaagccagttcttttaacatgttgtctacttgtgttgtagtgacatcaagcgaggcaaaggaattggatattggtattcttttttccaatcccaacgtctcctgatgagcttgcttttcttttgaactgtgatttccttgatctgactttccatcttgaaatccatc

SEQ ID NO: 57231 - DNA, 1728 bp, Cannabis sativa
  modified_base (392)..(397): a, c, t, g, unknown or other
  modified_base (1121)..(1133): a, c, t, g, unknown or other
  modified_base (1418)..(1420): a, c, t, g, unknown or other
ggattggtcggaagctcctcagccgtggagtccatcgtttccagctccggttgaagcttggagtctgtaggaagaaatggaaaatggttggtgcatttgggtattatgagtctggaaatataaacttctgaactcagaagagacattttggcaggaaggaagtaatccattctgaaaatggatttcactaaagaagccagaggtttatgaaaattgacaggcttgagcccccgttttatacacaaagttcagtgacaagaaagccaaagattgagaaatctaacggctaggaatcgtccagaatatgaataggcgattcataatgatctttgaaactgtaaaactgctagaatcaaaggaggcgtcctttccaagaaaggattttggcaaannnnnnctccgtaattattaaaaagcttttttactaaaaaagaaatttttaaggagcaattgttatacccgaaatttagctggaggacacatgtcaaggtaaagggaatgtgaatcggtgcaatatctttttatagaataactcattaattgcgtaagtatcagagtatatttgttactcgctagttgtaaggtctttggcgaggaatcaatgtacgaactggcacttagtgtattaacgagaaaccatatgtcgctaaaggagaatagcgaggcaccggagaaaagtaacacataccttagcttacaataagcaaactaattgtacaagtttgatcggctcgaagaacaagaatgtgagatgaccatctcgctacgaggaaacttcctatagtttcctccaactaacaggagcgaggctcataaccctagcaagtcagaagaattctgtatactcgcgatcgacgtaagacatatcttgtcgacctcagaaagaagaatggttccagctcaccattgggatcactacaatcaagtttctgtcgagacatctccagattcaacaattaaaggcgtttttaatacacgatattcttgacccagtaaaagcgagaaaatcacagctatataattttcaaaatcatacaccgcatttacattttatgaaatataatcagatctcatgattttagggatgatgactgtaatcatattttggtcagctttgtaannnnnnnnnnnnntgcaattataaatagtggcaaacaatctcaaaaagggacgaaaaaactcttatggaagaggccttgaaaaatactcagaaatctgaataagattgactcgtggattatgcaaaattttaactacaaaaccacgtaaaaaaacgtagtgttcatattttatttttctatagcttttatttttatgtgttgaattatcatcgtgagtctcaaatatggttaacgaaaatttacgttaataataattatccttttaattaagcaattatctaataatatatttaattnnnaattaaaagataattaacttaatttgatttaaaatatttaaacttaataaaataattaaaataaaattattaatcatggacctttatatgtcaccctacccgtgtagaatgggcctacaggtgtgggtcatattttaaggtcaaaaattaatttctcaattttgccacaaataagagttattatttattctactaataaataataattgattaattctcattaatatcttatttcacaaggattaaaataaatattattttctttaaaataatatatctctatttaatattatatttaactaattgat

SEQ ID NO: 57232 - DNA, 1298 bp, Cannabis sativa
gtaacagccatacacatgaagtgtcactatatccatttttttcttttttattaatatttttggagctatagtgatacacaaaaaagtcactatacttattcatttatttattttaataattttttgatatagggtaatttttttattttaatatttatttatttatttattttaatgtacttatatatcagatttgttttattttaatattcatataaaagaacttaaaaagtttatatatacatttacatttaataattaaatattaatttacagaaagaaaaaataaaaaaaaataaagtaaattgaataaaaaaaatattagtttgaatcaatataacataagtattgttcaatacaaattttttttattgaaatatttataaaacaacgggagggggtattaacacttagatgaaaataaaactcaaaaatgggcatgaacaaatctgtaaaaaaaataaaaacctaaaaaaaaaaatcaagatcacgattatagtagtccaccgtagacaacataaccctgacctccatcaaccagaaactcaaagccgctgttggaggagagggattcgaaactctagtgaagtaaataggacgactttacaaacccccaagcaccggtcattcccctgcaaggaaatagatgaagaagagaagttaaagacttcaaatctaccgttaaaaatgaaaggaacgaaaacaaaatttgggcgttagactgttggcggtgcccatttgggcgttagaacaccggagaagcttcgcccggtctagcgatctcatgatcgcagagagaatagatagagaagaagggggaggtgctggtatttggtgtcgtgcgtctgggctgttggacgctgccaacgggagagaagaaagagacaggtgagaggtgatgtgtaattagggttttctcctgaaaatgatatatatatatatatatcactttaaataaagaaaaaaaatctggtttgatttgaaagagagagacgattgatgggtcatttatttatttatttattttttaaaaaataaaataaaagaatagcattataataataggttttttttttataagagactatatagtgacacgcattgggtgtgagaaaatgtgtataccaacacgctatgcgtgtcactaaagccacgtgaacacgtggctttagcgacgcacatagcatgttggtatacacatttacatacacgcgtagcacgtctctatgggccatagttttttttttattattattattttaataaaattataaattttaggttttagtatttagtga

SEQ ID NO: 57233 - DNA, 1003 bp, Cannabis sativa
catcagaggctagcgggattacttcaacctctaaagattcctaagtgaaagtgagaagatataattataaattttgtggttggattaccaaggacaacatgattttatgattctatctgggtgatagtggatcgatatacaaagtcaacacacttttttccagtacgaactgcatatacagtggatcagtacgctgatttatatgtcaatgagataatttgactccatggtgctccaaaatttgattgtctcaaatcatgatccaatggtcagtacaatggtcagtttgaaaggactattaagatattggaggatattctatacgaatgtgtgttggactttgaaggttcctggaacaagtacctttccctgattaagttttcatgcaacaatagttatcaaattattatcggcatgacactgtatgaaatgttatatggaaggaagtgttgttcacctatttaatgggatgaagctatgaaaggagatatcttggacccgaagcagtctagagaactagtgaagttattgagaagattcgagctcgtatgcttgcctcacaaaatagatcgaaaagctatgctaatctgaagcatatggatattaaattataagttggggactttattttccttcgggtgttaagtatgaaggggatttagagatttggaaggaaaggaaaattaagccctaggtttatggtttcctttgagatcctggagagggtaggtcaagtagcctatcaactagctttacccctactttttttgaagttcacaatgtgttccatatttcaatgcctagaaaataggtttctgacacgacccatattctaagttatgatgacatcaaacttaagatggacttattgtacgaagaacaacctattcagatcttggataaaaaagagaaagtgttgcgaaataagactatttttctagttaaagtgctgtggaggaataacaagattgagaaagcgacttgggagttagagtcacagatg

SEQ ID NO: 57234 - DNA, 2056 bp, Cannabis sativa
acttttttctgcataccacttaaattaatctaagtctgactaagcaatgcgagatactatagggcctgttcgggaatgattttattttttattttttaaaattttacttaacaaaaacttatagtttcttcataatttttgattaattaatcaaaaaattgattttttaatggttcccgaacaactcctatataaataattcatgtaagtattatacgaatttcattcatctcgaaaacgtactacaactaagttaagtttacgattatttttttcgttttttgatgaattgaattttaaaagacaataaccttaagttgtgtcagcaacaatattaataaaataataataattaattaacaaatctataaataattaaaatttgaatgtgtctcgtttatttaatttttgtggggatttaattatgtttgagaaattgagtacttgacaagataagatttagccagcgatctgttcattccttatagaggccaataatggtttcatttgaaaaaaaataccaaagacttaaatcatttttctgattaaatcatttggaaaaaataccaaagacttaaatcatttttctgatttaactgtccatcacctcacatgactctataagtgtccctcaatttaattaaagagttgcaataagtaaatattttttttatctcaattgcctttacctataatcttattttatatatttatatttttttcaaaaccacttgagtaaacacagaattaaagataaaccttgatagggataaacctacaatcttatttaatctctcaaggatatatttatagaaaataataaattaacggaatagtaataactagaagaatcgaccatttcaaatttgaaagggtcacttttgaggaaaataattacatctgctagagttgttaaattatggactatatccttattacttaatatattaaattaacaactacatagtcattgtatgtattaaatttaccaagtaagtcatcttttgtataattttttaaatgatgaagagaaaaccaagtctccgcttattctcttgtagttgtacttgtaagatagattgcctcaaattcttctataaatagatgtgttaccagtgcaagaaaaatcaccctcaatcaacagaaaacatagcataaaaattaattgatttatagtcctcaaagttcatacacatatttcaatcatgaaaagtgttccttttcttctcacactcactgccttggccttggcaagcttcatagcctctgcctctgacccaagccctctccaagatttttgtgtggcagtagatgaaccccacaaagcatgtgcgtacacataaactttctataacatttttctataacataagtatgtgattcaatatactaattaacaatttttctttcctttttcctttatgtcaagcagtgtttgtgaatggcaaattttgcaaggatcccaagcttgctaaggctgaagattttttcttctctgggctcaacgttccaagagacacacataacccagttggatctaatgtgacacaagtgaatgtggacttaattccaggattgaacactctcggaataacattggctcgcattgattatgcaccgtatggtcaaaatccacctcacactcatcctcgtggctctgaaatcctagtagtagctaagggaactctgtatgtgggatttgtatcatcaaaccaagacggaaaccgtctgtttacaaaggttttgaaagagggagatgtgtttgtgttcccaataggtatgattcactttcagttcaatccaagacacgttccagcagttgcatttgcaggtctaagcagccaaaatgcaggaacaataaccattgcaaactcagtgtttgggtcagatcccgccattaatcctgatgtgcttgccaaggcttttcaagttgataagaacgtgattgacaagctccagaagcaattttggttcggcaatgacaactaaactaaatatactaaaaaagaacattgaatccacaaatgaataaatcattatatttactatttttttt

SEQ ID NO: 57235 - DNA, 1443 bp, Cannabis sativa
ataacacattaaacaagtaatgaattaaatctatttctttattgataaataaaacattgaaatagagttttatttatctcacaaaatcaaatagtcatatgaattcgatgctttccatgtgttacacaaacaacgaatgaaaaccaataaacacggagatttgttatagagatttgacccctttgtgatagggggtaatggcctactcctcttttgattgtattgatacctagagataatactcttcagatcgctataggtgggatctgatatagctctctataaggatacacaacatgaatcagtaggtagatctctaatgtgagagtgagatttccttagaggtgtgtgagagatgaagagagaaaagagagagagccctattgggcgtgaggaagagagaaagagaagagagaatatggctttcagacttagagcaatttggaggctaagcgacttaggtttctagactagggttaaggcctttatataagaggcctaaaccctagattacagtttaaatccctagatatctacataggttgttagataattacaaaatactaaagtgtccttgacagaagatattatctagctgctctgttgggcttttagagcccaattcgtagcctaagtgtgttgtccgaaaattcttgtcgagccaatcctggtcaaccatggtcctaccaggtcaatcctggccggccatggtcctgccaggtcaatcctggccggccatggtcctgccaggttaatcctgtccagtcatggtccttctaggtcaatcctggccagccatggtcctcgcaagtcaatactagccagccatggtcctactagggtctagcaggtcactatagctttacaaagaggaggctagcctttttcaagttgaggacaactttgtacattgtttccttgaagagttcaggttcccttggtcgaacagaggctccttaggtccggaagttacttcttggccagccagcttgtgcacagatcttggctggcctataagctcaccctggtcggcctatatgctcctcttggctggccaaggatgttggtatagttcttgagggctcgcttcacgcccttcggtttctgcttgacggttttcctatatcttggatggaggctctattctgctattggcagggttgtactccacctatactttatctttggcttacgtggtcatgccacgttaggtggacaaaattttggataacagtaatactttaattactctttatttaacaaatcttttaattaactaagttatatatatatgttaatgaattaaaatattaacataatttttaaaaccgagcatatgagattatagggtggtcaaattcgtgtcttagggcgtggccaggaattttactagaaaattgtcccaaacaaactaaaaattaagaatgtggtttttatattttg

SEQ ID NO: 57236 - DNA, 2612 bp, Cannabis sativa
gaccagggcataaagtgcaaaagtattatcgtcgatttgttaagagtttcactggcttaaaagattcatcgtctcaacctacagctcaaactccacagacctttatgtccacaacttcctctgcccctaatgacggttggtacttagacagtggtcactctaatcatgttacccctgatgcctccaatttaatgcagaaggcctcctacaaaggcaaggcaaaattggttgtaggtaatggatctcaactttccatttctcacgttggctctagttcttccaatgctaatagatcactataccttaagaatattttgcatgtacctgccattactaatcttattagtacatccaaatttactaaattgaattcacccctgatttttattttatcaaggacaagagttcgaagaagcctctacttcagggcactcttaaggatagcttgtaccagcttatctctccacaatcaaatgcatagtccaatcctctacatcctaagtttaagtcatctgctcatgttgtgtctatgtaataaaaagtcaagtgttgtcaatctatggcacaaaagaattagtcatcctaataaagttgttttgaataaaattttacaatattttaatatttcttctactgatgttgatttctgtcatgcctgtcaatataaaacatggctactgctccatttaatatagttcatcccgatctatggggcccttcccataatgaatccactgaaggatacaaatattatatgtattttcttgatgaattcactagatatacttggggtttgaactctcaaacaaaaatctgaaacaacaaatattttcctatagtttaatgcttatgttgaaagacgatttggctgtaaaataaaaactctacaaactgactgaggaggggaatacacaccacttaggccaatccttaccaaacttggtttcaactttagacacccttgtccccacggtcatcaacatcaaggaaaagttgagaggaaatataggcatctcactgagatggctcttattcttttggcacaggctcaattgcttctgaaattctggtgggatgttgttacttcagcaacctatctcaataatagactaccaatacataaaagattctataagactccctttgagtttcttttccacaaacagcctgattataactttcttcaagtttttagatgttcttgcttttcatttcttagaccctacaattctcacaagtttgaattcaaaacatccatatgcatcttcctaggctagtccaacacataagggatataggtgtcttcacccatctggtagactttatatagccaaaagtgtcatatttgatgaacaattctttccttatgcatcactgtttcccactacctctggcaccttatttgtctctcctcctgcagttgcctatcttcccattcctcatgcctcatttcagcctcaggcattgacacaacaagcatctcagtccacttccccacttgcctcttcctctagttgctccacatcttccttatctcctccactagggttttgtcaccctatatatctatcatttactcagcatgagtcgccatatcttctagtgttcccactgaggactctattcctcatcttattcatcaacccactatcgccttacaccctatgcaaaccaagtcgaagagtggtatagtgaaaccaagagtattagcagttgaaataactaaatgtaatggtgatttttgtgagccaactagtgtgttacaggccctcaaaatccccaggtggagacgtgctatagataaggaatattatactcttaaatagaacaatacttaggttgtggttccttacacctcagatatggttatcatatattgaaaataagtaggtctataaggttaaactcaactctgatggtataccttagatagatttaaagcaagattggtggcaaaaagatttcaacaaactgctggggttgactattttgaaacttttagtcatgtggttaagtctaggaccataaggattatgttcactcttgttgttagctttcaatgatttctttaatggtgatctcaaacaagttgtttacatgcagaaaccaaaaggctacgaggatcctcaatttcctaatcatgtatgtaaactaaacaaggctttgtatggccttaaacaagctcccaacgcttggcatgacaagttgaaaattgccttagacaattccctcttctactccaacaaaaacaatcagttgttactaattcttgtatatgttgatgatattttggtgactagtgcttataactctcaggctttccaacaggttataaacaatcttcacattcaatttacttttaaaaaccttagtccaatcagctattttctagggattgaaattcataggaagagctctaatcttcatatatgtcaagttaagtatgctttagatattctcaaaaagaccaacatgttggattctaagacttgtattactcccatgtgctaaggttacaaattgtccaccaaagatagtgaaccttttggggatctcacactatacagaagtacaataagagctctccaatacttaactctcacaagacctga

SEQ ID NO: 57237 - DNA, 1762 bp, Cannabis sativa
tgttagtattagtataattaagtagcgtgtcttgtataatttaaaaaaataatttttagagaatactattattatgccacatgttatatatacatcactttagaaagaattgtaaatttgcaaggactgacaaatgcgagaatagcttccaagagttgaaagaaaaattgatcatcgacaccagttttaagcttagcaacctctgatgaaaaatttgtagtgtattgtgacgcttcgaagcagggtttaggttgtgttctaataaaatctagaaaggtcatcgcttatacgtctaggcaactaaagaattatgaacagcattaccctactcatgacttagagttggcagcaatagtatttaccttgaagattatttgtatggtgagaagtgtgaaatatatatagaccacaaaagtttaaaatacttctttacacaaaaagatttgaatatgaaacaacgtcagtggctagagttggtcaaggattataactgtaaaatcatataccaccttgggaaggcaaacatgatggcagcagatgcattaagttcgagaggtccaagtcaagtgtatgaattgaaataaatctctctgaagtttgttaaggatatgattagatcaaaaattgagtttgtggttggatagctacccaatattacattacaatcagatttgttagaaatgattaaggttgcctaacaaatcgatccaaaattaattgaatgttggagggaagttcgaagctggtacaacgaagaatttttcagtgacatcgaatggactgttacagtataaaggtaggttttgtgttccatatgaggataagattagccaagagatacttgatgagttccatattactctgtattctctacacccgataagaataaagatgtatcatgatgttatggtatgatactggtggccaggaatgaaaggtgatgtggtcaaatatatgtgtctaagtgtttaacctgtcagcaagtagaagcggagcattagaggccattagggttacttcaaccttaaaagattcctgaatggaaatgagaagacattttcatggactttgtggtgggtttatcaaagactacatgaatgtacgtacgactctatctgggtaataatggaccagtttataccaagtcagtgaatttcccgccaattcgaataatatataccgtggatcaatatactgatttatacatcaagaaaatagtttgacttcacggagctccaaaattgatagtttcagatcgtggtcccaagttcacttctaaattttgagaaaatttacaaagggccatgggaccaaattaaaatttagtacagggtttcatcctcggacgtatggtcaatttgagaggactatacaaatgttggaagatatgttacgagcatgtgtgatagactttgagggttcctagaataaattcttacctctaattgagttttcatataataacaactaccatagtactttcaacatggcaccctatgtgatgttggatgaagccggtgagaggaggtatcttggactagaggcgatctaaatgactagtgaggctatcgagaagaaccatgctcgtatgcttgcctcacaaagtagacatgaaagctaccttgatccgaagtatagagatattgaatttcaggttaaggactagaataataattggagaattactttgaagggtacctattagtggtgcctagaaacacttaaagtgtatcatattgcaatttgtataattaattaatat

SEQ ID NO: 57238 - DNA, 506 bp, Cannabis sativa
tggatagtaattctctcagtataaatacaactaaaaggagagtgggtcattacctgctatcacaagggggccgaacctctataacaaatcttattgtctattatttttcatctttatttgtggaaacacgtggaaagcatcaaatctgtatgaacctactgtcggttgatcactttttgaggtcaacaattcggtactttcattgagagcgtggatattgtgatctgatcaaacgccatggtaaacacaagaaggtccatgtcctaccatctgcatcttcgggtcttcctcaagacccatagatctcagatccaggtactcaagtttcagtgacaattgggattcccatgaatactgcagatgtggtgaatcccatcacaacaacaggcgctgcaagtttggccactacagctggcaaaactaacatgagcaccctggtggatttaagtggcaggcccatgcctccaggagtagacccaccattggcgctgttgggttttatgccc

SEQ ID NO: 57239 - DNA, 5783 bp, Cannabis sativa
ctttcaatgaagatgtactaatgtctaacagatctctttttattttaagactcgaaaaaattatactctttcattcttttatatatcagcttatagttatttaagatattttgaaaaatcgtaatttcaaaaaaattcaattatgtatggtgttgacattaaaattgcatgccacttctttttattttttatttttttttaacgtttcaataatctaaataatttgaaatttcttctaaaatagtaaaatattttaaataattacaataaaaatcatcatattataaacaaaatcaaattgcattagagagtttagcattattatgatttagtggctatatattgtttgtaataatttacttaatatatattatttgtattgtgtgctcccatggtggtgaataccagaggtaacaaaggttatagtaaccattagaataaaaaagtgtagaataaatctttaacttgaatacaactaaaaataattgtaggaaatattttgataatacggattcttatttttcaacgatattccatgattaaaataattgtctgaattttgttaaattattttatagaactcgttaatatattctttgtgaatcaatctttttcaattccattaaattttttaaagcaatcccaactagtgagttatataatagctctaaatataattgtatagctaaatgagcaattattagtgctgcaaaatgtgagctaaatgtgtatatataatagctaatgtcattattatttggataaatattatattggatcatgtatttgtaaaaattattgattggactttctgttttgtcaaatgacaaaattgatcatgtattaataggaccatgagctcaattttggacagttatcttttaatataataaacttgaagacaattcttaacacgaacagattttgaaaatgtaactaattttatcataacatctctatatcaaattatttttaagttttattacgacaaaaaatcagtttagggtcctatttttaccattttagaaaacataatattcattttgtcatttaacaaaatagaatgtctaattcataactttgttaattttaattttatatatatattttttaaaaaatcatgtatattttttttactaataaaatttcatattaaaattcaaataagtattaaaattaacacaaaatattgtgagaattttttttaaaaaaataatattaaaaataatttttaaaaaatattattttaaactcaatttgtcaatatcaatataatatactagattgcaaataaaactctccatatttatacggctccaaattttgtagttgatttgtgtatccccaaattagacaaacttaggttctaattaattacaatattgtacatatttttacatatacatatattaattaatatatataaaaataaatatataggatcaaacaaaatgtggcacaatgttctttagggcagcccaacttttttggatgatcaattaaattcgtatgggattttacaccaaaaactctaaattttttatttatttttataaaatgtttttttatttctttttgcaacataaaatatataaaataataatctctgcatctgtatgcataaatttcattaaaattgtaagtgttttgttggtgactatcacatgaaatggaatatttattttcttctactaattaatattaataatataatatattaatcttgttatgtgtcatttcatatataaagctttaaaaaattcttcaagctgtaattaatcaattaaattaaactgttgcatcgaagtattaaagcataattaaactaacaaaatatgccattattggatctaatggtgatgatctgagcctacaatttctcttctttcgataatggatgccctttatatatatatatatatttatatattttgtcaggaaaataaaaaagttttattataattatatatatatattaataaataatgtaaatattacatgttacataattatataaaaaaattatcttataattaattaaaacaattaagtttaggtcacgcttaatgtggcagacgcatgaaattggcaattgaccaaaattaatcatcttcttcacattctaataacttaggtttaatttggttattatcttttttcttcttaataatattaatattattattgaagataatagatatatttatataaatatttatatttatacattgcttgtataacaatggtcagaatgtgtcacaaaatttcctatcgaaggttcataactaatatatttatttcaaaaatattagttaggtttcatgcatgttaataaaactaatccataatgattggagtaactcatacttttatataccatattaaatttatatatttgcatttattaatgtgagattttttaatatatttttttattatctttatgaagataatgactattattcattataattttagataactcgattataaatatatatatatatatttttttgactcttagtttctcgaatcatgtacaagtgatttttttactcaaattttttgttcgataagaatataaaattttatcttaaaattaattagtgcaatgagcaaaatagctcatatagtaaatctccacaatgacctcttgtgtctataattagtgtaatgaattagataataataatagaaaaaaactattatatatagatatgttctttttcaaccaaaatcaaagaaaagaaataattttattgaaaatgcacaaagttaataaaatcatagacaatacaaaatgagttatggattatttgttatttttttaattaaaaaattaaataaatataataagtttattataagaaaataaataaaatagcaatacaaattttggaaatggtcagagctattttatataaatatatggcatgcaaaatcatcatattggactaaaaaatattaacaaaatcaatgtctctataacaaaatgatgaatatataatattaattagtggcaccatattatataataggacagaatcaatattgtgacaatctctgttaacattttatttaagtattatatataaattaaattacttatattgtttgtgattatgataatcagcataaggaatctaatctagctgggtggtcttaatttgtactagcttaaactttttttttataatataattttcttgcttcaccttaccaagaattatatataatatttatttattaatttaatttatttttctgttcatatatatatacaatatgatatgagggccataatgctagtctgccacccacacaataaaaattcatatatattgttcttgaattaaaatgtacatgtagtgaaccaaatcattataaggatgacttgtctaattattaattaatatataaatttaaatcattacttataaaaaaatgagttatagtatacttaatataagtaaccataatgtcacatttattatgctaatataagtgttgagtaagaaaaataattataaataagtgaaattgagtaagaaaaatgatcgaaattctttcgttttccttctcactagaactctttatttccaacttaaacatcgaagaatcttctgctgaaaaatttctcagtactcacaactaattgtctattttagcaaagtatttacccaacaaaaaaatgtgcttcaaattgccatattgaaataattatagattgaagacaaattacaattattaaatgcaaccaattccaaccaagattttatttttatttcaaaagaagaaaaaaacatcatttggtacaatacttcaagtatggttatatgagttggaatttgcctaaatttagaggacaattgagacagttcattagataccaaacaaacattggtgttgtatctttttgtttaatgattgagatagtttaccaaataataattatgatatacaattgcaaattgttataataataataataataattataaagtgatgaagaaaacaataaatataaaatttaatttgtgaactccaatgttgtgtttctcatataaatactaataccactttaattaattgatcctaaaatacagctcaaaatatgggaaaaaagtttaagagcttaaagtttaacatgcagttataaattaaaatattatattagctagtgtcaggcttttatgaaaaaataaaataaaataaaaaaatcatgtgtatattgtataaacactatttaaatataggaaatattagtcactatattaattatgaaattgtgtatttaaattaaaatctctgtaccaaaaaatttaaaattggtctcttgaaaagagttataggttaatttatttagtttttattttcaatctaaagttacattttaaaatattgtttgattttaagatgtagaactttattgtagaaactcgtggtagctcgaacatcaatattgataggcgagatggttagggcttttgagtttttacttaggttgagattttaaattcccacgatctttgtgttcgttggcggaattatattttgaaactaaaggattatcctttttttttttgggtaaatttttcatatttatgccctatttttgtgaattattttgtttaaattttgttctggctggatgaacaaaattgataacttagtcacaatatatatttgtatattagatatatgttgtctaatttgtatattttgttgagagagagattgatcaattgagtttgtgttaaagattaaaatttagatgtaaatgtatgtaattggttatgtcatgattatgatttgtttgattaaatgctaagatcaatttgaattttgatgatctttatgttaatgcatgtacatattgtttgtcatataaaatgagttttttctttccttcattttttttttgacatactgattaaaattactaaagaatttataatgctgactgttatcgacgcaagaatcattttaaattaggatagttaattatttaactgaaaaatatattttgccaaactaacaagctacaagggacaaaattgttactgaaaatttagacaataaaactataacgtacgtcgtcaaatagcacatcaaaaaagctaaaacttcaacttataacactgaaaaattacctatacaagagaaaacaaattgtattagaagaacaatttataaataaaataatcacttgattcaatcaaataaaacaaaaactaatgaaaaaatttaaaaataattagcagaaagtatttacctttagctagtagcaaccaaagtgaatggatgtacatattgttgtgatgtaaaatgagtttttcgttgcttcattttgttgttggtattatatatatttgagtcaaatcaaaacatttgaaaactagtaagaggtatgcatgcaatatctctataaatatcccatctcctcatcaaaatcaaatcatacaatggatatatataatatacaaacttaccaaaacacataaatccaaaaacaaaccaaacttttctaaatccatccatctcataaatttacataaacacatatatgtattcacttaaatataataatcctatgatttttattgttaatattattatttgatgaatacattaattgatctctaaatttattaacaaaatttctaccctatcactaaaaaaattgtagaattagcaactttgttaatttgtggtgctcattaaaagaattagcaccacatatttgaaaagagaaataaatacataaatagagaatttttttt

SEQ ID NO: 57240 - DNA, 1514 bp, Cannabis sativa
tatgccatgtcctgttttagattgccaactaaactttgtaaggaaattgagtcccttatttcaaaattctggtggggttcctcgggggataattcgaaaattcattggaaaaattggggaactgtttgtcaatcaaagtttgttggggggttgggttttagatcttttgttcactttaatcaagccatgcttgctaaacaagcatggcgggtcctaatgtgtccccactctttgcttagtcaaactctaaaagctaggtattttcctcattcttcagtccttgaggcaggccctggttttaatccttcttattcctggcgtagtctcctctgggggcttgatctaatgaagagagggttaatttggaaagttggtgatggctcaaatattcatacgattcaggaccattggatccctgggcttcgttataagttttatgcctcccctcctcctcctgactcaactctttcttattttctttctccttcgggtggctgggacttagacaaacttaaccaacattttgactcctccacggtaaccaatatccttaatgttccaatctctggtgcaagtggatctaacaatctcatctggggtcaggaatcttcaggaattttgagtgttaagagtgcttatcaccttgccttgaccaatcatagtattgcttcgggttcctcctttcataatagcaagcggttttggactaaagtttggtcttcaaatgttccacctaaagttaaacacttggtctggagagttttatcccactcaattcctgttgcttcgtctttatttttttgacacatcattccatctcctgtctgcccgatctgtcatcaagccacggagacagtgaaacatgccatcttggagtgtaaatatgctaggaaagcctggaaaagttcaagcttcattggtttttatactaataatctgtctagctctatagatactttttttgttgctgcttttgaaacttttgattctcatcagattgctatcctattttgttttgtttgggcaatttggaattatagaaataaagtgtttcatcagcataaaaggccttggcctcaagatatttttcaatctgcttgtaattttttggatgaatttcagttagctcgtgtcaagaatttcaagcaggagactgtaacttcagagggtcaagatctagttcctattccgattgtaggaacctggcaggtccatactgatgcatctattgatgtggctactcaaaagactactttagcttcaatcgtcacggatgagtgcgggatcattaaagctggatttatgcttccattgcaaggagtacttcctccggatgtagctgaggctaaagccattttaactgcggttcaatggttacaagctactaaactgccagtttctatccttttttcggattgtaaagtagtggtggacaaaattaataatggtttttgtaataattctattttaagtgatgtaattaattgtatcacagccttgctaactcaaagtcc

SEQ ID NO: 57241 - DNA, 2321 bp, Cannabis sativa
attgttaatctgaacttgtccaacttcttttctttgtccatatgcacaagaaaataataaggtgatcaccattatattaatacatgtttgtaaaacaacatgatgatgcttcattttgtgaattaattaattaattattaaaactgtatatgtgttttaattaagagattgttttcattatatatatatatatatatattatatatatagtaaattatccttagcctattctttgtctatacacaatattactaaaaaaataaaaacctaattaataaagatactattgaccttaacaaacatgcaccattgtctcggaccctattttattatttttgtggaggaaatgaaattagttggaatgagagattgagaattattaatccttttgtaatttgccatttttgccttttttggataacaagcacaatacctagctatatatatacctactaatcaaaaattaaaggggaaaatactaatgaaaataaaaaaactataagatctggttagaaaaaaaaattgtgaaagaaaataatgaaaaaaataattttctacaaattaattaataaaatatttttttttacatatttataattatagagaatcataataaggttccatattaaaattaatttgtaataagttgagtagtccatttatttcatgtgagacagtgtccaacaatataccctaaatcttataaaatcatactacacttaattattagtttttaattaggtaaataagcatgctaaatctaaatctagtaactctaaaaaatacactctttcctaattaactcagtatggaatacactcatttttttgggacattttggttactatacttaaatgtgatcaagaatattgctccctaataagtataccatcacacaaaagatcaaagaaaatatcttagtgtgtttatttagtttcaacaaaactaaactcatctcaatgttttcctctctctctctagaaagtttcacaatggagttctcaactcaagtcagccctgttggagcatcaattaaacaaacaaaataagagtatgttattgttaaaaaaagaaaagtatattcccaacaaaaaataaaataaagtaaaatagttattatagaacatgacaaaaactagtactacaattaattcatttattcttaagatacttttgagagaaataactctctttacacttaaaaaaaagaaagaaaaatcaatactctaattatttgttggcttgtctaagatacttttgagagaaataagtctcttaacaagtattacaatttcatttattccaaggatagcaaagactatagctctgagtatctaggtcaagttggcatggtccatttggatcaacaatccattcattaagagggaaacattttctcccatcatacttgaagatatcaaacgaatgaacctcatgatctttccatcgaaagctacaatggaagagtgtagttccccatatattgggcataaaagagaattgaaatgaatcttcgtagtgaagaagttggactccgagatcatcgtctaaagatttgcagtgaagagttaggtctgtgattggtaaaacgttagttatcttcactgtaacatctagtttaagaccctttgatgatttttgagatagtaaagaaaagaaaataaatacaacaaataatagaatggtctttcggcaaagatgatgatgattagggttgttgaagatcatcatgttaattagggtttttttttagaataagttttggtacaaaataattatatgtaatgaattcttgttacccttttatatagtgtaagaattatagaaatctaacactcttagtacttgattggtgataaaccacataatattatttctttttcagatattttaaattatttaaataggactttctatattaattatttgttatgaggtaagaagaaaaagaaaaagttcttttttggacattatttatactttatatagggcttttacaatttccagaaaaaaatggaaacatttaattaaaattaattatttattagtatgtaaaattagtagcatattatttattaacatttagataaattataataagctagttgtaccaaatatttcttatataagaatagtaattaattaggccagttgctgtgaattttttaaaatatacatttttgatgttattatagaatcaaaatttcaaaatttcgaccgatattgtatatagatgaattataaagtgtgatatttaataatggttatggcggaagaaggggtcttatttgggtgcatctactcgccgtgttagaacatcg

SEQ ID NO: 57242 - DNA, 1058 bp, Cannabis sativa
  modified_base (70)..(74): a, c, t, g, unknown or other
  modified_base (930)..(938): a, c, t, g, unknown or other
tgtgaaccatgcaacatagaatgtgatttctgatctttattaatcagtaaatctgattatattaaaatgnnnnntatttagggtacaaaacccaatagttacctcatgtttgataaacatgagtgtatagttgattattatatgtaagtataatgtgcggtatgaagacttgatttatgcatgtgagaataacatgcattgtgaatatattttatggaatgtaaattattgttaattagtattaagagtaacttatgtcaagtatctagttagaagggttatgtcctacatagctctttttactaggcgttagctcacgggtactctgtgtccaagtaaggataagactaaacaatgagattgaagagctcgaggcgtggactgcatgttagggggctggcgcagtactttaattttaatgttattaaatgttaaaaattgtggaggttcctatttgtactattttagaaaatacagggtctattttatcatttaagaaaacagaggatccaattgataacttttacaaaacacagtatccaaaatggtatttatccttaattaccattaccatacccattctattaccattactattatttttccattacacctgtaatgcccatactttttcataaattactaatttagttacaattgttaaaatgtggaaaaactgtaatgtcgcttttatttataaacataaaatatttcatatttgagctcagtttggacttaaaagacataataattaataaataaaaacaaccgcgacattaatttaataacacttaatataataaatggagcttgccctagaccaccctcagttatatggtcctcaacgagtacacacacaagcctctaaggtctcacttgccagtggctttttaatttttacaaccttaatctgcacatggtaagtttgannnnnnnnngctactaaactcagtaagaaaatacttgtcaatcacataaaataaaagaaaacatataattaaaacttagatgcacatatttagacaaatagcaatatatataagcttaatcttgtcact

SEQ ID NO: 57243 - DNA, 2985 bp, Cannabis sativa
gccgcgcactgtatgacacatggtgcttgttattggtcaggtcgtcgttttactgagagtgatgttcctcttgctcttcagtctattgttttaggagatgtttctgtctaataaaagattatttttttattcaaaaaaaaaaataattaaaaatctgaataagattgactcgtggactatgcagatttttaatagcaaattaaaccacgtaaaaaaaccctgtgttcatacttttatttctatagcttttatttcttctgtgcaaaattattattgtgaagttcaaatttagttaacgaaattttttatttataataccttttgatagcatttaaacattcaaactcaatgacattattagagatgaggcaccagtaggagggtttccttagctcgttaaggaaggttgttaaaaaaaaaagccctctcaaaacgggaattgtcctcgttattatatatttttcctctttttgttatccatcgatcgattaatctggctccatatataattatttaaatatatatattaattaaattgataaatgcatgcatataataattaatattagtttataataataaagtttggactttggagggtcatctacggtcgcagtacccaagagtagcccgcgagagttatattaataaatgaagacagatcatttctgctgccgcggatcactgagaattgccaaactcatgtgcatgcacgagtactgtgccgtcgacaatggattttttatttaacaaaaaataaaaaataaaaaaaaacgtattaaattctatattatatacatcttctgcaatttagacacgcaataattttaaaattaatttttattttaaatctcggacatatttatatttcttaatagcaattattaactggtataaattgaaatgatcgaatctcaatttgaaaacggtactaaatactaatcaacaattttagtagaacaacatacagaagatgaggctcctaaattttacactttattccaactcggtcctccgtcttttacaactgtttgacctctttatatattcaacattagattgtcctatttaggataacatctccaaagaaaaaaaaaaaaaagggtacgtgcttgtagttttatttatttatttggaaaatcgtctacaagctgatcaaatcaaatacgcgtttatatttagaggagagtgtgttatatataaatatatttttaaaaaaacttattaattatttctatctctttgtctccatcttaagcagtattatcacaatttttattttcacgaggggaagaacttgtctgcccctgaaactctcgacaacttttatttttatttttataaactttcttcttcgttcttgtcgagtccatcggccttatatatattcaagattcaatcccacttggcaatagactgagaagtacatatatataattgactgatctgaatatgacgaaatttgaattaatatgctgaattgctatacaatatttatttaatttttccccttccttcaatgtaaaacgtggactagaaactgaacaatcatttatagaattaaattaatgctgtaaaacaagagaaaaatgataccttttattttacattttttttctttaactacatattattgtatgatatttttcttatgagaatctcatctatcctgttcttttttaataaaataaaaaatagtaaaattatgaaagaaagtccacttttaccataaaatcaaatttgagaagcagtctatataaaataagagctagagtacacacattcacatttcactatcccctccaatcctcatctctctcattaaatgagatgtgtaagtgtaacaaaagcacttatatataattctttaagctctaaaacattcacaaacactctcttaatttcctcctagataacaccacaatatgatcacaggtaaagatatctacgatgttctggcggccattgtccctttgtacgtggctatgtttttagcctacggttcagtccgttggtggaagatcttcacgccggaccaatgctccggcatcaaccgattcgttgcggttttcgccgtaccattactctccttccacttcatatcctccaacgatccctacgctatgaactaccacttcattgcagccgactcactccaaaaagtggtcatcctcaccgctctctttctgtggcaaaccttttccaagcgaggaaacctggagtggatgataacacttttctctctttcaactcttcccaacactctcgtcatgggaatccctctcttgaaagccatgtacggagacttctccggaagcctcatggttcaaatcgttgtcctccagagtgtgatctggtacactctcatgcttttcatgttcgaatacagaggagccaagctcctcataaccgaacagtttcctgaaactgcaggctctatcacttccttccgtgtcgattccgacgtcgtttctctcaacggccgcgagcctttacagaccgatgcagaaattggcgacgatgggaagctacacgtggtggtgagaagatcaggagcatcgtcaatggtttcttcattcaacaagtctcacggactaaattctttaacatctatgacaccaagagcttcgaacctcactggcgtcgagatctactctgtacaatcatcccgagagccgaccccgagggcatcgagcttcaaccagactgatttttacgccatgtttaatgccagtaaggccgccagtcccaaacacgggtacaccaacagctacggtggtggaccaactcacggcgctgatgtctactcacttcagtcatcgaaaggcgtcacgccaaggacatctaatttcgacgaagagatgatgaaaaatatgggaaagaagcagagaggagcgaggagcatgagtggagagctcttcaatggcggtcttgctccgtcttaccctcctcctaatccgatgttttccgggtcgacaagtaata

SEQ ID NO: 57244 - DNA, 771 bp, Cannabis sativa
ttgggattaatcttaattggaggttattttttttactattttttggctagcatattaaaacaacacatgctatttttaagcatgtattgtcaaatttcccttttaattcaggttcacaattacataaaatacatatataaaagagaaaaaagcatctttgttgctgcttaataattgtcactaatgagggaccacgttctataaatagacacataagactttgaaaaataaataaataaagattagttatcctttcaatactttgtatttttcaaaatacatatatggaaatatggagaaataaaatcatttttttttgccactatttttttactttttcaaattttattctattagagtgtattagaaatagtttaatttttaaaataataattttaaaaaattagaagtttataaaatgggtatatgggtatatatataccttgtaaatgatttctttttcttattagtcatcttttttatttggggtatgatatttgggtttgagagagtttatgggtagttagagttttctttaggtgattagtttattttgcatgtatgagtataggcatagtataaacatatatgtcaaataaatttatgagcaagaaatttcatgtaaggcatttcatcatattcaacaagtgcatatattgttatccacatttattatgtaagacatgggacagtcatgtactttgtatacatccaaatctgatgtctagacttgaaaaaaaaaaaaactagactaattactttgttatttta

SEQ ID NO: 57245 - DNA, 858 bp, Cannabis sativa
gtgcaacttcacaggggtatatttaacttttttatttgtatctgtacttttttatagatatctaaataaatataatatacatatggattccttacatatatttgttataaaatccatcgtgtgtgaagtgatgaagaaggtcaaagttttgggctgataataaataataattgctgaattattaattgtttattttatgtcaatttaaacatattttcctgatatatttttttttttttttttggatttaaacgtttatatattacaaccatgttttacctgtactcgaactcagaacttccaacactcacacccacctacgaccactttgaactagcctcaagtgatttttttttttttcagtacttaggttatggtaatattaatttataagctctctgtatataagagcatacgtcattacgtgatctcaattattcatatactattatataatatatattgaaaaatagagatgtgtacttactaactatagatagtatcattcaatcacttttaattatttttggaatctaattgcctatatatattaagaattggctcaaaactaaacaaatgttatttcttttccatgtgttatatgctagtatgtatatatacatatatgagatatggttgttacacacgaatgtgaactgtgtttttaataattgtaatcgtgattcatataatttaaaaaaaaaaaaaaaaccatgattcatatgacttaaaaaaaatcaatatacggaaattgtgctagctagtccactcaacaacaattaagaaaatcaaaattgagacgtttaaggaagagacgtttaaggaaaacatgtctacatgatcggctggggtttatac

SEQ ID NO: 57246 - DNA, 853 bp, Cannabis sativa
aaatcacaaccagggactttggttgtaaacaaaaaatctacctactgaaagttaacatggaaaaaccctaaactaatagggaattaaccaaccaaagctctaaaacttacacaaatcaacaatacaaaaattttagggaacccagcagctgatctggttcaccagttttgcagggcctgtaaaaccggtgaactggtttacaccaataaaaccgaaaaaattcaaaaacctaaccaaatcgattccaaaccttccagacctacatattataccccaatacacatatcccaagcaacagaacaacatagcatgcttaaaatcaaaaattactattaaagagccaagcttgagttctaaaaatcaaagcttgctcaatcagccctatggcaactaaaaccagctcaaaaaaacatatctaactataatttaacttcagaaaacatcaccaactaacggcaacaactacagaactcaaaaacacaaatcatgcaaaaatctcttacttaaagttcaagaaaactaagaagaatgatgctaggaacttactttgagttgagatcacaaagacttgctgcaaattcttttttaattgaagaagaacacaccaaaccctagctgccctagggaattcaaaagagagagagtttttctttttttttttttctattttttgattttttttaaataatgagaaataaaaatggttttatctaataaaacctcagccataagaatcagaatataaaatccaatttaaagtccactaaaggacaaaaccacttaggtaaaaattactatttttcccttgtccaaactaaaaaaaaaatcgaaaaatcacttaggggtattttgg

SEQ ID NO: 57247 - DNA, 2393 bp, Cannabis sativa
aagccacttacaaaactaaacatattgccttacaaaaccaaaagacacattagccataaaaactaaaaagccatattagtcataacgaagataagttaaaaaactatgtaaaataaaattatttacatatagaattactatatacaagaacatatacaatcaataataaatgaaataaatactcaaaaaagtattctatattattaatcaaaaaaatcaataaaatattttaagacaacataattactagtaaacaaaatcattaatgagaataaaattaattaatacaattaatataatattaaaacatagtaataaaatatgctttttgaaatataatttatttaactatagatattaaattaaaaaataaataataataaaagcatttaatagctatttaatttgaattaaaataaatctctatgtaaagtctgagaaataaaagagttacttaaattatattaaatttaataccatgcaatcaaaattaaaatgaaaaaattgataaattaataccgacaatagaattgaaattggaaaggaataaaatactaattattacactgcaatacaaaaattactttaaatatcaaaacaacaaaaacgtttaaaagcaacataaatactatacttaaaataaaataaaacagtagagaaaaaaatttaaaataacctaatttattttaattaataaataaatacaaccatgttattacaatagttataaagaattagtgaataacttatatataaaaaaaaatcatctaattaaagcatttgtcataaattttaaaaacagtcaatccctaaaattgagtatttaaaagattaatgaatatttaaaacctaaatcgaaagtcaagtgtatcaaaatcacaatatatctaaatcataaaagctacaaaaaaggaaagaatagatgagaaaataaatatatgtaatatataaaaaattaaaataaaacaaaatattttaattttacagttaataatgaaaactttttaaattaaatagtagtaaaaataataaaagtctacaaaattagtgatagaaagtaccgtgaaaatatattttttttttgagatatctgacaaattattttaagaatttaataagatttcataccttaaacaaaagtaattaaagattacatattccaccattaagggctatctttacgagtgaaacaatgccaaaatttattagcatatatactttaaacatataataatactatttaaatagctaataaaaagaaaaaaaaaaacaaatatttatatataaatatataaataaatacatatataaataataaatacaaataataaaaagtattaaaaaattactttatcatatttgtataacaaaataaaaaatttaaattaataatgatgagtataactaaaaatcgttattaaaataaattaaaaataaataataaaattaattatataaaagtgtgaaagattaatgctaaaagtaaataaaataataataaatgcacatgataaggttttaacgaaaaaaatgacattgaaagtaattaaacacaaaaaagaaattgaggataaaattaaaaactaaatcccaatcaaaagtgttgagatttggttttttcttgcaagaaaaaattaaataaatatggtaagaataaataatataattaataagatcattaatataaggaaaatacgtaaataaagaacgcaaatcatgggtatgaacatcgctgtagttaatgtcaatctcaactaccaatagcatctctgccctccgcatgatgtgagctaccttcaacggtcattgtcaccgctgctaacactgatcctccataacaaaaatggatttttgagtctctgacacctataaatattccacttacgcttgctgccccgactcaaggcaaccaccaggaggtgtcatctcttaccaaagttaactaggaaactatctccttcagacgccccaaggaaattgaaataacaaaccaaggatatctccaactcggagaacaagctcatccacaggaatgggttgtttttatgcacattaacacttatccgatttcaaaaccaattataatatagattgaggaagccaaagaagcatcaaacagttaaaatataaaatcaaacaaatattaaatgtttaagggaatacataccagtactaatttctttctcactgaaaagcaaattattaatgataataatatcgattgaggaagccatcagttggtagcagaatactaactagtggatcatcaatgaatcaactatggacaatagtgatcagcatcacgatcggagatcaaaaccaaagcatttttatgactagaaagacaacaccgaagaaacacacaaccaatcgcggcggcggcaaaggcaggg

SEQ ID NO: 57248 - DNA, 1444 bp, Cannabis sativa
attattagtaatgtaaatttataaccatgtatttactgttcttttttgttcattgcaggttgaattgtttcttcaacgagatacaaaatggaatgaagacaattaatcaatttttggagcttcagaaaacttcgagatataaagaataaaatttctagagaaataaatattacgtacattttgtataccctcattttttggaaagtgatattacacttgttgtaaaatttttaaccttataataaaaattcttatcaaatattgtagcagacttacataatgtattttgattgtatgaaaataaatttagatatttaatttatttagactgtgttattattcatttaaatttatataactttaaattttcttattataataaaaaaataatccattatagatttcgatgtcatacaattaaaatattatttatttaaaaaaatagtgatgatattatttaaaattcaattataaatttaaaataagtagtcatatggcaacacttttataattagtgttgttatatgtctttattaagttacaacatatggtaacacttttataagtgttgccttatacctatatttttggcaacactctaggagacaacacttttataagtgttgccttttaattttctttagttaaaaaaaagtgttaccaaatataatttttctagtagtgattagaccattccaatccaagggaatagatataaattaatatatgatggtttaatatgaaatccacgggccattatatatgtgtataggtaaacttttgtacgttgacttattttgttacttgaattttacatgaatatatattctagttggttttctaggtatttagtactaggggctagctgggagtaagaataagaatctatgtgtccgttaattgttacatagaacaaattataattaaaacctttacttattgaaaacacggcttatatatgagacatattttatattatgagtttccatttcctccgtttagttaatatggcttcgagtttgaggtacctacttatgttggcgcaactatatatatgttagaacttggtatatatatgagaatagggtaaggtacctatggtaagaagtataaggttttatatatattaaaaccaataaacattggctatttcacactttaagccttaaagcatgtgcccaatactatggacgtctcactttataataattagttaataattttttattttatttattaattaaaatatatataacgttctgatagtgtgctatctttgattgtaagtgaagtagcttccatgatcttataaatgatatatataaagtttttataatttgtaggggtactgttaagcaaaattttttcatttagaataataaaaaaataaatgcaaaacacaattttatctatgccaaaattatagcataagagtttattaatt

SEQ ID NO: 57249 - DNA, 2735 bp, Cannabis sativa
atgaatagtggctagctgattggaagagaaaatttctaaaaaaataaagtgaggttgtagagctcacgatccgttttaagtacatagtcccaaatgaaggtgctcacggagtgagaacttttgttagtgatgagacaccctctcatataattagggttccttccttagtagatttaagtagtactgaccacggggcatttgacccatatttcttaagcttagacaagaataagtaccctagcagcgacttcatagataaactcgattgcatagtaaggaatccaaagtattttgttcaaccagtgcatcaccacgttagagtggatgtacttagtaaaatatctttcccagggttcttctagcacaagactaatttatgtcgaaaggaaattgccctttttgctataggaaaaattaattatgccaagataaattgtttggatccttttggcatattatctagtataggttgtatttgtaattatctttgttgtaatttgttgtgtgatatatttttcttactccttgcagaacaacctgccacttttcaaatgagtcttcttaacaacttcttggatgttaacagtgttggaagttattttaccaggatctagatttactaacatgtatgttgattattgttaacacagatttttgttagccaaatatatgaccttttacgtaataattttaatacaaaatttaataataattatgaacaccagatattttacgtggttttgtagttaaaatcaatatactccacgaacccgtattattagggatatttattcgaatacagagtataattcttaatagtgatatatcatataattctctcttaattttttcgttctttttccattgattctgtcccagtttatacgtgtataggttgacagttatttttattgagatcgattcactacaactgctaatgaaacgtggacattcccctcgtttcatttatttacacatgagataatatctaataactactcaactggtccttgtctttaacctttaaatggttatgctaactaagaaggctatttctcgctgagtatgagttatccttttatccgttcttaaataaaaaaatattaagtgtagacatttttcttctcgcagtgctcttcatatcgtaaagctattcgtaaggtgatgttaagagtgagatggatgaacgtaatcttctccatttacaattgcatcaatgagttacaagcttttattccgaagtatgtggattaacgagctacaagctccttgatatctcgtcctctacgcttctattatatactttgtttatctcgagatagacatattatctagttaattatatcaatttaatagttattattcttatctcgcatatgcttatgtggcagggagtttgaatatttctatcaacttataatttaattgaaacgtgttatattaaattgcatttaataaagcaatttaattactatattctttgagttgattcatattccttttgtaggacacgtgacagcttctaatgagtagccgaattcggggtataacaattgccccgtaaaaagactttttaatttaaaaaggacatttaaaatgtttctatgggtataactgcatttatcccattgaaaaaatgcatgcttagacttttggcagttcagaacttcgaggcacatcattgtttatttaatgctcttactgttccattctcgtaaagttcccatcaattagattgggtcttctttagatcgaactgtgggcatcttttaggcataaatttgaaactaaacttatttttccagttttccttcttcaaaccttcaaggtttttgtaaaaactttcaatcgtcctattgtcaaacttgcatgccctcattatccctcacatttctcttccgtttttcatttgattatgtttcctgttctagaaatcatcatgacctagcctctcaacctttggaatttcaatctcgaagttcttctctgcctaaaaatcttcatcaagacagtaagtgagacacttcctttttcttattaatttttccttctattcttgcaagactcttgttatggccttataggcatatacaaccttagtctcatacgtggttcccttagaaactctgtatgaaactttaattgtgagtctattatagttgaatgttcaacttaaaactgaacacttgtccaagctgttacacttgagacttgtacttcactgatacccagccttgtacagtgacattgtttggcaagtacccttgggtacgatttcccagagttttgtctatggcttggaacctacaaggaactctaccttttggcttggaacttgccaggaactctgccttagccttagctcggtacatgattcctataggaactttgtctagtacttctctgtctatacggttcttgcagggccttggccttatgcatgtgaatcaattttttaatcatattcgaccttattgattacattttcttgctttaggcctataggccctttattttcgacactactatcatttagccttgccttttatcatggatatatgatcgtcttggctatcttctcattgccttggcatgtaagtatccgtatttacttttctttatgtcaagctgaattatgcttgaacttgacttagaggaaagtttagtagcttattctaagcgttaaaatttctctacataagttctatgtactagtttgatgcattgtacaatgt

SEQ ID NO: 57250 - DNA, 1744 bp, Cannabis sativa
  modified_base (1684)..(1688): a, c, t, g, unknown or other
cgcgaacgtcttaaagagagcgacttagtccgcgactcaacccagaattcttcattcggtaatatcgttcctcttttattttgctagcagtttactcaacaagtacgttctcattatttgagttattttctttgaatcaacaaatatattatttagatctaattcctatacatttatataaattatatatattattaatagataatatatttatttataaaattgaatcttgttattgttacaacttgggtcggatagttgttagaggtttttttattcattttaacatgttaaaatttggaaaaaagtgaatgaggttctatctcaaaattaattgacaataagaaagtaacgcattcatccattcatcttatataatatattatctttccacacattaacaatgtaaagagttctaacatatattagtctacttttcattgctgtatttaataatatttattctattaataattactttgaaattgtagatagattggtcccggcataaatatatatatctaacatttataaataaatggatctccacaaaaagacaaaagaaaagacttgtttttgtctttttttaagttttttttttacaatttttttttcacaatttttttataatatttattttacaattttttttataatattttattttattttgtggtttattagtttgtttttttttaattttgtttttattttattttgataaataattttttttacttattattggtactattaatgtgattaatgccttatcattaatgtgtttaatgccatatcggtatggtcccatttttttgtacttttttaaatttgttttaattttattttttaaaaaaaataattttttgtacttgttattagtatttttaatgtacttaatatcatatcggtatgatactcaatataagtgatttgtaattttttttgtctcttgtatttttttcatttgtatggatgatctttgtactatttactattatttttggtaaataattattaattagttagtaattttttatgaatgatctgtgtaccatttactatttttttatcttttatgtttttttgttttatttttttaaagtaattttttgtacttgttattggtactcttcatgtacttaatgctatatcggtgtggcccataatgtgaccaaatgggcgtttgccaacaatgttacgggcatggtagagatatctactatacctgttaatatcttttgtaatgaccatgaggtctaacttcaattatatttataaacgtatttttcaaaaaaaaaaaatatcggtgtggtacccaataattggttagtaatttttttttgtctttctatttttactttttacgaataatcttcgtactattttttggtaaatgatttttgtactattattgttatgtgacaccttaagtgttcaattaccatattgatctggtacccaataattagttgacactaatattaatatgtacttatctttagtaattttgattaaaattttattttttttacatttgatctgctaatttaattagatattaattaataaaaataagaaatatgattaatccattaattttaacagaaattacgtgtctttggcacatttttgaccacctagtatatacactaggtagaagttacgtgccgaggcacgtaannnnnagttttatttaaagtttagttcttcatttttcttagatttctattaataaaggtat

SEQ ID NO: 57251 - DNA, 774 bp, Cannabis sativa
tagtctaacaaaaatgatagttgacagtagaccatgtttttatatataactcaataattttatatttattctatataatgttctcgaatacctttatataagtgctcaaaactaacttgactagtgtcaattaaatatcttaactggcttaacccttaacggtaatagcgaccacaccacagactaattacatcaaagtaaacttgacttctcaaatattatttgttgctgatacatactaaaggatgagcactttttttaataaaatattgtgatagattaatagcatcgtaagtacttaaaattttatgtttatgtttttaagcggtataagtttaatatttattttagcggcataagtactcaatgtttgtaaactgtaatttttctctaatttcgtcaacacagattctattttaaatttattaaaagaacagttggaagtagctgatactacatgtttttgtttacacctaatgatttagaatttgagccttatatgtgccttatttaagataataacagaatttgtactaatggaattagtaaaaaattacagttttaaaaatattgagtacttataccgctaaaaataaatatcgagtttatgccacttacaaccttaaaattttaagtacttatgtcgctatttatcccactgtgatatttcttctctatggcctataactaggtacttctgcattcagcttcagcccttacggtaatgatttttttccctttgaatatatgtttatatgtactttggtttttggt

SEQ ID NO: 57252 - DNA, 870 bp, Cannabis sativa
  modified_base (713)..(717): a, c, t, g, unknown or other
atgccgctaaaaataaacattgggattatgccgcttataaactcaaaactttaggtacttatgtcactatttcaatataattaaattaaaatataaataaaaatgaaattaaaaaataaagtcaaaatacatttacattgctctaagtctttgaatattaattatctttttattaatattttatattttataatatgttctatttttctagtattttagtatcatttttataatttttaagttatgttttgtataataatgagtatattgaataataaatgatatgtaatccattaatttttatgtaatttaatagtttaatatattttttttaaaaaaaaaaattactctaagcaaatgtattacactactatagttttaaaatcactttaattatttaagagttacctaaatataaaaaatatatatattttcataaaggtacatattttggtactttcagtgatagttgaagaaagtagtgaggccacttgcagattacattcaagtaatcatgtcccttacaaaaatactagaatttgggttaacatttacaaaaatactgccacatagaaattttttcaaaaatactgtgtttttataaaacaacagtggaacacaaaaaaatttatctaaaaacaacagtggaacaacttaaaaacaactgtagaacaacagtaaaaatttaacagagtacacagtataaaacttannnnntatttttgaaaaaaaatttgccccacagtaaaaaagtataaaagttagaaattttagtatgtggtgtaaataatccttgtttaattagggtcaaatttctctccttttgggccttgtgtgatagttaagggtcaatagaagtgggtacgacat

SEQ ID NO: 57253 - DNA, 867 bp, Cannabis sativa
tgagggccaatactctcaagggagattgcccctcttcagacctttcccttttgggaaatcagcgcgaacctttcgtggatcttgggcctttttgttcttttcagggaacgaagtaggatttttcttagggttcccctcacaaggataccgtatggggcttgactccctagtcttgggcttttgggtgcttggcgacgactcttcttgtgttttctctagtccttaaggcacagccttaggatgcacgtggattccagttgtctccatggccttttgcatggcgaccattatttcttgcgtccttctattttgctctttttgagcggccaattcagcctcatgatcaactgtttttagtcttaaggccagtaactcggtatagctaccatcatcataagcattatacccttctgggctttcttcatattcttcgtcgttcgattcgtctcgttcctcaaaacccacatttactcgtgaggtcgattcttcgtcttctgggttccgaggatcctgggggggacgaggttggcgtgtgtagtttcgagtttccaccattgtagttgagatcttttgttgtcattttttcggacaaagcttcccacagctcttaatgaaagcaccaaaatattgaccgagatttttcgacaactaattaaataagataataatgagagcttagggataattaatgaaggtgatttttacatggttcagacattaatgagtcgtagtccacaagtctctgttattaatgagagtatttcttacacagaatatttttcgggtctcttttttttttatccccttctcaatttttatcaggggtattttatagagattgtgttgggaatattttaccaggattta

SEQ ID NO: 57254 - DNA, 611 bp, Cannabis sativa
taaaataaaagtccaattaaacctaatttattgttagtttagtaaattgtacccaagaaaattaaaaagattataatttatatttttaaaatctagtctattcaattcagattggtaaaagtaaataaaattattaagtgtaattgaatataaaataatttacaaagtaattaatacatgactaaaatgtacaaaaatattttttcaaatctatataaaataatttataatgtaattacatgactaaaatgtacaaacatttttccaaatctataaaccaaaaaaaaaaaaaatacaaatctgcaaactaattgaataaatgaaaacacaacattaaccaaaaaatcaaaaccaaactcaagtccaataatcccgacctccccacccaccgcctctgcaacccggagttcggcaaactgcgcaacctccaaagcaatcagagtcaccaataccatttaatatgataagcccttccataatcaatccaatccacaaaaaatacaagaggaataaaatgaagtttcaatcttgagttcaagcttttaataccagaacattgtcaatacatatatgatattgtagttgaattttatttcttttatataaaaaat

SEQ ID NO: 57255 - DNA, 1148 bp, Cannabis sativa
atccacgtgcttagtctaactctaggttattgttcttctgaccggccaagccttgaaacatattttttagttcatcgaactgtgccggcacggatggattaacttgttcagcctcttggccgaccagggtcacgtcaggatctctttgagtaggattttgagcatgagccccgagctgaataactggtgcgacatactgcttgtctaaccctctccttctgtttagatcatatatgagataatgagatgttcccaatctattaaatatagatacactaggttgtctcattgacttgttggtttgattgatcagttggccggaaccgttaacttgggcagagttattaggtatgacctctcctgacgaattactagacaaggtctattcgcttaccgcttggcccacaggtggaacctgtgaccggggattgggggactgaccgttcagggtttgagaagcgttaaccgttggatcttcgtctgactcacctagcgggatgatggttgcaggttgctgcttggtagcctgataggctcttcgtataagcacggtggtctgtcttgttcagtcgtcaatggttgcttgctgagccctcaagtttccatctctttatccctccattcaggtaacagatgcctttgctgttcaaaagaaagattcatcgcaggacggagttcctcctggtcatgatgcagggtattagtatgacctcacataagtccaagagcagcacgaaggttctagatctcggtgtcatctccaacggttgttcgaacatttgttgttggcgcaactttagtattgggaatcccctgattggctgccgaaatggtatttccagtctctttcacaccagacgcaattccactcaaaggagtagtcaaaccttgatctacagtgggcggttgttcagtattcgtggtcggtggaacccctgcatttcctggattttgcagtgcgcgatccactaccggtggattcgctggatcgactacgcctctacgagtttgggccaccatcgtgtttataattaaataagaggtaaagagcgagtttgtgattctactctcaatgaaagcaccaaaatgttgatctcgctgttggccaacgacaatgagtcttttttgtaagcgacaagtagtataat

SEQ ID NO: 57256 - DNA, 1002 bp, Cannabis sativa
ttccagacccatcattgtcttcaagcccacgactactgcgaatcaaagaagaaaaaggaatggaagcttgggcccgcgcaaatcgcgaacccccattcacgaaccaaaaaaacgataaatcaaagaaaccaaagagacccttttcgctattgttgtttagatttttagtttatttgtgttgtttttcttatttttaattaaaaaattgagttttggtaaaatttgtattttctatcattttttttgtatatggtacaatagggtacgatagcataatgacagtgggtataatagtattgtattctagaggctagggatgaaggtttgatagggtacgacagtagtacaatgggatacgatagggtaggatatggaataagttgtttcttaaaatttatgacataaattttttaagcatctattgtatcaccatcggatcatatcatacatttatcaaatatcgtacaaccatcagaccactatcgaaccatatcatacctttatcatggcgtaaattttaagcacctattgtaccaccatcgaaccatatcataaatgtattaactatcgtaccaccatcgaaccatatcatacttttatcatagcataaattttaagcaactatcaaaccactatcaaaatattattataccttcatcactaaccgccaaattacactgctatcatacccaccataggaccaccatcgtaccccatcgcaccatatacaaaaaaaaaatattgaaaatgcatattttacccaaatttgattttttaccaaacaataaacaaaaaatacaaagaaaccatagattatttatatgtccgtttgacggtggtggtcgtgggtcgtgggtggtcagccatgcactagagagcactagagagagggagggtcatgggtctctatcatgcaatagaaagaactaaagagcactagagagagggaaggtcgtgggtctcgatcatgcagtagaaagaactagagagagggagggtcgt

SEQ ID NO: 57257 - DNA, 917 bp, Cannabis sativa
gtcaagctgtagtggtcttggatgatgagtgagagaaaagcaagaaacctacccatgcatgttttggttttatacataccaaccagtgttttctgttctggttaaaactaattggtgataagtagagtaatctatatttttatatataactcaatatttttatatttaattcaacaataatgtccaatactcttttacaatctttaagagttcattaatcccattgttgagtttcttttgttttttaatttatttttcaatatatattataagtattttttttagcttagtgaatattaatgaaatacgtcttccattagagagaagtggagattctttgctccgaattgtttgtagtgggcataagaaattggcaatcgatccttagcaatttccttctctattccttttaactaagggttggattagatccgtttataatccgacctgatccaaaacatgtaagaatctgctccgccccgctccgctagatcagatactcggatcggatcagatccgacccaacttattcggattagatcagatctgacccgactctttttcctttaaagaattttaatattaacttataattttatatccattttaattttgtattagtattattaacatgtattaatagattgtgtaaagataatatattttcaataaactctaccctaacaccaactatgggtcgggttcgggtccaagtttaggtttgggtcctagtttgggttcgagccaggttcttaggtctgggtccgggtcctgggtctgggtctgggtcctgggtccgggtccgagtttcggaggtccgagcccgaggtcagagtcctggaccagatccgggtcccgggtcagtgtccgagtccgagtcctggatctcggctcgggttcgggtccgggcccgggtc

SEQ ID NO: 57258 - DNA, 3928 bp, Cannabis sativa
tgaacctttttgggacaattttgttcctgtcattttaaccaattacttgagttggtgtagggcaatcttggaatttcaccaagaaaattcctacaatgcctaacacaaattactctaaaatcttattctaaaaaaaaaaaaaaaattactctaaaatcttctttgcatcacaattaacgtatcggaaatttgtagatttttatgaataagtttgtatataaacttaaatttgtagggagacttctatactatagtggaaaacaaatataaggcacttatggcatattcagataggggatgatctacaatggaagaccacatttaatgttgtccaaaattttaaatttaattagaagtaatcaatcacaaataagataaataaaataattaaaaagcatcaacggtgcttattttggttgaaaaatcaatctgggacctattttattaatgagcagcctctagacaatttttattagaattgcttaaaattaattgataatgtgaaaaatatttcatttatcttatatataatatttatttttacacattagtaatatgtaattaattccaataaaaaaataattgaaaaaattaaagtgtattgttgaattcgaaaatattcccaaattttcatccaaaatctataaatgtttttttaatgtgcaaaaagttaataattggtattactgccataaaaaaaattggcttcctatttaattataataataataataattaaatttttcctaatattaatattttttaactatttattatgtgtaactcaaattataatatgaactacgactattattaaaggatattaggagtctttaacactacttgatgtaaccaccggggccttcggccccaacgctaggtgtgtagtcgccacctttatcccctagggccgaagctaggtggttgagaccgcctggaatggcttgcaaagacaatgttgatactgctcttgattctgttggtagggtttgtcgcctcgagatggttatcaggaattcaatggaggaagtgtttgttgccaaaacatttattttcaagcttaataatcatgtctttgaattcttataaattaggacttattattcaagatatgattgatatgcttgtactgattttcatatacattagcggatgctaataatcaatgaagttttttggcttcggcctcttcattgtctcataaaagataaaagaaaaaaagtacttgacatagcagtagcagtagcatatactgctatgaaaacgagtcgactcgaataaaagacgacacgaatgatacgatctatattttttatagcacaacataatataatccatattttattatagcacaacatgatacaactcatattttttaaggcccaatacgacacgactcgtattttaaagaacctaaaaaatacaaattaggctaacacaacacacatttatttacaactctacccttattcatgcaatataaatgagaactttctacaatctctctactttatcattaaaaatatctcatcaaaactctattttctctattttatttcacacatttatattacatcatacatcaatttattaattatatttttttccatatcatttaaaatatatttatactaaacaataataaaaaaatttatattacataatatttatttaattttacactttttttttggattttaattttacttttataagtaaataaaatatatcataaaaatattaaacaattagtaagcactgaaacttataaatctcacatttaactaagcagtattcataactaaatttttaagctattttaatttatctaatgaatataattttttaacatttttttataattcttagctaaacttttacctttccattttacattagttgggagtgcatttatatattttaatttaataattgttttaagaaaacaattgaccattaaagagtattaagtatcttaaggtacccaacaccatactaatgtgacacattggaagtggttaacaattttttatgttatttatataataaaaatatgttaaattcgatattaaattaaactaataaaaatatcccacttatgtttgactttaaggtagctttagcatttctcattattaaagtaacaccgagaaccaaatgcactttcacttagagcattgttatttagaacattttaagatgtccaacaccacattgtggcgctcaataatttgttaataatttatattatttattaaattaaaatatgtagggctcgaactttcaaaaaaatatatttagaacccgatattaaaatgtatcaacaaagttggcccaagaatttcagagcttgggccattacacaataggcaaatttttttttttattattattatacatacataaattgaatatttagaatgtatcttaaaataattcgtaaaaagaatgtggtataatgtacaattttttaaggaaatttatatggtatactgatttttactattttttttcaaaaatattgctaggcagtatttttacttttttattatgtatttttataagttttatactgcagtataccgtgtttattcttttgttttttttatttgttttagtgttgttttacggttgttttccacaatttatttttttaacgtcgatttcattattcttgttccatcttgctggaattaatgtttattttttgggtgttctcttggtgttgtggtggttctatccgtgagtgtggaagatggaggctataaaatatattttttcttccttctctatggttattttgtggtttttttttttttatttttttttattttttttattttggttctcctaaaaatacatttgacgagctcactagaaaaaaagttttgaggtgtatggttcttttatgttttctaagtggttatatctgcttattgttttacatttatttttgtgttattttagtagtttttttgttctaattttttaagattgggcttgcaaatataactattattgcattgggtattaaagttgtgcataacattttttagtttcttttaatcatgtttttctttcttttgtttgatttattttagtgttgttttacagttattttgtcatgattatttatttggcgtcgatttcactactttttttttctcaattctcattttttttttttagtgtttacagtgtaaaaaaaaaaaacaattggccaagatagtataaaaataatttctaccctgtagcagtatttttgtaaagattaggcgtgagtatttttgtaaattttcctggataaatgcccaattttaaactttggttcaatgcctccaaaatgctttggcgagcctaacatatgtggaaatagaatgttggaattcatagaaagaaatatagctttgggcacacgttacttgctcatcaatttacaattttattatgtcaaattgaaagttgacctgaccactatatactcaataatatctataaactaatcgaaaacaccattaattttctttgggaatcttcacacatgttatctcatcatcatattcatactatatatctatataatggaaagcacctactccaattcatccattactctctctctcaattttctcatcaatggctgaaaccaataatctcggcaaagccaagatgcttttttcaacggcggcttcaatggccgccacggctatggtggtacgatcttttatgaatgatttcctaccccatcaattccaagacctcatattctcacgcattggcaatttctttaatcgattttcgtctcagatgactatggtgatcgaagagttcgatggtttcgtcaacaacgaaatctacgaggctgcggaggtttacctgagtgagaaaatctctccatcgactcagagactcaaagtgagtaaaccag

SEQ ID NO: 57259 - DNA, 1234 bp, Cannabis sativa
tatggcggattggttatcacagaagatgaaaactagttggtgttgaggtatgtggaagtcgttgaggaggtattagagccatgtaatttcactgcctgtagtagccagggcgtgatattctgcttcagcggagctcctagatattgtaggttgtttcttggttttccaggaaattagacaatcgccaagaaatatgcaaaaaccagtagttgaacgtcgtgttgtggggcaggaggccctatcagagtcagaaaagcctcgaagttgcaaggatgatgatgccgagtataggagaccttggccgggggatccttttaagtaacggagcaaatggtgtgctgcttgcaagtgtggagtgcgagaggaagacatgtattgactcaggatgttgacggcaaaggtaatatcaggtcttgacaaggttaggtagagcaatttgccaacaatttgtctatatgaggaaggatcttcaagagcttcaccttgttgatcatcaagtttggtcctaggatccataggggtctttgttggcttgctcccaatgtatccagtgtcctccaaaagttgtatggtatatttcctttgagagagaaccaagccttctgaagcacgagcaatttcaaagcctaggaagtacttaagggttccaagagctttgagagaaaacttggtgtgaagagttgattgaagctgttgtagtaaggacaagttaggaccagtgattatgatgtcatcgacgtagactaagagggcaataaagctatcttcagaacctcttctgaacaaggtataatcggccatagattgggttaaaccttcttgaaggaaagcatcaaaaagtttcttgtaccattgtcgtgatgattgttttagaccatagatagatttgtttagtttgcaaactatatcagaactgtttgcaaactcatgaggcaaagtcaggccttttggaagttgcatataaacttcttcatgaagatctccatcgaggaaagcgttgtagacatcaagttgtaaagtgtgccattgtttgattgtagaaatggccaatagcaatttgaatgtcaccatcttagaaactggagaaaaagtatcaaaaaagtctaagccttcttgttgagtgtattcttgagcaacgagacgtgccttatgtcgttcaatggaaccatcacttttgagtttgatcttgtacacccaacggcagcttatggctttcttgttttgtggaagtttg

SEQ ID NO: 57260 - DNA, 1325 bp, Cannabis sativa
attagaacagaacaaacctacacgatttcattgatgaaaaaaatgacaaaaagactaaagataacttaactctaatcttattaacgagagaacaagataaaagaaagccagaatgaaccttaccttcggtgctgagaaaaatatatctgtcaccaatttttatctaaggtaacgtgtaaaaattcttctagactgattagataggtatacaatagttttggggtttagtttaggtgaaaatgaaaagttgaaaacctcaaactaactattattgataatcactcaaaacacaatttattaatattttcattgaaatattatggtagattcactcaattgcacccaaaacaaatcttcttcaaagaaaatcacacttaattaatttatgatctatatagcaaaaaattaattaaactactatgaatatttgatattctagttttttttttcttttaatcattttttcaactaataatattcataacaaatgcaatattaattaattattaactaataagtcaaagaaaatatatcaaatcaatcaaaagaagaagaaaaaatggcaaagcttcacctcataattatattaaaaaaattacatcaatattaagttcttggatctatatatataagacatagatagattagagtattattacacccaaaaaaaaaaattataattaccaaattaaattcaaagaaattccacctatggattattaaaattatataaaaaaattaaaatttaagcaaaaaataaaatccaaaagtaatatactagaattaattagagaagatgaagaggattagatggtaaataatcttcttgaaggagaaggagtagtggtggtggtggagtagtggtacctgttgccggagacggcggtggttggccggaaaatgatgccggagaattgaagggttgatgttaaaacccaaaagaaatccttaaacaacatacccatttcactaatcatttgtatgttttttctcattactacacatatcattgtccaaactccttctttcatctctttccacattttctttttccaaaaatatttattattaatttcttatgatatgatatgaaatacattatgatcttgtaacaaggaactataagaaagtcataatatgctattattattattattatatttatgaagacccctttttactaaaatgtccttttcttataaaaataacttttatctatgtgtgtataatgcatttaatttatttatcatattttctttaattacttggtgtagatgtctaactaggtttgaaatttaatactaatacatttaaaaagaaaagaa

SEQ ID NO: 57261 - DNA, 610 bp, Cannabis sativa
gagtttgaatgggaagggtattttgaggttaaataaaattgaggtatatttagagaatattttgtaaagtagaatattaagagtacctaaacccattttaagaattgattgtcgaattttcctttgtatttgaatgaaaagaataataattgacacacttaaattacacacatattttttacacaaaataatatataattaatataaactacacatctaaaagtaatgtggtccatcaaaaaatataaatgtaaaatatttaatatatactactataaatttggactttagaggtaatttttaaggtctttcaacgtcggttttggtaaaatttactactaatactgatccaagtgacgctgtagggtcaaacataactgatgtcatagtgtacactatgacgtcggttatgtactaataatcgatgccatatgtgataagaatcgacgacaaagggtttaaaaccgaccccatagtattaaaaattaatttattttttcagttcaaaatctattataaattcagaatttaatttatttaaattaaatatttattaatttaaaataattattatttaaattgaattaaatattatttaaattaatttcat

SEQ ID NO: 57262 - DNA, 1224 bp, Cannabis sativa
tacaagaaattctacttttattggcgcatatttgtgctaacaaaagtagtcacaacgtgtcgatatacttttatcagcgtataagtgtgccagtagaaagtgtcttctattctcggccagtaaaagagtttttgccgcgcaattgacacgcttttgccggcgagattatgcgccacaaaaaaaccaaacgctagtataaaaaagtgcctaaatccacccattgacaggaaaaataaaaagttcacgcgtattttttcaattagcatgtaaaggttttaccaacgcaatggcaagaattagttataccggcgccagaaaaaggcttacccgacatattttttaatgggtgggtacgttttgccggcgcaatttcgcgctgataaaagccttttttaattttttttaaattaataatttattatattttaatattttataatagtattataaataattttaaatattaaattagatttgaaagaaacataatcaaattaaaaaaaaaaaagggatccacatttataattaaatagtatcccgatcgaactactataaaaacatgttcgagttgtagtaaagttagtaactaaacaaaagtgctaaagtaaaatatttaaagaagttcgggaaaaaaataagtcatgaatacgacacgtgagcaatgtgagcaatgcgatttgaccaagtcaaaaaaatttctattttatttattgatggtaataataataaagatttacaaattgaatttgttttaattagggcataaaaccctaacagaattctcatagacatcatgtagtgtaaattagtagggattaccaaaacttatttccctattttccaagatttatcactattttccaaagcttattttccttatctccaagcactaaaggaattttcatggaaataactttagaaattatcaagtcttgagttttctgtcaagttcttggttgatagaaaactaagtatcacaaaataagcactttatacctctatttatagtgtttggggatcacaatattagaaaataaaatttcattcacctcatgacttagaccagcattttaattggtgtttaataggataaaactgttagataaaagagctggaaacatactcaataaatccatgcacgttcatggacgctatgtcaaaacataaacatgtcatgaactgcaaggcaaccgttttgagaaaactcaattttgatttttgtaa

SEQ ID NO: 57263 - DNA, 826 bp, Cannabis sativa
tttaagcctttaataatgatgttgctataccatcctgcctgttattttaacgagattagttgttaatgtaggggggatcattgtgatctttattggattgttggtgttttattgatttcctcaagttggttttgtgaggtggtcatggatgtctctctcttctcgggtatcaaatagatttctagattattattgatcttgtgccttttgatgttctactttgttgtgttaatcgtcttgtgtatggttggttgtatatttgttttcatttattttactttgaataatgattttgttattgcccaacttgttaattaagacaacttcattcatatcggtccttgtcatgcatatataatctctatttatataatacattcactttgatatcatactatatctgtaatccgaactgagattatttgcaccgaagaacgagcataaatgaatcgtactagcaaccttgattaaagattcctaaattttaatatattgatgattgttttatttatagctaaatagtctaagttttctgtacaactacaagctataacctcatatatgaataaagattttttcgatatttacatataaattattcagtaataaatattaataacttaacattcattcatatatcaaatgttcaactctttatttaataatcagaaaatatttttataagcttttcaaggcataaactttaacagttcagtgcatataatatctttattttgttctgttattgaggattgtaaaaagttgcttgttaatttaagaaatgtccacttagttttgttagatgggggttgatttattggaataa

SEQ ID NO: 57264 - DNA, 1691 bp, Cannabis sativa
ttataagggttgctaaattatttgtaagggtttttgaatgaatttaacaactcatacaacaactaggatagcaactcaatcacatacaataaatgtgtcaataactcttacattaacccaatctcataccagaaccatgttaataacccttataataaccacgtgctatcaactttcggagtcaaatcttctgtcccaattttttctgtctctctatcccaatccaattaaaaagctccacctcaattaaatgttcttttcttaagagagttaatatatttaagtactattttattttattgttaaaaataatctgttgtcatgtgactattttaaaaagaataataaagacactttaataaattaaattttaccctaatgtattattaatattaacgtattgtaatactaatacatttaaaaaataaaataatattaatatatttaataatatatattattatttaacaaatattaaagataacacccgtttaattttttttaagaaaaaaaaagattcttgataaaaaaaaattgaaataaagagtagtagaaaaaagaaataggtctcttttttttttttatagaattatattattttttaacgaaaatcttattttattcttcttcttatttttaacggaattcaatattttattttattcaagtgtccttatttttattttttttttttgaataaaaaattgaaaagaacatttaacaaaataaaaaagtcccatgagaagaaattaatgctaaaataaaatagtttttaaatatattaactctattaaataagggaatatacatttgattgaggtggaacattttaattagattgggatagagagacagagaaaaattgggacagaagatttggctcctcaactttcacagtaacttaatatcatacaacaattatgttagcaaccttagaataataatgttagcaactcaatctcatacaacaactgtattagcaacctttacaacaaccatgttagaaagtcaatctcatacaaataccatgtaacccttacaaaagccatgttagcaactcttgcagtaattatgttagcagcttaatctcatacagcaaccgtgttaacaaaccttacaactaccatgttagcaactcaatctaatacgaaaaccattcatgttagaaacacttacaacaactcaatctcataccatgccatgttagcaatcatacataaaccatattagcaacttttatagcaacacaatctcatacaataattatattaacccttatagcaatacaatctcatataacaaccatgttagcaacccttacaacaaccatgttagcaactcactcttataatgttagaaactcttaaatcatctcaatctcataacacaattactatgttaagaacctttacaacaaccatgttagttcttttatgagaaattaaccattaccaatttcgttataagtttattattagtccaactcttaagaaatcacaacttaccacatatatatatataactatttgtatcatttttagtgtaatcaaacatatatatatatatatatcataagtgtgtataacgcaagtgatggtagtgtcataagcttttgtaaaaatggtaagaacataatgaccaataccatttatttaagttcagaaagagtttctctaaaatttcttttataa

SEQ ID NO: 57265 - DNA, 681 bp, Cannabis sativa
gatttgtctctatattttgttttttccttttccagcttcaaaagaaacaagtgttggtagtaatggtaattctaatgtgagaacaagccattcggcaaggagattcagaaagaaagcagagacaattatagctttcattctctttgttggactagttttgattagctattacattcagaaggaatacattaatggttttactttatttttgtcatacaacacttttggcttgaaatattttgatttgatcagaacagaatatttggtttgtaaaatttaagtgcatacttactaaattttcgactactgagataacattaattttttgatttgtgtaattgtttctttggtggttaagagggcattaggagtggttgtgttagttaatataactgtttctttcatgttttctatcttcttttatgtaaaaattcttgggtataaactatctttatgttggatatgttatcctctaaacaccattgttacagcactaacagtatccaagaaacacaattttaaaaactaaaccaatcacaaaattaaaactttaaatgaaaacaaagcacgaataaaatttagcttgagaatgaatgaatcgtgaatctttattgatagaataatcagtattacaaaatcagatatgtccaagaataactttattggttgttgtagagttta

SEQ ID NO: 57266 - DNA, 582 bp, Cannabis sativa
catcaggagccccagagttaggaactgggaaagggaatttaggctgggaggacgcttgttctttcccagcttccacccggaggatcctgcttgaggcagcttgggcattgatgtaggccaactcttgttccttcttgaataggtatttactgtatttgtcttccgcagaggatcaagatgatatcctctcgaagcaccttctcggtctcggggttgcggacattagggcaaagaactttggataagttgaaatcttctactgactggccttcggaaatcaacttagccctcctgcagttagcagacgtgaccaagtccccaacattcaactcatccttatcataattggcgaaaactttcgcacgttgaaggaagagttgggtaggagcagtacggtgcatagaaggggccctaacccactcggtgagaaactctagaagctcgacgactttgaagctggaagagaagaagaatcggtggcggtactcctttacattcttctaaaagttgtaaggcaccagaccttcattggcagaatgggcctggagcttgaaaaatccatctttaagtttgtcccccttc

SEQ ID NO: 57267 - DNA, 907 bp, Cannabis sativa
tcaatttgagcccgaattgcttcgaacctaggttgacgccttaatggattttcagggaattcaataccccgatcttcaatgtaaggcctaattttcagcctcatgaaacaattctgggtctcctcattgacaaaccgggttctatcgaaacccgtagttggtgggtttgatgatgaaccttcttcaacgtgcctagttctcttgggtgccattttcttagaaattataatattaattttttttttcttttctctttttttttttcaaaataatgctaagaaaaattgggcagcacctcccctaattttctacttcccaaaaattcacaatcactcaaacaaacctaatattaacaaccataccacaatactaatccaacaagcccaatattaacaacaatgctacacaatatgcactataccgcccaaaattttgaaatagcaaatcaaattccttaatatgataggaagtgatacttacaaacccaaagaagcatttactccacctccattattgaatgtccttgaaagcttgaggttgaagatgaagaataatagtattttcggatttgggatggtattggagatttttgggatggtttttgatggaaagtgaggattgatgagtgaaagtgggttttagatggattgggattgagaaattggattgaagatgaaagaattgaagatttggggaaggaaatttgaaatttttgattggaaagggttagggtcggctgagagaagaaggaatttgaaattggtgtagggttgaatgggggggaaaattggggtatttatagaaaattgtaagctggtcgcctcccaagagcgctgtctttatcgtcatatagccggacgctgagctgttgtctagagaggcaccagaataatggcggacttggctt

SEQ ID NO: 57268 - DNA, 1624 bp, Cannabis sativa
aaaacatatacagaacaagaaagacaacataatgaaacaaaattaagactaaacaaactaaaatgcaaaacccacaaaagaacaaataaaattgatcaagacaaattgtagccttaaaactctaaacaaaaccaaacgaaatgctaaaatgcaaaacctagaatagcacaaaccagtaacacaaaatcgagaaaatgaaaaatacaataaaatctgaaaaaaagggggaaaccaaaaagaaacggtaaacaaaccccagttcgaagaccaccaccaacattatcgttttttcagtaacatcttgagccattttttcttgggcacccaccttcgatttcttcttaggaggagctcgcccacgcttagataatggaggagcaaaatcagaatcatcctcctcaataatagcacgtttacccttgttcttattagctaatgatttcaaacccattttagagcttttcttttgaacaggggaaggagatgatgaagaacgggtcacaaccatatttatatacggattgagaaacaaaaagaaaagaggaaaaatagttatgggattgggttactgggagttgaaaaaaaaaattgaagaacaaaaataggaggaaaaatggatgtgggattgtggatatagaagtgaggttactaattttttttaaaaaaaaaactgaaaaagaaatgaaaaataataggaaaaagaagaaaaaaaaagatggaagtgattgatggttaattgatgagtgataggggtgatgcacgtgtctcatgcatgggggagtgtgcatgtggtatatgtgtaataaagtaaagattaaatgtaaaaatgttactttaaccgtgtgtaagtatttatataataaagattctattttgtatttttgatgtaaaaatttctataatttttaaatgaaggctatttttaattcgtccttaaaatattaaatataatgtattttcacattatatttattttaatgaaatactaaaattatacttataaataattttgtttacagactacagtgtctcaccaaattaattagtcagtactgtatattacactattcttttttttagtttttaaaaattaaattatacttttaagaaaaaaaattaaataattatatatatttagtattaaaatatttttattatattaataaaataatagaataatgaataatataacatttagtataatttttagtgttgtgattagatttgaaaaaaaaaatagtgttgagataataattttttggtattaatttaacatcaaatttaaattttatcattggagatagcctaaatacatcatctaactaagtaactataatggctatatttttttataacataatatacaagttattagtgttagaatatttaatgtggactaacataattaagtgttgctcacttagtgtcggtattagtataatgataactatataatcggtaatgcatggtattaacatcgggccataatgagatgaacataacgtactaatacgctccgggcccatgaacacactctaaaatgtctttggtcagcccattggaccaagaacattaatactttcacattgggcatgtcggcccattgacccataattcctcatta

SEQ ID NO: 57269 - DNA, 1604 bp, Cannabis sativa
agtgcacgtctcatacaggtgaggtcgaaccacagggaattggattgaataccatcaatatttttgagaattaataacagaataaaaattcaagaagcttaaatagacaaatagaaatgaatcaaaatgagaaaatagggaagagaatcatgttgataggtttggccaattgttaatgcctaattactattcccaattcctattgtgaatgactaattattcaaattaacctagctcttttcagatcttctaggttccaaatcacattctctctaattaatctcttaattagaatcacatgaaatcagcattaagcaataatctaaattgtcacataagtcatgcaaataccttcgtttcacataaacctaggttatccaaattttagcattctcaattctcactttttatatttcgaattgagatcatagaacatgcaaaaggtgatcaagcttaaacatggaaataacacaaataaggataatttcacagtcagaatgaacaggaatgacaattaacattaactagggcaaactttaacaaactttcatcatcttccctaaatgggagtttagcgcatgttcaaatccataaccattccagaaatagaatttaacataaagaaattaaaaaggaaggaagaaagaaattgttggtgaaatgaatctgggtctccactttgctcctccagccgctcttcactgctttatatttctcaaaatcgcttctccttaattctcttcgcagttttctttttatttctcgttcctcggattcaaaagacgaaactgcccttactttgaacgggatctcgccgcggccatggcttccctcgctgcggcgagtgatgatgtggctacaacggtggaacagctcgcctcggctactgacactagctccaaatcgtctttctgccaagagtatttagccgtggccaggaataaatctgccgtggctagaaatgctggaaccctgatttctgcatttttcttggctcaacttgtcttttcatgcacttttaaagcccgaagcttccacagctttgagaaacctaaaaacatagaaaccaagcgtaattctgtcctaaaacatcaaaaagcgaatataattgtgacccgaaacataggctagaaatagcctaacaaattcccccaagctgaatctttactcgccctcgagtgaagctaaaattaaaacttaaaagaaaaacaaaacgacgcactagataattgaacctccaaatagttgaactaccactatcacctgcacaacttcaatcaattgaataaccagaatttcaactcaatcactctaagaattaacatggatgcacaagttagaagcaatcaattcatatagatacaaaacacctctttggaagctcatatcataaccaatctactctttccaacattccgccaactaatgttcaatatgcttgcatgacctacctctctccactaatgtcaacaacccttgctcagaatcaaaaggtctttttcggttgaaatgtcgtggcttaggtaaaaaggatagatgaaaagtcatttaggctacattataccatacgcagaacatatcaaacaagcacccacagtcatcca

SEQ ID NO: 57270 - DNA, 948 bp, Cannabis sativa
  modified_base (758)..(771): a, c, t, g, unknown or other
taaattaatgacaacttcttgtgtctagatagtttgttgttttactcacaaataattttttattgtgactaaaagtctcatttagtcacaaaaaatttatgttgtgactaaaaaaaataattttttatagtgtttgtgtaaaatgaaactcaatatattcttaataaaaatgttaatttattgtagttttgtattaatataaaaaatttatactcatttgttattatgtatttttcaaaatacaaatttagtataatgtatattaacaatggctatatgctaatcgtacatatttagtactctaaaattttaaactcttcaattatatagttttaaattttaatttaattatttaattacacataattgaaaataattttattaaatttataaaattttatttaataaattttaaataggtatcaaataatttaaaaataagacacaagataagtactattaaaaacacatgtaccaaacctattacacccaaggctcctaaacttgttaagactccttaatttgaggttgtggtgcaatcactcaagctagtttaatattgttagactatgagtaagtttcactaattatgattgaaatgattattattttttgttagtgactaataactaattaatactttgaaaaaagaaaataaaaagaagaataataacaaaaaaggtaaatactattttggatcctgtgttttgcaaaaattaccaattggaccatctatcttgttaaatgacaaaatagannnnnnnnnnnnnnaaatggtacaaataggaccctaaattgatttttttatcaaactaaaatctaattataattctgaactgtttacattttctgtaggggtgttcattggatcacatccaatgtttttaggtccatccagatccgatccaattatatattggatatttggatgttagattttaccatccg

SEQ ID NO: 57271 - DNA, 791 bp, Cannabis sativa
ctttttgccctacacacaacaacaaaacaatcaatattaccaaggtcaaaacagacctttcaccctgagtcaaaccgcggttgactcccaagagttataagccaaacgacaatcttattccaaagacgacaagttgttttaaggcgcctaaccctaataacccaagaacatttgcgaatcacctcatttcactcacacacacaaaacacaatcaaaaccctagcttcgagtttctactccagaaacttgaagactgccttctacctagaaacccaacaatcaacccttcccatatcatattaaaccctaagaacacacacaaacacataaccacagtaataaaagcagaaagaaaaataagaaacagtgcaccaggattttttagacgttccccaacaatttttgggtacatcctcttcgagctcgcctcaaaaaatctctttccactattggatcttcaagatcaaagagttacaaagctagattccaatcacatactggtacgattggtaatgcttattgttttacagtgtttatttctctctctttctctctgaatattgtactaatcttccccttcttctttctttgtgtatgtccttcctttggtttggatcttcgagccctaaattttgggctccaagacttaacctctgggagtctcttattcctctccaaatttttctgatctatctgttccatttgttctgagttgatttgcatgcatatagcttgtagattagcagagagagctaagagttagttgcaacagttttaacaaactttgcaac

SEQ ID NO: 57272 - DNA, 2323 bp, Cannabis sativa
caattatgttgtttggtgcattgatcttatgctttaaatctacacttactgtcctaactaaacaatttattttacaatgagaatgagtcaatttacaaattagtgaactttaaacagttgaaagaataagttttagtttacacgtggtacaagtgttaacatcaaaataaataacttggtatttttttatcacacagtactttaattttattttttttttcaaaattaatatatagcccaaaaaacttcagagagagataatgatgaaaggaattgacttggtgtttgaagtaaaatttataatacttgttacctagtagtggtgattgactattcaacaaatgaattgaaactatacaagaaattaatgaaaacacttgacggtttatggctttcttttctttattagttaatgatcagtacatttacattaaattatgacttgggatattttgattctattatttctcttttataatttgtatgactatgtaatgctattcaccatatttacaactttggaaacatacactaaggaaacattatcaaaagcattacacatgtctaaaatctcttgaaggatattacctaaataaaaatcagataaagacttacatccctatttttccaagtagctcaaacatccctacaattgaatattggacagtttttgtttcttttttcttttactgatttatgcaaggcttaattcaatcaattgagaacaatgggaaacccattattttctattgagaataattgataactatagtgtcatcaacttattattttccatttgaagttttgaagtattaggcaaggccccacttagaaaggactataatgaatatatatatatatacatatagtgtgaggaaataagtaagaaatgtaaggaagaatagttacagctacttcaacaaactcaagtaagtcaagtacatcttgaaaattcttgaatatatatttttgtgatctttttctttttctttccctaaacaaataaattgtgaaattttaactgccacagagaaaaaaatggaattttagttgccacaaacaatattttaccaaccacaactaactatacttatcttcatttcaaaaaaaaaaaaaaaaaaaaaaaaaaaaaactatacttatctttaatcaattattaccactaaactttatttttttttaagtatttactgtaatagttaattttcataatttgagcatcctatatataatattttataacatattgtttcatataatattgtggtgccgatcaagaggtaacaattaaagaagcaaaaaaaacaaagtgatggaaagaatatgacaaattttttcaagccgacaaaaatagaaaaaagggaaatgggtccctctgtttctattcaaattattaaataagtaattatttttattttgcaacccacatgccaacaaattcataattcacaccaccacatggcttaaagaatttcctccaccaccacactcccaacaattcaacaatcgtctctctctctctctcttaaataaatattttatcctacttacctgatacatacagagcaattagattatatacagagaacaatagtcattatcatgttccacattttcaagttcactcaacaactccatatatatatatacacactttattcttcatcttcttccttcagctaagttcagtaatatatatatataggtttttcttgtcttttctttttttcttttatattatgaaagaaaataaaaaggaacagatcggtaaagatctggtttttatttattctgggcatttcagtttctaggtaagttcagtcatttttttttttgagtagataaaacttagataaaacttagaaaaatcagcatagataaaacttagcttggttctaacctcttcgtagctggaacagatttatgggcagaaatgcttcgtggtcgtcctcatggccggagagggaagaaatcggggttgggcgacgcctctgacgagatgagaatgagattggttttgtatatgggggtgatggatttttagagcttatgggttttttaggacagctgggttttgtttatgttaagagaaaaaaaaaaaaaagagtacaggcggggctttgtaaaatttttggtatataatacctttttggcctcggtttataactgagactaaaggtgtttttaaacttttaagtctcagttattaactgacaccatagaggcatttattttattttttttaactcttttaatttcggtttaggctttagtctcggttgggtaactgacaccattactttttttaaatgtcagttataaa

SEQ ID NO: 57273 - DNA, 705 bp, Cannabis sativa
gccggcgggccttgttggtggttccaagtgggtagctagttttttgtcctcttttgacttcgacaagaatccgactctgtaggctgataactctatgaaaatagagttatttagctctttttgtgcattaaattagctttattctcaaacatttttagtttattttagtagtctttttatttaattttgaataaatattaattttagttctttatatattaatttttataacttttaattaatttatttaatttttcattttgtaagtgttaatctcaatgttgtgtatttttgtaaaaagattaaatgtatatttttgatttattgttaaaattgagagaaatgattttttttttttttttgaacaaaaaaaaatatggaagcacaaatatttagtacaaagtattcatccacactaaagctcacattgtagttattgtttgtagtgtggataatgcagaattaaatgggccaaatgactcgtatgtgaacccatatgaaaagcaagcttttgtaatatatatgggaaaaaaatggaaaattgggccagcaaagtcatgtggagggcttgctttggaagaaaaaaatggaaatgaaataaagttataatatatatacatatgaaagaggtttcaatggttacatttttattgtacccatcatggttacattttttttaagtcattggattactattaaatggtt

SEQ ID NO: 57274 - DNA, 2099 bp, Cannabis sativa
  modified_base (1112)..(1112): a, c, t, g, unknown or other
  modified_base (1474)..(1477): a, c, t, g, unknown or other
  modified_base (1754)..(1756): a, c, t, g, unknown or other
ttcaagggggattcttaacaagctttatattttaagggccaaaatcaatattgtcgaaagtttagggggcaaaattgctaattattctatatattttttaattttacatgttattatattgtaacaaaaacgaataaacatattagatcattaaatatatagaatggtatttaatatatcttatcactgaaaattaatataccatagtaataaaattatatagtacaaagaaattactaatatatatatatatatatatactatattaaccaaattatataccacaattaaagtatatatactatgattacaaaattatataccaccattgtatataataaaataaaaactaattaaatattattttaaataaataatatataataaaattcaaatatataaaaataataatcagatatatgtagcataccaacaaaattatatacatacattaatatgtatgtattgtgctaacaaaaatatatactactataatacataacaaaataaaaaataaatatcgtatacgaataataatatatcatacaacaaaacaagaatatactgtacaacaaaatctacatactaacaacccacaacaattcataaaaaattaaaaaaaatcaacataactttcaaataaaaaagattttacaaaattaatatagatataccataatctttaagtagtttacttctaattcaaaaatattatgaaaaaaaaattattattttttttttatgtggcaaaagacaatataagtaataaatagtctaaaagggtcatttctctataaattttaaaatgaggatatttaataacatagtcttataatttgagatcatttgctataatttcttttttaaaggtactaaaaatgtttacatcatctaaaaatataatattttattttatttatcttctacgtcatttttgatactcttatttctaaaaatactctaatagtataacattagcacccttcaaaaatactattattataatctcacacattattatttaatatattatttatttttaaataggataaatactattttagaccctgtattttgtaaaagttacaaattagaccctctattttgttaantgacaaaatagaccctatattttcaaaaattgtacaaataggaccctgatttcaatttttaacaattttattttttaatataacaaattttaggacaatttttaatacgaacaaatacagaaaatataatcagttttgtcataacatctctagatcgaattattattaagttttattttgacaaaaaaccagttcagaattctatttgtacaattttaaaaaatacatggtccattttgttatttaacaaaacagagagtccaattgatatcttttgcaaaacacatggtccaaaatagtatttactcttttaaatattgttacactacttatttacctttaatttattattattattattnnnntttttttaaaaaaaaaaagagatagcatcaatgctatagaatggattaacacaattttctatgatagtaccaatttatctccaatggtatatctttatgttttgctaaataagcattccacataattatcttccaaaatttaagcattagagaatggtctgtactaattgattatcctcttccttagtcatcgtttcatttcttctttatatttttatttcttgggaaatttgcttctattttctttatgcctttattcttaaaaaatatatatatnnntatatatatatatatatagcaaattaacttttttgtaagggacattgagaaaaaataaaaaagtggtgtcaaattcagggacccaaataagactaagactaaggtaaaataatttagaggctcatgcctaataatatatatggaaatggaatactattgtatttatctgaatttgataagaacatacacctatttatctagtttttatgtcatgcatgcctacgcatagggtttgcataaatcgatccaatttaatgagaaccgaccgatctaattataaccgatcgctaaacattggatatccaattgtgatcagatcggattggatgttatttttaaatat

SEQ ID NO: 57275 - DNA, 1375 bp, Cannabis sativa
  modified_base (541)..(552): a, c, t, g, unknown or other
  modified_base (605)..(611): a, c, t, g, unknown or other
attataaaacaatattttaactctcataactaccaagtaaataatcatataacacaattattataactatcaaggtataaaaaatataaaggtacaccaataccctttttttcttttcttttaatgagttatggacaactcattattattattatcttaggccattttcaattattatcaaggtataaaaatttaaatatgatgtagttttttcatcaaaagcgttcaacattctacaagtatttttattttggtgatagtttatagtgtcccactaataataatagacactagatcactccatttttacttttaattttactttttaataattaaataatcttttttaaaacaacaaataattatataataatataataataaaaaatatatttttttaatattgtggttagaattaaaaaaaaagagaaacttataaatttactggaatttgggttaatttttacaaaaatactgtcacacggaaattttttcaaaaatactatgtttttataaaacaccagtagaacacaaaacagannnnnnnnnnnnaacagtggaacaactaaaaaacaaaagtgaaaacttaacacagtacacagtannnnnnntacacaatatttttgaaaaaaaaacacagtatttttttgaaaaaaattccgccccacagtataaaagtaaaaaaattaaaaatttcagtatataatgtaattatcccaaaaaaaattagtgttgaaattagggatagacatccgatccaatctaacattctcatccgatccaatccaattagtaattggatttagaaaatcatcatctgatcaatctaattagacctcaaaatccaatctaatataatccaattactaattgaattggattagttttttaattggatatctagttacacacctaaatttcaatattaactctgctagatgttcgtgtggtctagaaatggtggttcgtagttcagatggggacatagtcgcgttggcagcttggaaggtcgacggttttctcccaccggagtgggctgaaacccttgctattcaatatgtggcatctcaatgtctcacttttggcatccacaatattcaattcgaatctgattgcaaaagcttggtcataaacttaataattctttagtattagatacatctttgggtttaatattagagctttatgtaaacatttaatattgtgtgttttagtcattgccctagaattgttaatgtagtagctgattgtcttgttgttgttaaatttgtttcaacaactattgctagtatagtctaatggtctggatatcctatttgataggattgagatgcaaaatgaccctaaatttggtaactaagttagtaaatgtcca

SEQ ID NO: 57276 - DNA, 5896 bp, Cannabis sativa
atccacataattattaatatttataacaatagcaatagtatttcaaaattataaatatataaatagtacttagtttgcaaattaaattttaagaaaaaaactagaagagacaatgaaagattagacaatgccttgttttctatttcacagtcacaaactacaagtacaacacagtagttttttgtgtatttaatttaataatatttcacgtcaaacttacttcttaacacattcttaaaacatagaaaatatatacatattgtaattacctgttgcaatagaggttgtagtgctgtggttggttgtggtggtgatggtggtgtaggcacataaattggatcagacacataaatcgatcatctttgtgcccaattcgatttaaatttactaatgtgaatccaaaatcttcatatataaaaccattgtcactcttcacccaatcacaaaagaaaactggtactcgtgttgtaatgtaatccaactcccaaattttattaattactccatagaacgtcatatcacatttaattggatttttatctttggatgtagaaacttggacagttttagcgacaatgctaacaccactatttggcgtagtcttgttgttatcacgctttttagtgttaaatagagtaccattaataatataagatgaaaacttgataacactaagagaaggacctcgagaaatccacttaacaatgtctgacacattatttcttgtgtttttcaattcactcgcaacctatgaaaaattcaattgtaactatcaaacaacatatcaagcaaatattactacatataaaccaaacaaatttacatataatataccttctgatttatccaagtactaaaagtgcgataatgttcatcatgtaaccatttagagtttctagacttggatggaaattgcaatttgatccaattaaaatgatcccttcatatatatatatataaatacaaccattgttagtaaatgattgtgtaaaatttcattaaattcacaattaataaataaacttactcgatataaggctcaatttcattagtattttgtaatacaagacgatgtgcttcatccagttcatcttgtcttactgtacgtacaacactacctcgtctactttgaatctcaacattgctctgttcattaacgccaatgctctgtacaccagacaagtattcagaacaaaattcaattgcctcttccgcgatatagcattccacaatgcatccttctggccgacttctattcctaacatatcctttaagaattttcatatatcgctcaaatgggtacatccatcttaaataaacggggccacaaaattttaattctctggctaagtgaattgttagatggaccattatatcgaaaaatgcaggcggaaagtatttctccatttcacacaacacttcaacaatttcatcttttaagtcggataactttagtggatcaaccaccttacaacacactgacttaaaaaacaaacataatcttgtgatgatctctcgaagtttaactggtaagacagatcgaatcgcgactggtagcacatgttgcattataatatggcaatcatgcgatttcataccacttaaagtacatttgttcatgtctaccaatgagcttatatttgaggaatagccgtcaggaacttttatattatacaagcaattgcaaacttgcattctttcatctttagtaagagtgtaagaagcaggtggcaaatatgttcgtccctcctctgtttttggatgcaaatgattacgtacacccatgacaatcaagtcttgtctagccttaattccatctttagtttttccaggaatattcaacaaagttccaattacactatcacatacatttttttctatgtgcataacatcaagattatggcgtacaagtaagatttgccaatattcaagctcaaaaaaaattaatttttttttataacaacctttgggctcctccacaactttgggtttccaacgaacctttctctttgtacgtataccaactcgaggcttccctaacttgaatgtgattctggacattttctcaagtacttcgctaccatttaaagggtgtaatgaagcctcttctagctcttgctttccattaaatgcctttcgccatgttcgaaatttatgtgtactacgcaaccactttctatgtcccatgtaataaattttccttgagcgtttcaagtattcagaacaagttttctcttcacaaacaggacaagctctatatcctttcacactaaacccagataaatttccataagtaggaaagtcattgattgtccataataatgcagctctaagaataaatgcttccttcttgtatgcatcgtaaacattaacaccttcatcccataaaatttttaagtcatcaatcagaggggctaaatagacgtcaatgattaccaggttgtttcggtcctgatattaataagctcaaaagtataaactttcttttcatacacagccatgggggtaaaactttaaataacaagcataactggccaacaactatacttgctgctaagagaagcgtgaggattaaacccatcagtagaaagacataattgaagattacgagattcactaccaaaagcaggaaacttcatatcaagtctctgccaagctagggtgtctgctggatgtcttaatttaccatcttttattctctcgttagcataccacatcagattttttgcatgttcaacacttctaaacaaccgaatgaaacggggagtaggaggaaggtaccacaaaaccttgtcaggtattccttccttgacatcgtcaccattttttttcttttgccatcttgactcaccacaagtaggacataattttgcatgtacaaaatcattcctatataatatacaatcattaggacatgcataaattttttcatattgcatgcctaataagcacaatgttttcttcgcctcataaaaggaaattggcatttcattacattctggcagcaaatctttcaaaaaaccaagtagttcagttaaacttttatcactccagccatgtctagcttttagattgtacaacctaagaagcgtagataacttagtgtattttgtacaactagggtatattggtttctcagcatcactaagtagcttctcaaacttatttgggtctatttctgatccataatgtgcgtcatcaatcatatcatctagtgtatcccagctatcatctactttattcctctttacttcctgctgtctacttggtggagttataacaacaaggagtctctccccatgcttgtaccacttagtgtaacttttgtcgatcttattaaaaaataagtgttgtttgaccatactcaaattcatcttttttatatttccacacttaatacatgggcaacaagtaaaatttgggtcattcacattttttgaacaaaatgctaagaaacaatccaccccgttcctatattcctgagatatcctatccgcgagcatccattttctatccataacttgtgttctgcatatgaaaatgaaaaacataaaaaataagcatatatcgagttaagatcatacatcaagattattgatattacaaaataaatgctactaaaaaagctacagagcatttcctctatattaataactcaacttatatcaaataagcacataacacaatttaagtaaataaaaagtaattcatgattcttaaaaaaaattagatagcatttcctctgtaatagtaacatataacaatctgtaaaaagaaaaaaaaaataattaaatacaatagacaataagtttctttcttatatttctaccgcagataaatttctctgatgctatacaagtaatcaaccttctgttatcaccgcaaaacacaaatttaatctcagaacctacttcactacggatgaatatctaacatattcaaactcttctaacagttttataataatactaaaataatgaataaaagaatattgtacatacctcctcttgcaatttattatattcaagaaaattacttctctaagtaattatcctttctaatacttcaatccaaaacctaaaagtaattgcatcaagcaaaaagaaaacaagcattcattagaagaaaattattgttaaaagtggaaagcaatccacaaatgagaagtattctataaataaagatttttttaggtaaccaaactaccttaaaagtccattataaaaatatctttaaatctttttaatatacaataacatatatttatatataactatgtgttatgtatgaagcaagtttggaagtgaggaccagttatcccactccctaatgaaaaaaagaagaccaaaacccatactgaaagtaattaatgctctttcccgtaaaatagattttaaactatattaagtatatatggcatagtataataccactatgaaatacacgctagaaaatatcagatcaatatcctacttgagcttagactaaaaccaatgatacaaatctcaaacacctagactagactatattcaatcgtaacaacttatctgaagtattggaatctcatgagaaatgtctttttattttagcatacaatacacttaaaatagtttaactaacgattcaaataataattagaatcactaagatttgaatgtctatggctcctaataagtgcttataatgcaaaaaaaattacttttttttttcttcaggtggttctaattaaaatttagttgatataaattcaaatccaaggagttttaacatctttgtgaaactgagagatgcttgtgttatatatttgacgttacctcacaagcacaaagctacaaccacaagctccaaagaggttaaagctcctttgtcacattgtcataaactgttatgtacccaaacatacatgctatatttcttactttcctctataattctcatttctaaaatcaaggaaggctaataatgtgttgtgtcaaccagaaaattttagttttgacaagaaaatatattaatacataatgtttgcaggttccctaatccttcacagcaatcaaaactttctttaattacttaacttgatttgaaagtcagaaacttgattagtttatgtagttactttcctcaaatctttctagggaaagttttgtttttgagtttgacatgacaagaaaaaaagctaggagcaaagacttcattattaaagtactatttgaagtaatattataaaaataaatataaatttttctataccattttctattaaagcacaggaatgaattcattattaatgcacttttttcactgtcaagtatgagtttgccacactattctaaatttatagagtattattctagcttagaaaaagtagggtataaaccacatatgccattttcaatattagtacaagagcatatataacaattaagaaggttcaagaaaaaggaagaaaggtttatgtagtttgttgctataccatattacttggagccaatgaaattaataaggacctgcggcttacaaaactctaattgggatataagtatacatgtacacatggtttatagaatggttctaccaaataagttaatatatataatccatgtgtgtacatttgtataaatagtgccaaatataaataagcacgaatgaaaacatgatgaaaatacaatgaacaactcataactagaaataacatcaaaatatctctaacacacaaattcaaaaataataaaatcctttctttttattactggtacgaagaccaaacaacaagcagtacaaatttaaaagccaggaaccaaacgacaactaaaagaacacatccactaatactacacataaaaacaactacatcacgaacacaaggccctaaactagacaaaacagaggaacaata

SEQ ID NO: 57277 - DNA, 698 bp, Cannabis sativa
tctgcaccaataaataaaaaggctattgctaaggtaatatttttaattttgttattggtgtgtatatatacattttttttgttatagtgtttgctggtatattataattgaagaaagaaagcaccttgagaatttggttagagttctggatctggattatatttattgttagttctcaatcatctgcatatgtcactacaggcattgcaggatgacagggatagaaggaagagactcaaccttctccaatatgaagctgtatgatacttgaactttgttccttggtaatttgtgtaggtcagttatatgtgtgtttcctgtgtttttcatcttgcatgtaactgtttctgctgcagcaattgtttgtgaggaatggcaataactactccttcaccctgccctttcttagatagggaacaaataaggttttagtttgtctccatgtatttatatgcaaattcaactcccccattcaccgttagttatttcagctgttaagctttcagtacttctataaagatagcagtcaatgtcattaattcttttcttcaagagattgaattaattgaactgttcatttcatactttattttaattttctttttttcttttatatgtatataaactttatttccaagttgctcaccttagttactttacatgctgcaagattaacaaggctgtgtgaaatatttttt

SEQ ID NO: 57278 - DNA, 2615 bp, Cannabis sativa
tatctcttggaaatcgaaaaagcagcctaccatttctcgttctttcgttgaagcataataccgggctatggctcatgccacttgtgagatcacctggttgttggcactccttcgagactttgacatccatcacaaagatcctactatcctttattgtgacaacactgccaccatccacatctccaaaaaccccgtattccatgaacgcacaaagcacatcgagattgactgccatgttgtttgagagaagatccaagaggacacactaaagctaattcatgtcaccaccaaaaataacattgctgacatccttaccaagcctcttttcccaagctattttcacactattgtaaccaagatgaacttaaaaaacatatatatttcatcttgagagggggtattagaattagctggcccattactttcagcccatttgcttcacgggcttcctcttctcttgccctatatatacttcctattgtattaacctaattgattttttggcatttctgtcgttttacatagtagtaaaataaagagagttttcacctctatcattgtatggtattaatatgtgttgttgagtagggttgtgtttgttataattttttcttttgttttaaaatatatatattgtgattttaccttcattatccttaaactgttttgtatctttatcattttttaaaaaatatttttcttatactcatgaaaagtatgagacttatttctcaatttttgaaatccctattgttatcattattcttgtttatcatttataaatatgtaacattaagcatagatagttttaggctttactaagcaactacatcttctcttataagtcttaaatttaatttctcggttgaatatagtaatgaaattgagcaatttttttattttaaaaaacctttaaaaaaaataaagaaaaagaagaagaattgattaataaatagatgagtaaatataataaatatcaaacaaataagatatattttcttatactccataagttcatatatcatgtttttattaattgaatctatatattcaaaatactttggatggataaaaacaaaaattgaataaattaccataaaaaaaaataaaagtaagtagaataagaattataaattatataaaattgttacatgtataatatatacatgtgatttaatattgaaatacataatgaagaaagatatgataaaacatctttatgataaataaataaacatgtcgtttgataatacttttgtttgtaaattttttaatcacaaaaataaaagtaaagctttttttttttttaaaaaaattatttttgaaaaataaaaaatatgctctataaccacttttgttttttcaactttaaaaacaaaaaacaaaagtgtgttatgcatatatcatttttattttcaattgttgattttatagggaggccaggattgggggcgggtccaagtctggatttagttttcaaagtctaattaaattgaagtcggagtctaaaatattaactaaaaataactatttgaaaaatttttgaatgtaatttttttttttatttttaaaatttagattcttaattaaataattaataagtaaaaataattttatagaacatgattttagattttttttttacttttttaattttaaaaataaaaaactaattaaaaaagtgttaccagacgcaccctaagtaaattcattagattgaaaatcaaaagctataaaaatactcccattcatgaaactaaaagtggtacttttacctaagaagtattctatttatatatatatatatgtataatgtatcagaaagaaaaatatgaatttatattatgattgacttctgttttaagctaaaacaaaagggatattggctaaactacctgaattttacggtttgtaacacttaaccacaaaaaccaaatttttggcggctaaactacctaaacactagctccgttttgctctgcacacctccataaaaaaatcacaattaagtgccacggtggactgtccacgtgcacacacttgtacacgtggcaagtttttagtggtccacgtaatattagttttaaaaaataattataaatatttagaaataattaaaaaatcagaattttttttttctttttttactttttttaatttaaaaaaattaaaaaattaaattaattttgcattaaatttcatgccgttggtttcttaagaagattgtatcaaaagattacccaaattgatctgccgggaacaatcgttatggtggtaccgttcaaccagttgtgaaacttcgtcctccgtaagtgggtctccgagaacccaactccgctccttcgctagcttatccaggttagcgacctttcgggccggagcagcagttccagtccatttacggtcgagctggtcggggccgaaaggtgagaatttaggggattctcagaatccgatgggttcgacggagggattagacttcgaatacgagtaaatgaaaatcaaagggaagatccgacttgagaggttgttgagtcggggctttcttgggtttggggtcatcgtttcgaggttgggttttcttgggtttagagagaagagaaaagggcgggtcg

SEQ ID NO: 57279 - DNA, 1013 bp, Cannabis sativa
agaagtatggggtctttgagaatccattagttctttcccaaggtgaagtgtagtttcctcaggacgacttccattgttttgattgttatcagccatggatagatttttgtttgtaaggagggatttttttgagttttatcacgtaggctctcaatgaaaccactaaactgttaatgtatatttttattaaccaataataagtcttttcgtaataaatatatcacagaaataataagaaattaataatgtataaataacactagatattttttacgtagttttgcaattaaatatgcatactccacaagtctatcttatttaagatattttctgaatataagatacaatatacaattgatcatatatattttctctctcaaattctccgtccttttttctgtggaatctgcccctatatatttataagaatataggttggcaattatttacattcaattcaaaatataaccattgatgaaacataatcaattcccatgtttcatttaaattgcatgtggataatacttgataaccgcttaactgcttgttattctcatccttaaagatgatcaatgctaatttggacaactgtatcttgcttatctctaagttactatccttagctattataatgtagaaaaaacactaagtgttagcgcaaatgattcgtctcgccaagtttcttatgaatagtgaggtgatggtctcgctatacgtaatttgaggttgctttgcataaccgtattcattccttcgaataaataaattatctccttaattggatctgtgtacttccgaggcatgcatgtgttcatcaatataggttttaatattatctcgcttaagactacatagtcagcgagttatgaatattttctatctttatttgatgagttattcttcttcctttcgcattaaatgatataattttattatagggtctttttcatttgtacacttctaaacttttttttttttgcatttttacagaattttatatagaaacccctatt

SEQ ID NO: 57280 - DNA, 1068 bp, Cannabis sativa
tttatgaacaaaaaaccccataaagttattgaaagaatgagtatgtattaaaaagctatgaccaataacaattcagcaaaaatcatacgtgtggcaactttctttgcacactcaaaaaatttactctctcatacatatattaaagagaagtgctatggagaatttttttttttttactctcttttacactcttaatataatttagcgataaatgtcattttttaagattactttatttgcacttagtagatataatattattaccttattacaactatatcataataataaaattaacctactaattttttactaggacaactccaatcccaaaacttaaatttagaattaaatcaaaactaaaagaatattattttaatactatttttttttaataatcacaatactaaaaattacattaaaatctatattcttttttataatgttattttattaatataataaaaaggtttacttcataatgaaatatttaatttaaaaaaaataaaattgaaacattttatggaaaaaattacactaaatataaaattttaaagtgtcattgaatatagctttaatttgaatatatattagaaaaaaaaattctttaaaacaaaattataacacatgtttataattatttcgcaaaataaatagtcacaacaaatatatgtgattattattttatttaattaaaaaaatcatgtccaactaatatagattaagagataatcatttatttttactttcatctatacatatatattatatttatgtttttgtaatatgacctaaaaaaattttaggaaaaaaaataaaaggagaagatctaataatttatccaatcaattatttagaaaaaagtaaattaattttattttattatattctttttgatatgtatacatatcacataaatattattacatttttgaaaatcttattttctttattttttaattttctaatttatttatccttttaatttatttactgtgttctgtttatattgttttcctaaaaaaaattaaaagatttccaataaactgtttaatagttgtcataata

SEQ ID NO: 57281 - DNA, 774 bp, Cannabis sativa
gatgattctctcaccctaataatttttatcgccggcaaatagaattcaactatttggcctgcatgagtggctataaaaataaactgaaaataacttcaacaataaattaataaatcaatatagtgtactcatatttaagttttttaaggttagccacataagaggtgagtttttcaatttcatttgctcattacactgtccgaacatgcttgtcaaattacaaagcaaaaaaaaaaaaaagaaagaaagaaaatgaaaggcatacctttcatgttaaaaggagccagagaagatcctcagacagtggttctccatcacacttaacaacatgtaaaattcttcgacattcaggaatagataggcccctaaaatggacacccaacagaaacatacataatgaagataggcaaacataactataaactctgattgcaccaaaaccaaagtaaatatgtaatattctaacccagaatttcaagtgtatacccttctgggtcaaataatgaggtttcccatagcagtccagtcattcctctcattccaccaattaccttcctaaatacatatataagatgtaaaatatattagtttacaatttacacaagataacttgtggggcgatatattttttcacttgtaaagtattttgattacaatgaacattcaattttacactaaggaaagtgaaaagaaaaaacaatatttaaatatcaacagtaatattgcccaattgaacctttctacgttctgactttaatgtcttcaactgttcct

SEQ ID NO: 57282 - DNA, 1336 bp, Cannabis sativa
acttttatgtagttttcttgttgattttatgttactttcgtgttattttttagaaaactatgaaaatgtaaaagaaaaatattctttaaacgtaaaaatataaatatttttaaaaaaatagtaccttatatgtaattattttaaattattttgtagtgttagagacactttaaaatgcattttttagcatttctcttctcaaacaatggctcttaatctttttatatttttgctaccatatccaattattaatttttggaatagaatttagttatttatgttgcatgtttgtttaatatggaacaaaatatttaaatgtcacattttaaattctttataattcttaaaaaattaataaaatatttgttatataattacaatgtgcataaaatacttaaaaaaaaaaagaagttggactagtaatcatttttagcatgggacatacttgaggcttgagcatttgccactattatttaccatacattggaggcacgtgagaggcacgtgagaggcacgcgcgcacattgattagagggaaaatcttttttgattttgtacgtagaaagtagaaactaaagaattcattaatgttgctatcttgctccaattatccaatagatttgacatgtgacaaggaagcattcatagtagatgtctttcccttatggacctctagtttttgtatgttcaatttagtgctctttctctttcatctcctttggatttcttcacatgagataataatatttgtttgttattgtttggaaggacattacaatactttactatagttaaggagtatgcatatacatttgctgcaaattaataagggatgaatttgcattcttttagtttaaaaatacctacatagttcccgccatactaaggtgtttagggttaagaaagcgttgagttagatcaagaaaaaaaattgacgttatgttatggtattgtaaattgatatatagtctggtaattattcaggccattagttgctagttactatatgccatcttcctttagcctttaggtaactaattacacaattaaacatcttttagcttccttggataatgtcactttatgttttgttaagcatgctttattagattggacattgtattgctcgcaatttttttttattttttagctcctagtgaacattctattaattttaggcaaaagtcacatgaactttcctttttctactcaaaaaattatttttgttaatgaaatatttaatttatagaattactaaaatatattaatgatgttactaatacaatttaatatctagtcttatatattttaatttaataactactataaaaaaaaa

SEQ ID NO: 57283 - DNA, 1183 bp, Cannabis sativa
gtcaaaaatcttatatgccatagtcatcgcaattaattgtaaatcaagtcctaggggaataggccattcatctacttctcgcacttgcttctttgagcctttcttcttcttcttcttcttcttctccaaaacatccttctcaggagtaggattcttggctacttcttgattttcttgtacctctttggatggataaagtccatactcaaggaaattttcattggtaattagaaatgagatattttgagcagcagttggaagttgaagaatagtttgcgcccgtgttcttaatcctaaggtaaaagggggacaacaataacttggagccaagtggaatgaaaggtggttaacatccatgtcttttaagatataataatcttggatgaaaccaccgatcttcgagatgtccttgtacgtcgtgccactcagccattgatactcattctacgaaaaatagaagtagtccgaccgattgtgcctcagactagacttcaaatcaaagagccagttcatatgatgagaagacggctggacccaaccttgtttggcatacaaaacgaatagtgcatctaagtacttcatgcccttcgaagtgaaatgggtggggcaagtcttattgtaatacccaaagattaagaatcggattagcaaaccctaactagttaaatgtgtatgtattatggaattatattattatataatttattatatgtgaattaaattgagaaatggcatgataagaccccgttggtaagctaggggcattttcataatttcgacctgagaggggtaaaactgaaattgattttaattgcgtgctaatggactatattattatatagtatacttgttgtgtccttttgcatgtattttctgacaagtcggcgtgctatagtcagaatcggatatttcgagccaaatcgggttcggggccgaaatacatttttgggattttatattggcatttttatagttgagtgaataacctaaaatttatttgagaatgtatgtgatgaaaatgacattttcacccttgaaattgtggatgtgttatattaaggccctaggggcattttggtctttttgaccctttaattctattttcaacaaaagggattttggctaattatttgtgatatttttctggttctatacaactcaaaaccaactctctctctctctc

SEQ ID NO: 57284 - DNA, 1101 bp, Cannabis sativa
aagccacgatgacctataggccaccctataccactctggctaatatcaaacaagaacctggtgagtctttacaggactattttaaatgttgtaatgctgaggtaacaaaagtagagaaggctcccgagtcttcgctagtatgtatgtgataacaggtgtcctaccgagagccgacttctagaaggaactacaagctcgaagacctaaatcgttggtcgagttctttgccatggcagaaccgcataagaggattgagaattctctggctcagttagagaagggcaaagataaacgtaagtcaccagtgtcgcgatcacgatctcgcagtcctagagggaagaattccaaaggaaggagcccaagaagacgtagtccacagagatagcgaagtccgaaattagctaaatcccctccaaagaaggaattctccccgaaaaggaaaggtggttcacgctttgtaaaatatgcagagttggcagtccctcgggaccatatctacgccattgaagaaaagaacggggtcttcaaaaaacctcccccgatcaggggaaattgcgataaaagagaccctaaaaaattctgtaagtaccacaaagatattggtcacactactctgaagtgtttgtttttgcaggacgagatcgaagagctaatcaggagaggaaaattcaacaaatacaagaagtatgagaaaagtcatccccaagcggatgacaaagaagaaactcaaaatgcgagtggttcgagaactcctcgcaatatcctaactatcataggcagaccccatatcgcaggagattctaggaagtcgtaggagcaatatgcgagagaagccaaagataagccgctcaccaatgtgagcaacttgagcgagtggctggagaagctgttcaaaagggagtgtgacgacataacattcattgaaagtgatgcgatatgggtccaccacccacattctgacgagctggttattgtcgctaatattggtggagataatgtccaccgcacactcatagacaatggaagttctatgaatctcttgaacttcaaggccttcaaacaaatggggttgcatgagaaggatctgcgacctgtgacatc

SEQ ID NO: 57285 - DNA, 952 bp, Cannabis sativa
gcttcaaacaaaatgaagacgaagtacgtgtatacaaatacattaaaggtaatgtagtggtattcctagttcttgatgttgataatattctacttattggaaacagtttagaaaggttatcggatgtaaagaggtggttacccaaacaattccaaatgaaagattgggagaagcaagctatgttctcggcatcaaaatctatagagatggaaagaggagaatattagaattttctcaagaaacttatatcaataaggtgctagaaagattctcaatggagaactccaagaaaggatagttgccttccaaaaatggaatttcactatgcaaggatcaatgtccaaagactcctcaggagatggaggatatgagaaagtacccttatgcattagcagttgagaacgtaatgtatgcaatgttatgtacaaggcctgacatatgcaatgcagtaggaattgtgaatcgttactaattgaatccaagtttggaaccctggatagctattaaaaacattctcaagtatcttcagagatcggtatatctcatgcttgtatatttcaaaatagagttaaatcctattggatatactgattctaattttcaatcagacaaagatattcaaaagttgacatttgggtcagtattaactctttgtggtggagctatagtatggaggactattaagcaaacttgtattgcagattgaaccatcaaagatgattatatagcatcttttaaagtaactacggaagtggtttggttgaaaaacttctacactaatctggaagtagtctagaagtagaaaaatcattggttatatactgtgacaatagtggagcagtaaccaactccaaggaaccaagaagccacaagagatgcaagaaccttgagaggaagtaccatatactaaaagatatagtagaaagatttgatgtgatggtcttgaagattt

SEQ ID NO: 57286 - DNA, 1065 bp, Cannabis sativa
aagatcaacatggcatttggattatctggtttgttcagggtaagaaggctcttcgaagatcactttcgggcataaaagaagcaactttgaagtgttcaaccattccaaaaggctactttgctgtctatgttggagaagatcagaagaagcgtcatgtagtacctctttcctacctaaatgagccttcatttcaagacttgcttagtatggcagaagaagaattcggatatgaacatcccatgggtggactcacaattccttgcagtgaagacatctttaatgatatcacatctcagttgaactgatgatgtaatttgtagtactgacatagctagattcatacaaaacaattttgtagattacatactttcaccatttttcttcaaaagaaaagggatttttttgactggtttgagaaatagtaaatagaaattactcatttgattaacacttgttgtgtttttggttgaattccatcaatgtttctggcctttatttgagaagaatttagaatcaactaagacaatatctgataaaataataacttctaaatgggcaatcaaaattaattgggtacatttgcaccatacaaaaaaaatgtagaccaagagcatggacaagtatagtttagggaaaaagaagaggttccactccaataaaattctttgagaaaaattgcaatatatttttttggaatcatcttggggacaacaaggaaaaatctttacagggatttttagtagtgatcccaactttaggtgtctttatactcaattcccttgataggttaatactgcattgaattgaatggtcaactcaatactcatagttcacagttgattgcttaaaaaaccaatactcattcattttgctctgcaattttcttgctcttcttctcagctcaaaattttcaataatatatgtcttacgcatgtccattaatatccaaaggaacaatcccaattttcataccataattagccttcaatttatttatgtcaaaaaaaaaaaaaataaataaaataaagaattgtgatggctccaaaatcctagtatctttctaaa

SEQ ID NO: 57287 - DNA, 619 bp, Cannabis sativa
gacttttctaacactgacagctactccgacaacttttccagtaccgacaacaaactccagcgacttttcggcccctgttacaactccgccgatcactatagttcatttgttttatttttttttttaaaaaaaaaaatatgaagggaattttaatattttttatggtaattcaaagtggcatatcccacatatgttacgtttttattttaaataacatcatttttttcctattaagttttctcaccatatttatgtaaactagctttatttttttccatatttatgtaaatacccctaaaatataagatttactttttttctttcatccatatcattttttatcactttacggcacaaccatcaggtaggctgtgggtgggcagttactttcactcctagcggtgcagtcatggggtttttgtggacgtttgtaagctttgtcgatcgatttcgttgtctcggcaaggtaggctgtaacaccctaactagcataggcgtgttaacgtgattctaaacatactgtccagctcgtttctaatcaacgaggttaatgaaaatcgtgattaattaaaatttgcttatttaattaaatacttatagtattacatacaaaatattt

SEQ ID NO: 57288 - DNA, 3320 bp, Cannabis sativa
taccttcacagtctcagaatcatcccacttgaccttccccaggcagtgtgggattgtacagcttacctggtatttccccttatggatcacgggactactgactgtcacagctggtatatcacaacattttacttgtttatttatttcatttatttagttggtttagctttgtgtatttgggttagttgttaaatggaatgctgtagatatttttattaaataaactcatgtttattctttggaggtgtagagtttctgaaatgaaaaattagtagaaccaatgtggttgtaccgaagtggaatcagagtttggcaatggatgaacgagtgaagttaaataaaaacttggacaaattgacccttctatctgattgtttaaagcagagcaatttttccaattaagaacatcatacactaaaaatagaaacaagataaattgttgtatgaaaagaaaataagacatattgaaaaatataaacaatttaacatcaaaatggaaacatttagtatttaacaacatagaaaataaaaaatggaaacaagtcaaaaagaaaattcaactagactttagcttcatatatatgtatgtaaaatggtaacaaaaaatcataaaaaatggaaacaactcacactaaaaacaaattcaagacatattgaaaaacagaaacaatttaacatcaaaatggaaacaagtactatttaacaacatagaaaatagaaaatggaaaaagtcaaaaagaaaatcgaaacaactagagtttaacttcatatatatatgtaaaattgtaacaaaaatcataaaaaatagaaacaactcacactaaaaaaaaaacaatacatatatataaaaaaatggaaacaagtagtatttaacaacataaaaaatagaaaatggaaacaactagagtttaacttcatacatatatatatgtgaaaaatggtaacaacaatcataaaaaatggaaacaactcacactaaaaacaaaaacaatacatattgaaaaataaaaacaatttaacatcaaaatagaatcaactagtatttaacaacacataaaataaaaaatagaaacaagtcaaactaaaaatggaaacaactagttaacttatatatatatatatttcaaaatggtaacaaaaaatgagaaaaaatagaaacaactcatactaaaaacaaaaacaagacatattgaaaaatggaaacaatttagcatcaaaatggaaacaactagtatttaacaacacagaaaataaaaaatgaaaacaagtcaaaaagaaaatggaaacaaatagagtttaacttcatatatatatatatatatttaaaccagaaagtatttagtttggaaatattttatatggtgatctatgttttattagtaagacagcacttatgaaaatacacattttccttcattaaaaatttaacaaaatttagaggataaatatggaatattaagatattggcatagaaataaaaaaaatccttcctaaaaccctttaaccttacattcctttctctatcaacctctctctctctcattccattgctctctctccctctctctctgataaggcaaaagccgatataccaccaccaccgccgcaaagatactctccgacactctccatcactctcttccaacattctctccgttttgctttcgaagctagtgccgccgtccaaagctttcacatcgacagtgtattttttaaattttttacatatctaagaaatttgatagctctgctagggctagaggtactaaccaacctttctaatggtagaactaattattgtggaagctattcagtctttaaggggtttcattgtgggcatttttatctccaatgaataactgatgagctcatttgcttattaatcctttgacaaaatcttctgattagtttgtttaagctctttaaatgacatttttgtctgtgagttcattttatgactagtgatagtttttttagtgacagacctagtctttgtattgatgtatatccatatttgttggtacaatgtggagtccacttggtataatgtggagttttgtatgtacaagttttcaaaagcttttgtgtgtaataagagtaacaacagtacatttatatgatttgaatgatctataatagtagtaatagtcattttaaacatgtatttccttgacagacctaatatctatgttcttggtgaaaactctagccgctaatccatatttgcttgcattagctcttctaattacttcatcaatcttcctggggttgaacaaaataaacttagaggaaattcaaagaagcttttatttctgaaatagactcagtaaattttcttaactttaacttaaattttttatgctgtagaaaatgacgaataagccaaagttcaatataaaaaccaaaaaaagcaaatcttctacaagttcgtacaagaagaaatatagaaggtttaaagagtgtgctgaaaaaactttcagcaaaaaactaaaagagaagatattatcattttaaaggtacttaaataactgtttattaagtttttctcataaactcttataaaccatttgaaattataattaattattttttgtataactcttttgatgcaaattttgacaggatataaaacaagagaacacagaattgaaaaacataatagctgaacttaatagaatttattggctttagcaaagcattagaagatgtgactgaaattaaggagcaactgagtcacatgaattgcgcaatcaacaaatttgagcaacttttgcaaacatttttgaacaaggtatctgcggagaaaggcaaagaaaagaggaaaaagacaaagaaaacaacaaaaaaggcaaggaaaaagagaaagaaaacaacaaaaaagtcaaggaaaaagagaacgaaacaacaaaaaaggcaaggaaaaagagaaagaaaacaacaaaaaaggcaacgaaaaagaagaaaaagattagaccgaaaacaacaaaaaagctgaaggaacaatcaaagttaatgaacaaggcaaaaaaggagaagaggacgaaagaaaaaaacagctgacaaaagaagaagtgtaataactaaaatatttgtttattatatttctattatgctagtctaaaactctcgatgtcgaaatagtgattgcatagaataagttagcttcttgaatagaggattacttttatgtaagatttgtgttagtctccaaaataataagattaccatcattataataattattattattatcttattttgaaaataaatatagttatatgttggtaaaattagattatagtattttgagtgtttaaaat

SEQ ID NO: 57289 - DNA, 1172 bp, Cannabis sativa
tttttaaaaaaaaataaataaatgggtaggtgtgtaccgaaaatcaatatttttttttttttgctagccagaatcagaaattctctattttgtcttttatactctctgagatattagtgttttttttttcttaactctcttattttttttaacaatgattttttttatttattatcttttgtctttttgtctatttttaattttttaaagacaagtttgtttttgtctttttttctttactaaatgaaattatatctcacttttactttcttatatttttttattatttttattttttaaaaagctatataaatatgattatcattttattgtgtgtgggttatattttttcacgaaaaaaaacaatcataataaaagatataatttcttttcttttattacttaattgctaaattttaaatcaacaaaattagatatgacaaatagattttaaggggttactaaaaagtatttattattaatagggtttttttaaaaaaaatataataacttaaggaaaaaagacgttaaatgtaactttttagtttcttttgtatttaattagtagggaaaaaaaaattaaattcaaacaaaatttattggtaattaaataaaatgctatgtgatttattaaaaaaaaactcaaataaactttaacatatcaattacgcgataataaaaaatatgttatatatttattactataagtaaaggtaacataaacgtgtcttaaacaacatgacaatataatcacctaaaataaataaaatgtaacaaaaatgtatcttaaacaataaaaacacttactttaacattaattaaaattataattttaaaagtaactaatcgaataagtaacctaaagtcagtgaatatataaatttttgttttgatttaaagtttggttgttttatctcttaataaaatatgaaagaaattaaaatgtagcttttgattacggtaatctttctcagtgatgatggtgttgcttttgattcttaaatagattttgaagataatttaaatgttattaaaataatttaaaagtattttaaacaacaatgcaacataatcttacctaaattgaaaattgggcattttacataaatgtatacattttcttaattaattacaaaaaatgtgcaaaaaaaaaaattaattgttacaatgta

SEQ ID NO: 57290 - DNA, 1056 bp, Cannabis sativa
agttgtaaaataaagagagttttgtgcgaagagttgttttgtaattgaagctgagcttcatgagtgattgtgtcaagaacacattgaatgtcaattttgtaattctctattctagcttaataaagattcaagcctttggggctgttctggctgaggagtaggcaagtgattcatcatcacttgttcaaacctcgtaattctagttgtgtttgtttctttctccctacattcttgtctataattggtcattaatctttgttcatttttttggttcttggttgctggtttactggtttattcattgtcgtttaaaacaattcgaattacttttcaaactgtttgcattgttcttgatccaatctcttgtttcgttttgtgtgtgaggtgtatgatcaagcattgatcatatcaaatggtatcagagctcagtcgaggggcatcatcaaagaattgaatcaagaacatcaagaaagaaccaagaactgatctacaatggcttccactcggtttgaagttgataaattcaatggtacaaatgattttggtctgtggaggattaaaatgaaagcattcctagtaatcaaggaatttcagaagccattgatcgagaagagcttgatgctcttcgagatgacaagaagaatatcaaggaaatttagaacaaggcacacggtgccatactgttgagtctgggtgatgaattactcaaggaagtgtcaaatgaagacactgcagtggggctatgggaaaggttggcatcaatttatttgaagacgtcattggccaacaagctctatctaaagaagagggtgtacacaatgagaatggatgaaacagaagatctaaggaagcatctcgatgagtttaataggataatcttggatcttagcaatataggtgtcaagatagaagatgaagatcaagggatactgctgctcactacattgccaaagagttatgaacactttgtggacaccattgtttatagaaaggaatctttgtcaatgatagaggtaaaatctgccttgaaaaccaaagaaattcagaaaagaaatg

SEQ ID NO: 57291 - DNA, 753 bp, Cannabis sativa
gtatatggtcatttgccgcagtgattatgtttatagttggttgttttggacattgacagtttgggagatttgagccactgtgttaaattattcaaaaaattgaactacatgtatttttgtggtccacactgtttgaagtcttatgttgttgacattaatgaaatgtatccaattttattttttgtgtttttcttttcgatgtacactaatgtttaatcatctgattttcttattccctcaagatgtctatttaattttaatatttacttttgttgctttaactcgaggtaaggtcttttaacaaaagtttaatcaactgagtggtagtggtgtttgacattacataatgtgagattcatgggctaagcctagaatgggctcgatttgagtgctcatggtttgaaactggatcccattttaattattgaatcaaactcaaagttacttgtttataaaatcatatgtaatgaagtggatcttgttgggataatatgcttattattatgatattggtattttaggaaaacaaaatgaggaaagagagtaagaaggttcctaactttctatagctatgcagctgtagtgcaattattagttccattcaacttcaaatattggaaaaatattggtttcttatttttatttttcacaatcatgtcttgctctactgccccttaaaaggaaaaatgtaggagctgggtgttcacaaagaatattgagtttcacatttacttttatttatatatacataca

SEQ ID NO: 57292 - DNA, 2060 bp, Cannabis sativa
  modified_base (27)..(41): a, c, t, g, unknown or other
aggttgttaatcaaacatacttgttannnnnnnnnnnnnnnggtaaaataaatttccaacacaaaagaccagtgatgccattgaaaagatcaaggcacgaatgtttacttcccaaagtaggcaaaagaattatgttgatcctaagcaccgagacatagagtgtcaggtaggagaacatgttttcctacgaatttcaccaatgaagagtgtaaaacgcttcggaaagatgggaaagttaagtcctaggttcatagggccatttgaaattctcgagaaggttagacaagtagcgtatcgactagctttacctttagcattgtcaacagtgcacaatgtttttcacgtatcaatgctgaggaagtatgtatctgatctaactcatgtattgggttatgataccctagagttggcaccaaatctatcttatgaggaacaactagttcagatcctcgataagaaggacaaatttctacggaaaaagattatctccttagtcaaggtactctggaagaatagcaaggtggaagaggccacatgagagttggagtctgaaatgaggactcaatatccagagttattcaggttagatttcaggggaaaatccttttaacaaggggatagttgtaatgaccgttatacttagacatgggattagtgggacacttagcactaattaatatgactatgtgattatttatgtattttatgctttatagactctatttttatgaaaatatgtgttatgattattatttctcaatttcggagattttattgaattatatgtgtgatatgcatgctatctgtgaattttcatatttttacatttttatgcccgataacagtggaaatgggtcgaatggcaattttagtcacactgatacaaatttgtgtcaaatattttatgggggaatattattggatatcttagaataccagagtttaacgaaataacagaattacaccattttacctctagggttatgagataacttttgtggggaaataagggcattttagtctttttatcctaagaacttagtcactctttttggaagggataggtggctgtggctcatccttttgaggatgaccagctgcttaggaagcaaataaaaaggaaaagcaaaataaaaaggaaccaaaaagaaaaaggcaaagtcaaaaaacaccaaatcactttctccttcttcctctacttcgtggcttcttaaccagggccaaaactcagtgttttccacaatttttaacctcttcctagctagaattcatcaaggagttcaacccctagctcctctaaacttctaagataaaacctaacctaaaatttatttatttctagggtttttgttagttttcactggctatttatagtagaacatgttaataagtttaggaaggttatgaaatgattattaaggttatttaggactgtttagaagtggttttaattcttttgagtggttgtagcaaaagttatgcaagtttgagtttaaagaactcaaacttaacttggttgtattgcccactgtctaacctatgtgccttatgtattgaccactgtctaacctatatgccttatgggtttgcaggccaagtcctaaattatggacgcctagtaaaacgttagaggtcagggcaaaatggttgagactggaggtggtcggcaaggttgaaacccccaaaacccccatggacgtggcagaggtcgtggtcgagctcaaaggggtggccaagaaaatccacctcagtctctttttgattgggagcaaaggtttgctaagatgtaagctcgaattacttaacaagaggaagaaattcaaaggcttagacagcaggatgctcctatggtgcttccatcgcaaccaccaattgtagtggttcctgtggtgccagtagaacatgttgctggcaactatatagaacttatgtatggacggttctggaaacatgcacgtaattttgggggtcctgatgttttgaaagcagagcagtggttgacagtgattgagagaattttgaacttcatgggagttactggaaatgatagggtggcgtgt

SEQ ID NO: 57293 - DNA, 747 bp, Cannabis sativa
ttagtaaagttgcctaatagggtgaagaacattaatcataagttttcactaataaatactcactaggcaacatggagaaacataaagatataaaacaagattcattgccaagaagtttattttgaactaagaatcaataacaaatgagatttacattctcacttgtctttataaaagattttactatagcaaccttcacaattattgctcatttcaattcattaatcaatttcaaacagtgaactagaggagaaggtatacagacaactataaagatttttcacaaatagtggtgaacatatgcaagtctacctatagattaaaacaaacatctcacaaatgatatttttattatgtcatcttttctttaggtttaaaaagagtattatagaaataattatataccagaaggtcagtgagagtaatatttattttatatatagacaatatgttacttgcaagtgatgataaaagtttcatatataaaggtaaaataattcatatctcaaattattgttttgagataaagaatatacataacacataatttaattagtttgagagtaaccacaacatctctgagtaattaaaattatgtattatttatctcatgttacttttatctttaagtctgataaatttaactcaaactagcatttgaaaataatttggaatgagaataaactaggaacattcctttgcttctatttttagaagcctaatatatgcctaagagtttgaataaga

SEQ ID NO: 57294 - DNA, 743 bp, Cannabis sativa
cttacgtcctttcaaatcttctgtcataatgacttttacttcggaaggcatgcattgggggatgtgtctgacggatacacactttcccatgcaatttttgatgtgaagtgaggcctttggacgtttggggagaaaacacgatcattttgaatttaatccctaaaaaaattttcccactctcttatttggctataaatacctcaaaggaaacccatttgaaactttaacattttcaaactttcagagcaaaaaagagagtaccattattcgagttcttgaagctttttctcgaatcttttgctgtgtggaccaatttcttagggatttcttcttcaaacgctaggccaaacagtaagtctcctttctcttttcttgcatgaattttttatgatttctatgtatgtattctatgaatttctagattgaatgttcattgtcatgagattttaattttctgttccgatcgcccatagtttaattaatgtcatctattaaaggtcaattcgattcgggatttttgtgcactctatttttcagtcactttttacctaatattcaaagtatcctaggttgtttgaccgagattttcggcaaccaataatgagagttgtgtgaggtatttgatgaaagttagaagagaaattttttagatttagatttttcatagatttggatattgtggattatgtggcttgttgtggtgaaataatatttttacaatgttatcaatagattattgattg

SEQ ID NO: 57295 - DNA, 714 bp, Cannabis sativa
aaaaaaaaaaaaaaactgttgtgattaatttaaaaattaattaaaaataaataataaattatgtgtaactttataataactcactttttttttttaatttttataaataaatataaaaattttataaattttaattacgaaaaaattctcattaactattttaattaacaataatttattttaagtatataattaattacagttaattttaaatttacaaatgaattttctatctcttataacctgttttaatatatcatgataaaaaatataaccaaaccattgaatagttaatcatatatatatatatatattatttttttaattacattaataggtagattttgatcttatatgctgtttgtttggccttatagtgtttcaaataatataaaaatatataaataataataaataatatatgtaaaaaataagatttcagtaataaaaaaacaaaaaaacaatatgaaaataaccatagtccgtatttattttaaaaaagaatttataaattgtaaatatatttaaaattctgtacaacaatattttaataatttttttttgacttttttgaatagtatttatgaaaatatccccacttttaatttagtagttttttgcttgttttctcttatctatcattgtccctcctattttatatgaataatgtttgtaatttaggatttctcatttttaaatttataattacaggag

SEQ ID NO: 57296 - DNA, 680 bp, Cannabis sativa
ttttttttttttggtttgtttttttgaaattatcccatcttttcaatgtgatatgcaaaatcaactaggtattgcattcaaattaaattgcaaagttacctcaaaatttgtataacatgtacaaaaatatacaatataaaccttaaagcagtatacatgcagaaatatatacaaaatcaaaaaggcacattggtgaaaatgggcatattaatgtaaaccaaaggagaaggggttgagttttagagatttggaattgttcgataaaatgtttcttgcaaaacaaatttggtgctgcattcgacatcccgacaacttgtgtagcaaagtgctcaaggctagttagttatagaggctaagtgtggctttcaagattcattttttttggctaagtttggtgtggggaaaggatattatctttaatgtttatagatgacagatatgtaggtatttagatttttcaatccaatctaatttatacaagcacgaatacttacactttatagattgaattgaattggctcgtgcagattgaattggatagagtatgaaaaactgagtttttgtaaatatcaataattattacagaaatataaaaaaatatatgactgtaatagtctgcaccagtaaaatgtaattctgttactgcaaaaaataattttgcagaattaaactagaaccag

SEQ ID NO: 57297 - DNA, 1153 bp, Cannabis sativa
ggcttggaacctgcaaggaactctgccttttggcttggaacctaccaagaactctgccttgccttagcctggaacgtggttcctatagtaactctatctggttcttctctacctgtacgattcttctagggccttggccttatgcatttgaactgattttttattcatattttttcttgaggctttcatgttctttcttttggtctacaggcactctatttttgaacaatactattatttatcctcaaagccttttactatggatgtacgatcatcctggctatcttcttattgcatcgacaaataggtatctaaatttatttttctttatgccaagctgcagtatgcatgcacttgacgtagaggtaggtttagtagctttttctaagtgttaaaatttttttgcataaattctctgtgctagtttgatgtattgtacggtgtgggtgcccccaagtgagcacatagacttacggcctcttggtcacttaaaattcatcaagtttcatagaccttgcttggagattttcttgggaatgctattgggtgcacgcatgtaaaactgaaaaaaaaaaagtaactttaataagttatcttgattagtaagtggttgagacacagttggtcttacgtgtaaccaaagcttaccgcttaatgtctacttttgaaatcacattatggctacccttacaaggtttattacacaacgaccatcactgaagaatgacggaggccattattaaagagggatgggtactagctcttttatgtttggctacctttgtaggtcttatcgtgtaaaggccatcactgaacagtaatgggaggccatcgctgaagagcgatgggtgctatctcttttatggattcatgcacagtgaaatgttggaggaaccagtgtacaagttgctagtgagagcacttaccaagatgttctctattctagtattttggtagaagagctaactccaaattctcgttgtactcgcaaggcttatattcaccgttattgtgatcttgtaacttggtacagaccttttcagttgggcccaagtatgcttgttgcatgatctttgttgtcaaggaatactcttcaaggtgtaagtctcttacgaagaatttctttccccaatctgtttgtttaagggcctag

SEQ ID NO: 57298 - DNA, 545 bp, Cannabis sativa
aatgagacggctgagcagttgtagctgagctttttggcggcgtacaataccggtcttccagagaagataatatcatgagttttgaagatttctttagctacttgtgcagaggagaccacaagagttggtatgaagccgagttgcaagaacatgattggtccgtactggtgagaaagtcgcccaaaagttcgatggggcaaggtgtggcctagcaactggtggaggtttccgatgatgggtagccttataggaccaggaggaaggtttagttttctcctctgtttgagaaaacacagatatattattattgagataaagagtactattacagaaagaagagaagtagccatggagaaaatatattttatggatgtaggaaagaataatagtcatcattggaaacctttggtaaagcttatacatatgaaaaaaaaaaccttcaatatatttttatatataaatagaaagatacatgtattatgaaatattagtattatgtaatattataatttagagaaagaaaatagagaagaaatgagaatttt

SEQ ID NO: 57299 - DNA, 733 bp, Cannabis sativa
tatcaaaataagatcatttcaaaattaataacaaaatgagtaatatctgatctgataattaaaataaataaaataaaaaataaattaaaaatttcaaaattaaccataaggttagtttgtgaaaaattcaaatttctaaattcaaaggctactaatatctaaaattaatcttaattaatgaaaaaattaataaaaattaattttattcagataattagatttttaattgaaaatttagattctacacaaaattttaccaaaatttgaattttgttttaatgaaaaataatttttgaatcaaaagatatcacaaaaacaagatttcatatgggcgagggaaaggctactagaacctacttggggggcaaattttggtcaggaggggcttaggacagcccttgtctgagtaaactcagacatggtcttgtctgaagccgcgtcaagcccttgtccgtgcacgcatgtgtgttgctcggtttcagatatttttatccaaattcaaaaaatcatcactaattcataaaaaattaaaattatgttttgtaaaagccttaatttattaattttttatctactttccaggaaaaatattttcaaagagaaattaaatatattaaacagcgtaaatttgaaatttctatacaatcatcaaatatgcacacaaacaaccattaacacatccaaatcaacacaaacatcgttttaaatccatattttatgaaagcaaatcatt

SEQ ID NO: 57300 - DNA, 543 bp, Cannabis sativa
cactattggtatactctatttttaatgtggaaattctgtcaaaaaaaattagaaaaaaattagtaaaaactcggctccataaatgtgagttaggcaacttttttagttaaactacacttgtcacaaaagtacttatgaattattatttgattgacattaaaagcataaaaacaagtcaattttacaattacacgttttgatcacaaaatcttgtatagtgatgctatatgagtatttgagcatttaataaaagtgataaatagttgaggtgattttatggttgcttttcatctttatccattgttgtcatagcattgttttttttttcctatattttcagtcgaagccttgtccctattcgattgacattaaaaaaaattatatgaatatataaatattaaaaaagttattactttaatctattataagacatataaaacgtaacataacattattagtagaattcattgttttaagtgattaaacataaacataccagagtaagattattactaatatctaactttctcaaccaaaattcaa

SEQ ID NO: 57301 - DNA, 1214 bp, Cannabis sativa
tcccatttgcattcgcattcctattcccattcccattcctattcccattcccattgcctagcccattccaatttctattcccattcccattcccattctcaatgctattcacattcccattccccttcccattccaattccgtgaccaaatcccattcccattcccattccaattcccattcccatcccttttgccaatcccattcccattcaaatcccaattcccattccctggcccattcccattcccattccctttgcattcccattcccgttcgccgaaccactcttattcccatttccattccctagccaattcccattcctattcccatttgcattcgcattcatattcctattcccatttgcattcgcattcctattctcattcccattcccattcacatttcctattcccattcccattccccattcccattccctgacccatgcccattcccattccaatttccattcctattcccatttccattccccagcacattcccataacgattcccaaaccccaaaacccaacacgccaatattgcaaaaccccaaacaccaaaccctaaacccaaaatcccgaaccccaaaccccaaaaccttaaaccgtaatacctcaaaatcccaaacatcaaaccttaaaccccaaaccataatccaaaaaacagcaaacctaaaaaccccaaacacaaaaacaccataccccaaacccaaaccctaaaacgccataccctaaaacccaaacaccgaaccccagacttaaaacctcataccccaaattgtaggtccaagatcctaaactctagaccctagtcataaaaccccaaaccctaaacctcaaacccaaaaaacccaaaatccaaagaatctaaacacaaaaccccaaacccagaaccctaaatcccaaacctaaaaacccaaaccccaaactcaaaaacccaaactcaaacccaaaccccaaacacctaatgtaaaacaacttaaccccaaacccctaaacccaaaagccccaaaccacaaaccccaaatcctaaacccaaaaccctcaaaccttgaatccaaaaccccaaattgtaaaccccaaacaccaaacccaaacaccaatagaaaagttattgaaaacggtcttggcttcgtccctatgaaatttcacaattttttaagatgtctagggtgagattttgaaagaacactaacgagtgtaagag

SEQ ID NO: 57302 - DNA, 633 bp, Cannabis sativa
ggtagaacctagctaagattagaatataatgcatattttgtatgtatatacagccaagttcaattcaaataaatcaattaaagttgggagaaaaagatgatgcactaaaagcgttacagggatggcgtaagaatggagaatgcccagtgggaacagttcccatagttcggataccaacaatatcttctaagtatggtccaaaaacctcccattttcaatctcattatataactcaccctaataggagcctcgccatagctactgaaacgactccaggtcatgaggtaccattaattaattatctccatgccttgtgttgtgataattaatattatataaatatagaaattattgtatagttcttttttggtgtggcatctatgtagtatgctcaagtatcgatgttaggtggtccattctttggaacaaaaacaaatattaacgtatggaatccagattcaaatggaacaatgagtgtttctcaaatttgggttacctcatctcaacatgaacaacttaatgctatagaagccggttggattgtaagtgatctactccactatatatatatgtactactcttgaatttcatatattcatgtgtacatgcccctagacaataataataacttaa

SEQ ID NO: 57303 - DNA, 719 bp, Cannabis sativa
tactacataaaaaatgtcatttttgcaaaaagagtatgatattcacatatgcatatttgggagggtataaatataaatataaatgaacaagtgttttttcataattaccagaaaaaagagtcgaatatctcttccacttgaaatgtcataaaatttcattaaaacccaattcacatttctaaagaaagatctacatgttgattctggcagagtaaattcatcaaaatgtggtggattcctgtaataattaataaacagtaaaatttcaatgtaaaaatatactttaaactaaacaaattatattttaattgagatattataattaataaatagaatatactcgaaaaaaatatctaaaatatcactgtaataacaataattataaataatttttaatactgtgtcataataaaattattttgagtaaatataatatttaaatatgattataatttagaaaaaaaactattaattttacataaacatgtacgtatatattttattaaaatataattattcttatatagagatatacttttttaatatatgatttaaaaaatatataattaattacgatttagagattattcttatgcatttcaaaaaaaaaaagagattattcttatttataactgtcctaaattgatacttaattttttttatataacaaattataaattattcttgaacagactcggccttgagcataggcggactag

SEQ ID NO: 57304 - DNA, 1062 bp, Cannabis sativa
tcgagtatacactgaccaaccattgggccaagtattgtaaaagcctgatgcctctgggcggttacttaaatgtgcaatagagttgggtcagtacgaaataatctttcaaccccgtacaatagttaaaggataggccttggaaaattttttagttgagtgcacaggcaaagaagaaagcaacataaaggacatcccagagccagtacaagagtccctaccaaaaaataacgaagactgacctacctggaaattacacgtggccggattgactacagaccatatttctggtgtaagaatttcccttatcacacatgggggcaacacttgcacagagtaatcaaatttgggttcaaggcctctaataacgaactaaaacttgctcgggaagtgcatgccgagtacattgagatctgtagtgatttgtagttagtagtgaatcatgtttcaagagagtacgaggcccaaagagagaaaatgatggcctatctaagcaagatacaagacctgcttgcacaattcaagagttacacactcaagcatattccaatagaagaaaatacaaatgctgacgccttaccccaacttgcgagcagcacagtaacagataaggccaacctagtccccatccaattcttagaagaacccagtatcaattgttcagaagtattggagatgatagacacaacaccaaactagatgacacccatagcagcctacctcaacactagagaacttccaaatgagaggaacaaagctcggaagatgatgaggaaagttgcatggtacatcatagtagaaggcgcgatgtatagaagaggcttctctatgccattacttagatgtgtaacaaaaaaagaagctgcacgaatcctatccaaggtacatgataggttttgtggcaaccacgcagtaggacaaagcctatcaaagaaaatactaaggcaaggatatttctggccgacaatgatggaagattcaaaggcctaagtaaagaaatgtgacaaatgctagagatttttgaagatcccccgtgcatcacccaacgagctgatgcagatgcaa

SEQ ID NO: 57305 - DNA, 1343 bp, Cannabis sativa
aattcatttaataaacggaatagatgagtcaatctaaaaatattttaccaccttaattagtagagctatagaaaacaaactcgataactttttgaatgttaaaaaattgtaaatagttatatttatacaagagcataataataggctgttataatacgaagatactttagtttttttaacttgaaataagatgatatgtatccaaatcgaataatattatgatcaaaaccatggtaagaataagttgactcatttatatattaatacttataacttttgagattatagctattaaccatagtactatcattccctgagaaaaatataaactccaaatgaatcaataataacttccatttcattccattcttttttgaatggtttaatttcatgtgtatatatacttaccaatagagatagtgatggttcttaaagcaatcattcgaaaacgacccaaaggagaatcataaagaaaagcccccgtgatgggtgtaaaattggacatggctccccacatttcatatcattttttgttcgctctggtggccacatgaaagtggtactcattccttaagtaatttatcatatttgcatggagtccaatgctggcaagcttttcaaatgtttcgtttgctgcattggagagagaggagcaaaatcaaaatgtaggacacatttagcttttcacatttatgtatatggtccaatacatttagttcttttaggacactatttaacattcaatgtaggattgaaccagaagcatcaaaagagatcaagattattacagtttttgttcgcaatgtgttgataactgatgacttcccaacattgggatatcccacaaatcccacagaaattgcttgcctgtcactcttcaagcgaggaaattgtcttaaaactgagagaagagaagccttcaaaaacaaaattaaaactaaaattaggtgatgaattgatagaatcaagccacagttaacatagtaaattgtatttaataaaattattaatatgcagatatactatagctaccttgccaaatgacttgttgacgctagcatgaaaagcaagagttggatattccttggatagtaccctcagccatccttttgttttcacgtttattttccatctgagttatgacgtatttgatataaggtctggtttgaatttaattacaattgagaaaaatggataagatatgtatatcaatttttaagattgggagttagggcatatgaagctaaatgttcattgaatacttgtaattagttcgccaaatacaaagtgcacagctaatactaattaattagttaggctttaaatcgatgtgtatagtacaa

SEQ ID NO: 57306 - DNA, 1612 bp, Cannabis sativa
tgagggaatccctcttaaatgttcattaagtccaactactttaatagaaggaaaaagaaatgttagaaaagattaaacctttataagaagtaatactagcattaatgtatttttaaggtaataatctacacaagtgtagatactttccaagaaagaaaaatggtctcaaagaaaagtttttcattctcgaactggttgattcttcactgtgaaatcaattaaaactagatctactgactcacaatttgtaagcaacgatctgaagcagatattatatgaacagcaaaaaaaaaaaggtgaaggcaatggggaacactaagtatgaaaaggaaaaaaaaaaaaaaaaaagtcttttttgctctaacaaagtacattgaaagtaaacataataactaactcctccaagaaaaaagaaaagtaaacataacaacaaaaaggaacaaacttaactatttgttatgataataacacttctaaaaacacaaacaaaaaaaaccaaaactttgcaacacaagcaacacaagcaactttcccctcaaccaaagacctacattttcatttcaaataatttattttagaacaacaaacaaatctaaaaggtagagattaagtgcatgacaacataagctattcaaactcatttaacaaaaacaagaaacaaaacagcctatttctcaaaacacaaacaataacaaaaatcatttttcttaaacacaaagtcgaaagaaaagaaaaacaaaaacccagattaaagaataagtaacaacctttatggtcttacaaggaaagatctctcagcttgtgaagatgagttaagtcttggtcttggtgacttggtcttttccaatagagaaaacgaaagagcagtcaaaaaccctactttgagctatgtttagaaggcaaaacagaaagaaaggtttcactttcaggcatagatagatagtaggtctggtccagcattggtaggagggttaggtagcttcttctgcaactctgttttttctgtgctcacttcccaagtgagctgagtgaggctcttctttatttctctgtttcttctttttgttatttgtcagtgtataaaatatggagttagctagctatacgtagcgcgtgaggatctctactagctcacgcgctctcctttctatggaaattcacatggtagtatggtaagagaaatgctataaaggactgtcctatgtattaatatatgtattaatatggttaaactaagtatctggtcccatatacttaatacgtataatagtttttaggaagtatcgttagtcaatcgtaacacgacatgtcgagaaagtgctagacaccactggtgcctaatagcaatgctcagtatggtaatgtgcatgttgggcctactataatggctaatgacgactaccaaaattgtttgggaaagaataaaagctcaccctagggctgttcaaaaaaattaataaaccgtccaacttgaataaattgctcaaaccaaatcgaataaactaacaaaaaatacaactcgaataactttacgaaaaactcaaaccgtccaatgaatatattgggcgggttgaatactattctaactcgtccaaataacccgaataaaccg

SEQ ID NO: 57307 - DNA, 1268 bp, Cannabis sativa
cacatggctgttaccagcactttaattggtgtttaatgggataaaaacattggacaagagagctgaaaacatgctcaatcaattcatgtacgtttatgaactttttcaaaaactggttccagatgttcgtaaaacaaccataaaataacataaaaacaactgttttcagagaactcaaaatttaatttttgtaactcctctccgaattaaatattccttcaacgtctcaatacccatttaaatgatataattgagtattgtaacagtttttaaatacaagaaacttatcccatttattccataacttccatatgtaattactcacttaattacatgtgatccttaagttacaatctatttttagatttgtaactcctcatatgttacaatttttatgtatattgttatactatatatgatataatacaacctccaacacataatatatattaatctcgtattaatatataatacatcacatttaaataatttaatccatattatattataacaaattatataacatcttcagatctacatggattgcatcaagcttagtcgtttcgttttttttttttttgcatcaaaaagaacaatgtatctcttctcatacaattctctccatataataaatattctctccatataataaatatatacatatatatatatatatatatatatttcccatgggcatatatctaatgactaaggcttgaaaagatatagagggaaaaaatgtaggaaaaaaaatgaaaaaaaaccttatttggtatgaaaagaaaatttttatagaaaaacactcaatttaacaaaaattttcatttgaaataacttgaaaaattaattttttttttccacacttttattttttcctactcttttcttttttcaccgaaattcaacttccaaacataacctaaatattttgaaattaatgctaatgcatgcatctatttccttattttctaatacaatgtttttatatttaccaattcattgatatattctttagcataatcatatgatgggtttgctgagatatatatttatggcaacttacatagtccatatgtacataataattcgagtaaaatgttgtcatgtcatctaacaataaagttaggacttcttcgcttgaaaagaagccttaacttgatgttctatttatgcaatattaaggtgtggaaaagatttagaaacattgaaatataatgattaaaaatagaagattatgacaataatattttttaactaattgcgcttat

SEQ ID NO: 57308 - DNA, 768 bp, Cannabis sativa
tctggggtacattggctgcaattgaaatttcctatgatagattaaaattatttatcaattcatagaagctctaaacagtgaaaaatcaaaatgtaccacagctaattagagatgaaacatactaatatgaaactaggcttcactcaccacagccaatatgcttacacaaacacatcagcaatagaatcatcatgcaggaaaataaactacgaatagttagcatgcattttcaaagaaaaaaataaaaatgaagatagaaacagaacaaaaggaattaataaaaaattgtgaagatgaccgataagtaaggccacaaaaatttgtttctaacccaaatgaaagaaggccatcttccacatcttaaaaggttttgttgtttatttttcaacataacacataaggccaaaaagttggccagaacagagacatccataatgtcttcctaaatcattatatccatttgctgcaaaacattatggcaaggcaactagcaagccaaacccaagatactatgaattactgtaacattcttgacaatagtaccacaacacatgaacaatgcataaagatagtatgattgcacgtgacactccagataagagatttgtatagaaaatatttcatgagaagtagccacccaaacaattccacagagaaataagcaagatttggtatctgcaacttagcacaccaaacatatccattccagagtagggtactaaagtcaaaagataaaattatgaatgaaaaataggagtagaatgttcg

SEQ ID NO: 57309 - DNA, 674 bp, Cannabis sativa
atataaatttcacctacttttgagtctttcatttttatttttattgagtaatgatgtgtgaccttacacttttgcatcattgcatacacctatatctatgtggtaaaaaaaaagagaactcacccaagtcatattgatttaaaataggtccgactaaatttaaagggttgctcaagttttaaatgcaaattagagagtaatttttagtcaaacttattttaattttccctcatgttttgtaggtagagttgtagagttgaggttttgggtaggtgagaccgtgagaggcactcatggtgcatagcactaaagtgtcgctttataattagttagtgattttttataatatttattaaaataaaataagtaggacatgatattgaattgcaccaataacaatattatactttaaagagtgttaaacaccataagtgtcctttaatatttttatttaaattataaacttattaattttttgtcaccaaacataccaattgtttataagtttggtgctaaaagtgacaaacagaaagaactcttattttgaaactacttttatcactttaacttatcttcgtcttttatcattcattttctttttatcaattgaatggtattgtccctttttcatatagaattaataattctttttaggtagaaattacatgatatac

SEQ ID NO: 57310 - DNA, 582 bp, Cannabis sativa
attttggccttccctatccaccttacaattcgatggagagaactcgcagccatcttccagttagtcattcattaattttcctcaaactatccaagcaaaaggtgcattcaaagaacaagtggtctacagttcaagttcattgcttatgaaaaaccagttagcttttttcaacaattatttactaccgtgcccagtctttcatcttaattatatcgagcatagcaatccaaagaatgaagttatccttaggtagattaagacggctccatactgttgaactctaagtaactttgttgattggaggtcgtagaacttggtagccaagggctattttaaacctatcattgataaaatggttcgtatcaaatgctccttttgctcattctttgattgcaactagctttcgccaataccagctggctaaaggtgtggccttataagtccaccaattttcctccttcacatacacattatgtacccacttcacccaaaaattatcttctttcttagcaatccccaaacatacttgaacatggctgccaaattccaatttgaaatgctcctaaagcccattcctcctga

SEQ ID NO: 57311 - DNA, 1274 bp, Cannabis sativa
  modified_base (418)..(422): a, c, t, g, unknown or other
  modified_base (1232)..(1245): a, c, t, g, unknown or other
aagaaactttgttattgtgttatgaaaacttttcatttttgaaagttgttctagaagcatttgtgcttgtacttttttttatattattattatgatacattttttatagtcaattattaatttgttttaaggtagtaagtgctccctaagatgtttttatctatgttggtttctttgatatttttactgaggcttattataagagggtccatctagtatctctgtttaaacaaagttatatgtatcctatatgacttatgtagttgtttattacattatttttcattcaagtttttatggcgtttattatttttataaatttaatttatgttgtttatttattataaatttaattatctttttttttttatctttctttaatattagaacaatatataatttatatacatattgtttnnnnngaaaatatagattaatttttttaatttggagcacaagtacagatttaattatgtttttatgtttactatttttacatatatattatattatattatattctacatttattaattagtaatacacaaaacacttcaactagaaatattttatttgctagtgtaaaaatatgatataatttagtagcaataaatttaaaaattgcaataaattccaatatacacaaaatgcatcaatttaatattttacaccaatatataattttagctacaaaaaaatattagtagctaaaagtattcatatgcaaccaaaaaatttggtaacaagcatatttagtgtcattttgattaaaactcattttgctactaaaatttagtagcaaatttttatttagtgctcaaattgttagttaccaaagataattgtagctaaaaatataaatttgctactaaaatatttggtaggaaactcatatagtatttttttattggaacttgctacaaaatcattttgctaccaaaatttagtaactaatattacttaactactaccaactatatttggtagctaaaattttgttgctaaaaagttggtttcttgtacccttcaaccttcctattaggcccttatcggtgacggaggaggacaatgcatatctagaagttgttgagtagttttatcaaaaaagggtagaatcaaatatgatgaaatgaaaaagctggccaacagtatcctacttgatgtaacactaaatctgctgactatgataaatgggatgatgttggaattattctaccaggatcttagatctnnnnnnnnnnnnnnttattaacatcctaaataagaactttcta

SEQ ID NO: 57312 - DNA, 869 bp, Cannabis sativa
gttatcagagaggagcttgtgatcatgcagaaaggtagttctcctattccaaatacgccagccaagagttataaactgctcaagttcatgtcttttcaagatatccatgcaccccagtatcaactcataatagcaagaagcatccttcaaggagtcgaggccactcaacaaccaatccgagcgaatagacttaagagaagggtagagccacagagcatgaatagtagtttcgttattctgagagcaaattggacatattatcgaaaccttcataccatggcgagataagttggcataagccgggatgaaattcagacatgccttccacacaattttttttatcttaggcgggagattcagcttccaaagaattttccaccaccgagaaaaaccagaggagcccaaagcttggccccaccccaacctagacacagtgctccaatatccactctaaccgagaaagaaccattatcagagaaataccaaataagcctatcctgactatcaaacaaggagcacgggatgaacaaaatggcagtagcctccccaacgtcaaaacactcctccacaagatcagaattgcatcttccaaaatcaattttgaggtcactaaccctttgtaggtgcggcccacccgagaaggagtacgtccgccccacatgatcctttgggatccaaacgcttcacgaattctaattgactcaccggagccaacacgccaacgacagccgtccttctagagatcacgaccccataagatacttttccaaagaaaagaagcacgctttgtcacttctacagttaatagggagccattaccgaagtagaaccctttcattactctggcagccagggagtcaggcaagtta

SEQ ID NO: 57313 - DNA, 1319 bp, Cannabis sativa
agggtccacgttgactccaaccaatttaatccttttaaatactattttagaccttgtgtattataaaaaattattaattggactttctgttttgttagataataaaatgaatccggtattttttaaaatggtaaaaataagaccttgagcttaattttcgacaatttttttgtaatacaaccaacttgaagacaattcccaatgtgaatagatacagaaaatataaatagttttatcataatattcttagattgaattattattaaatttttgacaaaaaatcagtttaggtcttatttgtactatttttgaaaaatacaaggttcattttgttatttaacaaaatagaaaattcaattagtaacttttgtaaaacatatggttcaaaatggcatttactcctttagaaataaagttggggttggagcttgaatgtatttataattaacttagggtcaatactttaagcaaatattgattttattaaattaaatagttacatataaattttatagtgattagagatctgtagttacaaatttatatttactgttgtggaagacgtaagaaaaatgtatcaataatgcttaatatacttaaagtattatatcgttattcatgtagtgaaatattattgtttaaagtgttaaacgttattggtgcatagtaatattcattacaagagttttgattttaagagttttaatttctcttaaaagttaaattttatattttttaaagttcaattttgaacatgtgatattgtaacataatatttaacttttactcctaatatatatcttactccttggttcattatttggtaggacaactacaagaaaagggaggggatgaatgtttgaggaaaacattccccctctaaatcccaaaaatccattcttcctatttttggaatgattttgaaaaaaaggcgaaataaaaatacaaaatactaatattattctactaaaaatgatataatgataattttaattaactttgtttctatcttttcaactttacacataataccaaaccaaaaaaaaaagttattatcatctccaccctttccaaaatctccctccatactcattcacataaaataccttctaaatgaatggaagtccacccaaaatttaaaacacaataactatattttggaaggtatttatgaacaatatttatatttgtactactaaaaagtaaagatagaatgattttttttcttttaaggttcgttacaccttaaaagaaaaaaaaaatacttttaatcaattttttatttttaaaattagaaaataaaaatattttcaaaaatt

SEQ ID NO: 57314 - DNA, 4510 bp, Cannabis sativa
tttgctcgttgaaatctctcaaaatgaaaattagatctgaaaacctttcggatctgtaacgtcaagtcttagatgaaattccttcagctatcgcagcttgacttcagagcttgcagtaaaactttgaaccaccttcaatggaatttctcgcaagaacataacaccacgaactccaaacacaactttggaacataatttaccacacaaaaataatagctgttacaaccttcttgggactgtgcaaattcataacatcatgtgatacattattcttttccaggacatcttcattaatgcatatgtatataaatattaatatatatgaagtataagggctagcattataaaccattattattctttcatttgtgttggccatgcaagtatcagaatttaaaccaattgatatgacttacaatacacacaaactattaatgaaataaagtgtatttgaagtaattaaaaccaatcagctcatttttttttccactcttttttcaagcgaaacaaacaaattttgaaagccaactcaagttccaaacattaacttgtctcactcaagttcatgcttaatcaaaaaaaaaaaaaagtacaaacagctacaacaaatatataacaaaacaaaaacaaaatctaaactacgtatgtaatgtaatgttaatggaaattatggaatggattctcggaaatttggaatctgaaaatcaagagataacaacaagcaaagaatgcacaaaattgggagcttcctacaaaatgttaaggagctgtgaatccagtctctgctgcaactccttgatcttcaaggaaagttcggccttctgctccttgtagctctgcaacaagtagtcttttccttctattacctctttcaattctccgatttccctcttcagcatctcaatcttctcagccccgcctcttcctttctccgctacctcgagattgctttctccatcgtgatacccatttgcatgaccatttatgcactcagatgaccaactcggaactgtggaggacttgtcattggattgtcccacacagtgatcggctatggctttcctaagtctctgaatttctctttccgaatcaaacagttccctgtttgcagcatcaatctgggactgcaaatgggttgagtgtgctagctgagaattaaatgaagtctgtaactcaacaatctgatcttgcatctccaatatcatatcatcccttctcttcagttgctgccttagcttgtgaattacttcccgcttgctatagacatcagagccggattctgagacacatggtgaatctgagcagtttgaatggtggttaaagggctttggaggcagctcaagtcgatcaggagaagatgaccacattacaccattgtctttgttaaactcgggacctggaactgtcaccaaaggcagagaaccatcaggttcggtcatcatctggttatcttgttggcatgaaaggtccataccacctcctttacctgttccaagagcattactgaggtttaagttaacaccaacaaaagaaaatacacttaaaccataagaatgcaaaaaggaaaattgccccgaatcacagcaacctcccaaaacaaaaacacaatgttcggattggaaaatcataacactaaagagtgaccccgactaaaagaagaagataaaaagcatgaaaaattatcagattcctaaaaccagcagctcatactacgtccctatattcgtttgatgatttttttatctgctttcctgtaagcttgcaatttgttattttgagcccaaaatgactaagagcaataggcacttatgagtgaaagtaaatggggcatcactagcaacaaatcctgaagcaaataggtgttataaacatccccaagttaaatattcagaaatattctaagaagtttgttaacatcctacatatatccctatctaaaagccttttgattttacgcgcgttcgtatataaattcgaaattagacttctcggtcattacaaataatgttctttaagtatggatagtaattctgagtataggtccacttagttatggtcaacaaaattatattgtcttacaactttcgaaaataaacaaccaacactattgattaacatcattagagaaggaagtttaacaccattaaattatgccaaaaaactacattagcagatattaaaacttaacttccaattccctatatgattgcagaatatccaaacacccaaatatgcaattgaatttgaaataataacaaacaaccaaatagtaacgagaatgagtgtaaataaaggataatcagtaaaaataacaaagaaaacaaaacctgataagcaattgaaacaagtggcatcatgatcttcagtaaaggtatagagatttgagtgggtagggcaacgtgaggaggaggaggatttccttctttcagaaaattttgcatttttaggagcaggtctgaaagtgttgttgggattgttgtcaatagcttgcttgagcttgtaaccaaggcgaattgataaggtacttaacaacgcacccccagcaatgagtacccaattggggccatctccctgaaaagacctagaagaagaagaagcacttgttttgggtttcattttcgaaaaggaaagctacccagctcaactatggggttcaagaactgacattggcaatggcaatggcaatggcaatacaccatactatactaataattccattacaatcttctacatattatctataccaaactgcatatacacacacagacacagacaaagaattttgagaattgatagaagaaaagcaaaagggaatagaagagaattagggttgaagaaactggaaaaagattattactttaccaaatgaatttgaatatttaatatggaatggaaatggggttttggttttactttctcaaagatgaaaataattcggttagagattcgttccgaaattgtagcaccacaaactaaccctaacctcactcctcactcctcactcttcactcttcttctttcttctttcttcttctttgttcttctctaatgggggccttttggtttcgttgccaccaatacaaattgcaattcaatatctaaaattgagtttagttggatttcgtttctacctttttattttttatttttttttttctaataaacattgaaattttatcaatgacaataattaggatttttgctttgaagtcgttaaaatttggatttaaggactttaagggtatgattttgtacaagtttcaaaaaaataatttggtagatatcaaatttaagaagcatgatttaatacataaatgatttattaaatttgaataaaattatacaaaaatacttaaatccaataatctcaatagtcctaattagcctaactaaaataataggagcattgctatggggaacactacgaggtgacactttataattagttagtagttcttttattaaagtaaaatatgtaggattcgatattaaattgcattgatagcaatattacatatcaatagggtgctaagtaccatgagtgtcctttaggcatttctcaaataataatttgcaggagacatgatgagaattataattagaaaaatgagtcaaatagtcgatgtctaattcccagatcgtttgacaaaaaaaattaaaataaaattagatgaaaaaagttggagcatcacagttaacattaagaactcatatattctatttcatccacaactgaaaagacacaacagtagaaattgttgtagcaagttcattgaatctcgtagcttaagcactcaattattgtgtaaggtacgtaatgcactactaacaattcatttagtagcaaagaaattgttattttcaaccactaacaacgatttgatggtgaatcatcgaagaacaaagaagaaccaacaatgaaacaaaatcatgtcacacaaacaagactaaaacacttggaattttgccataaaaataaaatgaaaacactcaaaactatatcataaatacaagactaaaatactcaaaactatgtcacagagacaatactaatcgcagtagcaaaaatcgaattatagtaacaaaatacaactccaaccaaaccatgtttaagtccaaagaaggccgacagacctaaccaaagtaaaaagacaacctccaaaaactaaaagtccttcaaaaattttaaaaaataaataaataaaaatcttggacaaaagcatttatttatttatttgacttcaaatactttcatcatctgaattgtaaaaatggattttttttttttttttcatgttgtttccttccttctaataaattaacaaaaaaatagatatatttaatatcatttcctatgtattattttcttttgtttataagatatagggaaattagccaaataaaaataagggattttttttaggaatatactatattaggtaagtttttacaaaaataacgttaataatgtatcacacacaaaatgacgtgacacgtcatcatctcctcc

SEQ ID NO: 57315 - DNA, 1119 bp, Cannabis sativa
ttgaatagaaaattgaaacaaagttttatttagggcacgaagcccaacatcggatgcctaagaggagaccaacaatctccctgacaatgttataacatcgctctatccaaaggaaaaaaggaagacttgcccaccaagagctcgaacaccgagtcgaccaagggaggtgagagtccgcccaaggcaaggagacaaacatagatcctcgctttggggatcttacaaataactttagaccatttgaggaattagaagaagtagatatcgacctctccatgccaactaggaaactcaaaattggccgaggtttagcaacaaagataaaatctaaattgatcaaatttctaagggaaaaccttgacattttttcttggtcgcatgaagacatggtgtgaatcgatccatctgtaatttctcatgcacttaacatactttgatttgggattcgtggcagacatcaggattaaatctgatctcttcctacgatctctgcttgcaatgcccacatttgtttctgcataatcgtatactgcaaggttgtgagttgaatgatacccttgaaggcaatgacaggtgtgattggtgggaattgtcccacagtagccgctggtgttgaggtttctccagcatgtcatgcaaactcaggaaataggttgaggggagtcatagtggtacgccctactcctccgatgacaacatcaatggggtatgttccttctccataatgagggacattgatggtgccaacattgaaagatccattgttgttgttcatgtgttttctaatctgtagccatctcgattctcctctagaaattttcaaaaatactttttttccacaaacgatgtcaaatgttattggaggaaattggacgacaccaaaatatacgagtattcaaataaaattagaacacttaaatacagacgtgcaagtaatcacctggaatagcgagtactcaagatataggctactaaatagacaaaacgaaagtagaaataaagagataacaagagaattatagtggtcaagtcaaagttcggtctgcttagtccacttttgtaatgatttcttcctggtatatttgatttggatcactcatttatatagaaagcaagtct

SEQ ID NO: 57316 - DNA, 1277 bp, Cannabis sativa
  modified_base (1207)..(1233): a, c, t, g, unknown or other
ctatagattagggcgttacacgtttatttttcaaataaaataagagaatatgccccaaaaaaaaaggaaaaataggaagaaaaaatagtaaaatgccacctaaatttttcttgtgcattcctttatatatatattgagtagatgaaagttacgtgtccatccacgtaaaaggttttttatttatttttttttaaattctacaattaatggtatgattatatgaatgattcgttttattaaagtaatctttgtattattgtatttggttagtaaaacatagttgtgtatataaagttatgatatctacattggtattaataataaaaaaaatacgttaattgcaataataacacaattataacgtaattatccttaatgtgaagaaataatttataatgagtcataacattatataactttaacatttattatttatttttagaaaattcaaaataagaatacatgtgttttgcaaaatttaaagtaaatattatgtagcgaaaattaaaagaaaaaatagcatcttaaaataaatgaaaaaaattattaaataaagtcttaatataaaatatctaaactcactgtaaatatccgactttaaaattaaatttttaatattataattaaaatattttatcttattataatttgagtgttttagatagcaatgcacgtgccaatttggcacctccccaacatgaacaatctaataagattttgactaaaatttagaaatttgtttagttttggatgataaataaatttacaaaaaaaattattttacctctattattatttgttttcgttaaaaacacagtgcgaccaaacacaactagtaaccaaagtaaatatcataattatgaaacaaaaatataacttcaagctgggacataattaaacagctaaaatatactaacgtcatttattttgcatgaatcgtcacaacaacccccacattaagaaaaataagaattattcaacctaataaggccatgggaaaaatccagacataaaattaatttacagaaacctaaatatgtaagaaaaatatataaccagctcgacagtcaaaatgcattactcatggacatgtaaacaaaaggctcaggaatcccaatagtggcctaaaccggctaaaacacaaatacgagttaaaaaagagagctcattatccaaaaaactgttttttgttataaaataatataannnnnnnnnnnnnnnnnnnnnnnnnnnaagaagaagatgaagagagaaagggaaagtgaatgagaatttct

SEQ ID NO: 57317 - DNA, 1409 bp, Cannabis sativa
taataaataatcttcataataaagccctaattatctgctaatttccaaattaaagctaatcggtctttatagtcatcctgcatcaggacagaccctaaatcctttgtagatgcatcacagtataccacatacttttctttatctgatggtaaggctaacaccggtgctgtgactagtcgcttctttcgttcatggaaactggcttccacacttatcagaccacacaaaaaactattggttcttcttagtcaattctggcaatggcatggagatcttagaaaaatcctctacgaaacgacgacagtatccagctaaaccaataaagcttctaacctcataaattgtctttggtctcggccaatctctaactgattcaatctttcctggatcgatcataataccattttcaccaacaatatgacctaaaaaggatacttgggataaccagaactcacacttcttaaacttagcataaagtttgttttctctaagtcattgtaagaccattcgaagatgttgctcatgttttgcttccgactaagagtatacaaggatgtcatcgataaacactatgacaaatttatcaaggaaatccctgaatactctattcataagatccataaaggctgttggagcattagtcaatccaaaagacataactagaaactcataatgttcgtacctcatacgaaatgcagtcttcggaatgtcttcctctcgaattctcaactgatgataccctaaccaaagatccatcttagagaagattgtcttcccttgaaggtgatcaaacaagtcatcgattcttggaaatggatacttgttcttcactggaagatttttcaactcccgataatcgatacacatgcatttgaagggatccatccttcttcttgacaaacaataccagagctccccatgtgaataaattgtgtcgagtaaatcaaatgtctaacatctcctgaagatgatctttcaattccttaagtttagatagagccatcctatatggtgctttagaaacaggctctgctcccagtatcagatcaatagcaaaatctatttcatgttggggttgtaaactaagtaatttctcaagaaacacatctagaaactctttaaccactctcacatatttaggcccaactgtttcgagtctaatggtatcaatcactactactaaataacctatatacccatcttgtaataagtctctagctctcaatagcgatgtgattggaattcgagagccttgaactcttcccacaaatacaaatggtttctcacctaccggttgaaaagttaccatctttcttatgcagacaatactagttgcatactttgataagaattccatccccaaaatgatatcaaagtctgctaaagataatgttatagtgagatttctc

SEQ ID NO: 57318 - DNA, 600 bp, Cannabis sativa
aagtcaggttagatcaaatccgatttaaataagtcgggttggatttgatctaaacagaatatctgatctagccgaatgagacgggacaaattattacataatttagatcaggtcggattataatcggatcagatccaacccaatctatttatactcttacgttggctggctgaatttgccgtctggtgactaatattatagtccaaaatataaaccaccaatgcaaaatgggagaagtgtgccattacaaatcacccctctacttaattggggtgcaaagttgagcactacataaaactaaactaatgcctttgaaaaattgagtcattaaaggtaatgaacatgtggtcaaattggacaacaaatttgacttctttatcaattatataactttaagcctttactataatgatagctatctcaagcttggtatggttctcagaatcccgcccattgaaatatttaatggatatgatgacaaatttttataggtcaagttgccattcttttgaaaaactaatgtctaaaaatatctttctttgctgatacgaaaaaaaaacatctttcaccaacaacattatccaaactaaaatatataac

SEQ ID NO: 57319 - DNA, 885 bp, Cannabis sativa
gaggagaagagagccgatagctcgtgagtaacgccattaacatcctcggtagccatgattgtttctctccactactatgcgtcttgggatatttttgtctgtagatgattcgactcgagtgctatatttatagatgccttgatgtgctttcctattcactttcgctctcaaagcttgggtaataagttattaatactaacaaagacttcagagtcaattggcattcagataataccatttatgacgtcataatgccacgtcataatgccacgtcatattttctttttcttcatcaaagctggatacacgtgtaataacttatttgtttactatgtgtttataataatggttatttgatttaaaaaaaataaaataataatggttatttgatatcttatattttaaaattatatacagtacattaaattttaaattttttaagaaaattttatgggtaaatactattttagattgtgtgttttacaaaaattattatttttaaaatagtacaaatagaatctattttttgtcaaaataaaatttaataatagtaccttgaattgtaattttttttggaaaatttgaattaatatacttacattaccctataatttttcccctaaatgcaaaattattaaaattggtcatatatgaccactttaccaattttcttaaactacccctcccatttgaaaccatcagcctctctcttcgtctctcttcatctctctcagccgaacaaacccaagaaaataaaaaacccatctcagccatggttagacacagcccagctcaaccccgaccactccgtcgtcgaagctgaaccccaacgaacgctcaaccccgaccaactcgcaaccccgacccactccgaaaatgtcaaag

SEQ ID NO: 57320 - DNA, 1645 bp, Cannabis sativa
aagtggtgtaactgatgtgcaagaaaaaatcaagatttgtgggcaacagttgagtctttgggggaaggaggttatggggaactttaaagacaagataaaaaagtgtaaaagtgaagtgcatcagtgaaaattaaggcatgatgagtcctcgattaccaattataaaaaagctaagaaggaattggctgaagcttatgtgcaacaagatcgaagcagttggctccaagaaggtgataataatagtaaatatttttatgcttatgctactaatcggcgttgtaataaatttattgctaaactcaaagataataatggtgattgggctgattggagttcgaggttgcctcaagttatggttgattatttttttgcacttttttcttcttcaaataattcttggctggaagttattagcgctgtggaaagtcgagtttcagctgatcaaaatgtcaacttgctacagccagttactgatgaagaggttcgcaatgctttgtttcatatgcaccctgacaaggctccgggacctgacggaatgactccagcgtttttccaaaaatgctggtcggttgtgagtagtgatatcattactttggtttgaaatttctttcaaacggggcaactttctagaggtttaaataacattagtttagtattaattcctaagaagaaacaaccagtggacatgggaaaattaagacctattgccctttgtaatgttctttataagattgtttcaaaggtcattgctaatcggctcaaagttgttatgccttcaattatatcggatactcaaagtgcgtttctctaaggtcgtttaatatcgaataatattatgatttcttatgagataatgcattatttgaagaggaagagaagaggtcgtgatggtgttatggcacttaagcttgacataagcaaggcttacgaccgtcttgaatggggatatcttcgggctatgcttgaaagaatgggcttcgatggtagatggattaatttaattatagattgtgtgggcactatctcgtacatgatctctcatggggaaaggagttgggccctatttttgcacaaagggggctgcgccagggtgatcctttatcaccatatttgtttattctctgtgctgagggtttctctagtttattgtgtagttatgagcagagtggattaattacagggtgtaaagttgctagaagaggtcctgttatttcgcatatgttgtttgctgacgatagttacatctattgtaaagcaacataaaaggaagctcataatgttaaagagctactgtatacgtatgagatggcttcttgcctaaagatcaatttttcaaagtcgtcagtgttctatagtcagaatactagtacctctcaaagggatatcatttgtgagctgttagatatttatgagactgatgagaatgggtcgtatttgggacttccatattcggtgggatagaataaaaatattattcttggttttcttaaagacaaaataaaaaagaaaattcaaggatgggaaggaaggatattgtctcgtgcggggaaggaggtgttgctgaaatccgttgcgcaatcaattcctagctatgcaatgagtgtttttctattaccttggatacttgcaaggagttggagcgtct

SEQ ID NO: 57321 - DNA, 1141 bp, Cannabis sativa
tcttgagctcgcctcagaaatgagctaagcccttgcactattaaattcagattcaatacaagctttcatggagcttccagctacaagatcaattattaagactctattcctttctgctattatttttctctggtttctacttctgtctctctcaggaacaatctttctcttctcacagattctcactctttctctctttttctcaactctgagttcttatctttgaactcagagcaattacagggttcactctctctctctagtcttcagatcttggcaaaaaaatgaacccaagagcagttatttatactgctgggataggagaagggtaagtagtctcggatagatgagttggcaggtatatgtcttcagttttctgttattgtagttaggatctttgatttgtaactatattgtagttgttgtacttgtgcaagttgtcttcttttgtaacagacttatagttaggaaagtgttagttggatttaattccagcaaattccacatcaattcaactaggacttttctaatataggtaaatgtattttgtgtattttctgagggtcctaactcatgtggcaatggttaatcaccattgcccatacctagcaaatccatgcaatgtttgaatttgcccaggtttaggattttagtgccaatgtcagctgggttttcctctgttggtactttcttagttttattttcttcttgtgtcactttgtctctgatgaagtggtacttgatctcaatatgtttcgttctatcatgaaacataggatttttgcaaaggtgtatgcagctttgactgtctgaatagactataggatttctgtccaataagtttagatccttcataagccctttaatccatatagcttcttttatttcctctgtagttgctacatattcagcttcagtagtggataaggccactacatgttgtagttgaactctctagcttacacattttcctcctactagaaaatagtaagctgaagttgattttctactatctctgtcccctgcaaaataagcatcattgtaaccttcaatggtgttgttgctgttttgtcttttgaactttaaacccacccttttagtaccaattagatatatagaatacccatttcatagctttcca

SEQ ID NO: 57322 - DNA, 969 bp, Cannabis sativa
tactctagtgcatgtggtataacggtcgtactttcattgagaacgtttttaaccatttggtgagccttgcgtttaggctcaagttggcttaagtacaaagccagtatcgcatgcttatatatgttttatgcatatcttactgagtctgtcaactcatcagttttctaccttgtgtaggtaagggaaagactaaggtggaggagcagtgagttggagctcggtaaggattgtacatatcacggcagtacatcccgaaaggtttcggtcttactgtattttgagtcatattttgttgctgccctatggtttgtaaaaaaattaaattatgtaactatattatggtatatgtatttttcaacagtggttttaaactcgggatcccaacttacgaggttttataaatataataaattatgtttaaatttcaaattagtaaattttcaagtatgggcgttacaattttggtatcagagccaccaggttattcactgaagaccttcaagatatgtaaaatcaaggccagtgtcgagctcaactcacggtttcgtaagcttttacctgttagcaaactatttaagttgtattgtaattatgtgtgaaacgtagtttaaaccctaaatgcggtcttggaaaatacattgaccactgtctaacctacatgccttgtgggttcgcaggctaagtcctagataatggacgcccagggaaacgtaagaggttagggtgaaatggttaagactagaggtggtcgaggtggtaaaaatccccaaaactcccgtggacgcagtagaggttgcagtcgtactcaaagaggtggccaagagaatccaccccgggctcctttcgattgggaacagaggtttgttgatatgcaggcccaaatcacttagcaagaggaagagattcagaaacttagacaacgggatgctcttgttaagcctcccctgcaaccacctactgttgtgtttc

SEQ ID NO: 57323 - DNA, 1056 bp, Cannabis sativa
  modified_base (211)..(223): a, c, t, g, unknown or other
  modified_base (297)..(298): a, c, t, g, unknown or other
tagatcatggtaaaacatattccaacaataagtacccaatgtttgtaaaactgtaattttcctccagttttgtcattacagactccgttcggaatttattaaaagaaccattggaagtaactgatagtacatgtttctatcttgacccaatgatcaagaatctaaactttatatgtggcctgtttaagaaaataataaagcttgtactgannnnnnnnnnnnnaaattacagttttataaacattaggtagttatgctactaaaaataaattttgggattatgccacttacaaactnnaaactttgggtacttatgtcactatttaccctattcttctatcaaatttttatcgagaataattataattttaccattaattattaataaaaatatttttttcttaatatgcatcatacaatttaatatatatatattaataattttttcattaactatttattcaaatatttaatttagttacaacatgatactttactttttgtacttttttttatcatttgcatgttaaaatattactgtatgtattaattaaagcaaaataataaatattgcagcaaatataatattaagtgcttttataatgtatcctcatcaaaatgggtacactgatgtatttttatttgttttaatatttaggagaattttttagtctaattttatttcatagtcatgtacgttataattacttaagacattctgtaaaagttttagaaatttggaatactttaaaatatagaaagcactgttcaaatagtctatttcacccgtttataaaataaaagagtcacatgtgcaacaaactatttgaaccatatttttagtgtattaaaattttttaaattactcaaaatttcacaagataacttcaatgactacaacgtacatgaccataaaagaaaattagattaaaaaaatttctcagatgctgaaacaaatagagacgcatcggtgcaccccttttaggagggtgcatattagaattttcctgtaatattcatttattttttaccaagattaaaattttgaaaaattgt

SEQ ID NO: 57324 - DNA, 1699 bp, Cannabis sativa
  modified_base (1670)..(1673): a, c, t, g, unknown or other
ttttcaactgggtacccatgttttcaaaattgtttaattttttttttttaaataaaagcaacattagtatcttaacgccaatttatttatgacactttattttaagtaaataagggcgttacacgtgacaaattccttttttggcataacttaagtttgaagtaatctttttgggtgattcaaaagaaaaaagttattattttttattttctttccaatatttaaagttttaatcgctaaatcaaaataaatttattttaattaataaaagataaatttagattttaaaatatttttaaattaagaattaattagtatattttaatttttgtcaattttgtttattatctttaatatttttttttttatgaatcagtttatattccacaaatcgattacaatcaccaattacacaaagctatcagcttcaaaaattagcccactacagcagccactacagtagccccataccgaagaaaaaatgctccatataaacccaatagtcaatctctattgttacttacaaacactcaaaccattccatatttatttgggcaattttcccttgcctaacacttacaattctatttttaataatgaatttcagctcttgaacacatctatcaatggtctacactttgtgattccaaaagcaatcatttctattgctccaacccttgtaaatcagacccacaagcatggctgaatacacttttttcctaaattttgactttttacatctcaagatccaccttagtagcttcttttgagtatgtacctgtcctccattgcagccagtccttgagtttatcatgacatttcttgctgaattcacattcaaagaatatatgatccacttgctctgggttatcaccacacataagacaagtatcttcggagcaaattttaaagtttactaacctgtcccttgtttggagatgattttgcactgccagctaagctataaagctgtattttgacacattatatctgctccacacctctcggctccatctcactttgatctgatcttctgacagaattttgtagcatttttggatactataaacctgatccataagcagttggaattgaggaatattcttgtatttttccttgattctaacaatctgtttccaataccaactacttacagttgatgccttatagtcccaccagtaatcttttttttagatagacactatgtatccacctcacccaaaggttctctttttttgaagctatagcccaaatatacttaccaatggttgctttattccaaaggaaagtatttctgaagccaagccctcattctgtcttctgtttacatagatgatcttatgccacatagccagggccagttgtttcaaccatacctttccacaaaaaagcacgacaaatcgaattaaccttcttcaaaacagtttttggaagcaacataatctgtgcccaatatgtatgtaaggttaataaaactaaatttaataaagtagctaggccagcaaaggagatattccttcttccccaaacacgaattctctgcactattttctcaactagcatgtcacattcagccactgaaagtcttcgagaacatattggaatcccgagatatttgaaaggaagcatgcatcttgagaagctagatgctgttggaattattttaccannnncttaaatctactcacaagtatgttta

SEQ ID NO: 57325 - DNA, 3883 bp, Cannabis sativa
aatcttcctatcataatccgggtggttactccacaccctaaactacttgaagggtttcctcccattaggtatttcaggatgtattgtaagcagccccggagaatgatcaaagattccttcgtttagaaaaagtgcttcagtcgtcggaaacttagtgatccaacttggattagcaaggattctatcaatttttgaatagatcctatcctctccatgttctttgatgttccatgtgaaaaaattaccacttgctttaacatcttctagctgacatttttcaatacactctataaattcagcagccttatgaaactttactctatctcccactctttcttctctaaagagaatctcattgaaatcccccaggactaaccagggatcttgtgctgccaactccattaattccttccacaattctttccttccatctttatcattcacagcatatataaaagtaacaaagaatttgttcttcccatctaccgttgtcaccaagctatgaatgaattgaattccacatttaagaatattaaccatgaagctattaggattccatgccaacactatccttccccccgcatgccatgctatattcgacgtaaaacaccatccataaagaacactagtatacaaagcccccaatttgggagccttgattctcgtctcaaggagaccaactaaaccaatttgttgttgagcaataaattgcttaactagtaattgtttttgttggttgttgatcccccggacgttccaactcaatactttatccattaggaagaggaggacctccccctcctccagtgttctgcaattcaatctcgatgttctcccctattccatctctctacagtggcataccaacatcagttaattcatcttcaacctggtagcagctagtcgatgttgtagacaacacctgaaaagtgttagccgtatctatcttcaaactagggggtttttctttgacttttcaaactttcccagctggtaaaaagccatctgagtcttctaatggttgcttccctttctttttgtctgctgcatattgcccaggagtcgtgtccctagtatctttgagtacccattcctacttctgccctgttttcttcttacattctattgtgttgtgtcccagcccatagcaatgaccacactttgttggattccattcatactatactgagacctccacattgttcccatattcatcttcaaattcgattacagcagggaaatcttgattcaaagaaacttcaataagaactctaggatacagtagcttatccctttctttagttactgaatccaccatcaccggattgcctacttgccatatgatcttgaaaagtgacttctcaccccaatacttcagttctaggtcttccatttgaacccaaattggaactaagcttacatcttgcttcttaaaattcacattagggtcccaagccttcatgataacaggcattctattaaaaaggatgtatccccctgctaaaatttcatccctaactatggtagactcgaatcggattaagaaaattccataggctatcatcccaaccttatccactttaccaggccacattcttctagcaaatccatctaagattgacaaaggtggatttgcccctaacacataacaaacaattgaaggggtccagaatgagacctcatcctctatatcttccatctgtattttcactcttttcttttattcatttgacttaaaagtgctagccaaattttttctaacagatttagatcgcaggacagggggtacagattcgttaccttccgaaattttcgtggagaagagttgattcgcctgcagaaaaaggcaaactccgagcgaacttcctcttgctgttgaattgctttcagagatgatttgggggatagtggtgcttgaaacacatctgtaatctccgggtcttctaagttttcgccaccatcctcctcctcttccaaaaacacaataggctccacacctaaaatttcgtccattgatttcaccttccgagcaccagaactcgaatccagccctttcttcttcttctttccagattcttgtttcccaaatttgttcgacccctacgatgccttccggggacgcccacgacctaccatagccactgattcaaagatcggagtcggagagccctagcagagcacttcaagagtcaactcagttttttttttcaagagtcaactcagttttttttttcaagagtcaactcagtttttttttttttttttttggttatacactttaatatttatgcatgatcttttttttttttttgataaatatgcatagttgcatattgtaaactatgtttaaaaaaattatcatcaaatcattcgtcatcataaatatttttttcattatttttatagcattttgataatattcaaccattaattttgattatttttatttttattatgttatatgagagtttaatattttgtcaaaaaaaaacacgagaaaagaaaatttttcttaaaattgttcattaatggattaatgatgtctttttatttttaaattttttcttcataaaaaaataatatcatcattcattatgttaaaagtatttttttatttttataccttccaccattattatattacactcataataattcatataatcaccgagacaaatctatataaaatgaaacttaaagtaataacattaattatatattacattatttatgctcaaaatatttatatatgtaatatatatattgaaatataatatccattgtacatacaaacaaacataatatataatatatttagcatggaataatatataactcacgatgaagttaatatttttagaaaatcaaataaggaaagtatagcaaatggtttcaaatcataggattatgttagttaatgtctttatttcaaaacttgtagagaaatggcctttgtagatattttattagggaaatttacatcctttactaacttttccatttttctttcaaatatactgtgacacggcaaagttaacttttttactgtttttattttttttgtttatgtcggtagtatactgccttggttcaatttgtatatataaaaagtttacaagaattgattgatgactctcatgtcactttcattccatgtcagattttttatttttttaatttaaatttaaaattgattgatgactctcatgtcactttcatttcatgtcagattttttttatttatttaaatttgaaatttaatttaaactcacattttttacttaagtttgaaagtgggcacaatccacccacgtgatccccattcccaagaatttatataagtattttatttcgctctctatctctttttgtgggttaaaatctataaaaaatttcttgagattggtgtttaagataaagaccatcaacaaagactttacataaaacccttctccccactcttcactatttcaaaaacttacaaagctcactcattttattcatttttttacttaggttttgagagagaaaagcaagaagaacaatacagaggaagaagaacaacaacagacaactcaaactttccaagtaaaaaaaaaaactctttttttctttatttattttttttagaacaacataaactttactgggtttttgttgttttcaataattcagtttttttttctttttgggggttgtagtttagctctgattttgtgagtggtggtgttgtctcatttgatgactcttatggcttattttgttattgttttttttaagcttgtttttatattctttatttattttttttgtgttgttttagttttgttttagtagtgttttcttatgtttttttttataggattgggaatccaagtacacc

SEQ ID NO: 57326 - DNA, 1062 bp, Cannabis sativa
gaagactcgtcgaggaaggagaatcgcagacaccaagaatgaagaggtaaatattttctctggaaatttggaggtagtcttgcaaggctgtggtagtaatgaagggcaagtggttcaaaattttggcaatggcgaggaggcggcctcaagcatgcccccaccatcgtcatgaggtgtttatcttggaattgtcgtgggattcgtaggcccacgacggagagaaccttacggggtttaatccatgatactaacgctgatttagtctttttggcggaaacaaaagttgggatggtggatatggaggcctgtatgaatcggttgggttttttaaatgtgattggaattccatcagagggaattggtggtggcttttgtctggcttggagggttgctggtttgattgaagttcaacaggtccttgactcgggatttcatgttgttattcctgagattaatggtgggactaagtggcacttgttttgtatttatgggacgccttatgttgaaaagaaaaaggatttttggaagtggttgacggatattgtgcgggaatgtagggagccgtgggtggtgttaggagatttaaacgtgattttagatgactcggagaagatgggaggcaggagatttctgagccgtgaaggggatctgttaaagaattttcttcatgaggcagggggtgtggatttgggattccagggagtgaggtgtacttggcaaaatgcgaggaagggtgaaaagaacattcgcaaacgtcttgataggggcatagcggattcttcatggtgcacaagcttcccaaatgctaaaatcttgaatctccctatcttaggatcggatcattctccaattcttctctcgaattcagaagttcagtcgaagcttaactatccttttcgcttcctggaagtgtggacttcaagcccggaatgcgagaaggttgtgaatggggcttggaagcttgaggcgagaggaagaaatgatgaagttttgcttaagaaattggggaatacaaaacgcgagctgaagagatggaaccaattgtcgtttggcttctgtgat

SEQ ID NO: 57327 - DNA, 1420 bp, Cannabis sativa
tccagtctgcaatgacttatggtcaaagggcagttcttaaattttcttagtacactggtgctcaggccattgctcagatacgagaagactaagtcactcacttatttactaggcgagatgcctcaacgggatacatttggcgacgtgcccatatccatatcagcattgaccgccttaaagacagtttaaatcacagttgtgtgattctctaatattatatgcacgtaattaagtggagcataattaaagcccacaatttcggagaatattgttatgagattcaaatttgaatgtaattaactgccaacttatattactataaataagggcagattctacaaaaaaagggaggaaaaatcttaaagagaaagacgtgtatacttattgtaaaaaccctaatcttgtttctagaaatatctgaataagatagacttgtggactatgcaaagttaactgtaaaaccacgtaaaaatcttggtttcacgttattattttctttatatctgtgcttgatttattgcaaaataggctcataatcgttaacaaaataaaataaatttgaaaaaattattctaatttatgttgatctaaaattaataaaattaatttcaatataaatataatttttctatttaattaaatttcttgaaaaaatatttaatatttaagtggcctaaacaaattaacttaaatatatctagaaaaataccaaaagtatttagataacaactatctagatattttataaacaaattattgattttctaattaaaaatataatatattttagtctatttattttaaataaatcattgataaaaaattacttgatttaagttgatctaaaatgaattaaaaaattaattttcaactttaatctaattttcaagatttcaaaatatctacatttaaaaataattttattttgaaaattacaaaaaaatgattattacattaaaataaaatatactttgaaattattagaattcaagtaaatctgaaataaaagaatcaaacttgaatataattttatatttaattaaatgtattaaaatagaaacaaataattaagtatcttgaataaaatcaacttgtaaatgataattcagttgactaatataaaaactgaaatgggcactcaatcatttattgcgttaagccaagctcgaacgaaatcatcgtttcacttcttataattatagaagctatatattccttatctatgattagcgctctcactcaattatactaccatgttcccaagatataagtattgggaagatccactttgtcaactttaacgtacaagttaaagagcctaaataatacatttaagctagaacctaaccatcttaggattaagatatattgacctaagatcaactaagtgatattgacttagaaagatatagctataagt

SEQ ID NO: 57328 - DNA, 746 bp, Cannabis sativa
  modified_base (691)..(703): a, c, t, g, unknown or other
gttgtgtggagaagcggcggcctgttactcagctgtgatggtggcgctggacatcggtgccaagtttattattatggagaatgactcgagtgtggtgatcaatgcgcttagtaggaaggatccttattgggctcttgagagttgggggttttgccgcaaattactcttaaaatttttatttttatttcataaaatatgaccatataggataattttttagtgacctgtcattgtcacgtgggcaaaattaggacttaatgaagctggacaggcaacaccttaaaattgtaaatggaacagtactttggagggttttcccaccaaaatatgaggttggatggttttttgcaagtaaattgatagttaggggggttttgctgcaaattactatatatatatataaaagtttaaactttatgattgattgctatcacttttttgaccgatttttttacttaatttttttttatttttgattttttttcttgaaaattgtgcacacccacatgaactctcatttctatatagtatttatgcatttatatatatatattgattttaagcaaataattaaatactctttattttatttgtcattattttttgagttttatcttccctattcatcttcttcttcttttctatgtctaaaacattaaccaaagaaaagcttgttgggttttatgccctnnnnnnnnnnnnnttcaatataatcagatttacatattaatatagatcagaaataa

SEQ ID NO: 57329 - DNA, 2783 bp, Cannabis sativa
  modified_base (2712)..(2717): a, c, t, g, unknown or other
ttccatgaaaataattttaattttcattctgaaaatattttatttggattccttatgaaaaattaagcaatttttttttacggaactcgattccgataaaaattaacaaagttatggtgatttgaaaaatcgggtccaaggtgtgttgagatggtgcacacgcgcaccaggtactcagaaaagaaggtccttgcgcgcacggagctcagacaaatcttgtgtgaaggctcgacatgtccctcggtttagacacgcatgcgcacatctagatgctgcaggcactgagaaatgctgttcatccgagtctacaattgcgcgcgcgtaggaggctggacgcagcctcctcgtgggcagccaagtgttttgccccaaaaaatgcgattttttgtggattttttttcacaaattttgaatttttctaattttaaacgctaaaaatcaaaataaaatattatttttaatatttaaacttaaatatcaattttacaaattaataatatttaatttttaatattttgaggtttaaattctaaaattgattattttattttaaattatggttagattttaaaaatttgttaatttgttaatatttatatattatttaattataagattaaatattttaatattggctatattttaattaaaagatagccttatctttttaatgtgaaatattatattaaaattatcttatatgatagagtaatttgcggcataaatacttaagttttatgacaggtagcagataagtacctaagtcatatttttagcggtaaaaataccttccgtcacactcctggaacttccgtaggtacctgaccgttaactggcaggtcggtacctacgtggcagcccctgataggtccatgtcatttaatttatattttttatctaataatttttaaaaactaaaaaaaattatttaaaatttaaaaaaattaaaacattaaaaaataaacatatactatttcttttctcttccactgactctctctttcctctcgacttcatctccttcaatctccatctcatatgtccattaataaccaaatcataatacaaaaatccaaaatcattaaatagatcaaatcttcatcctaccaacctgatttcatgtttttttttctctttttcttttactctttcttgaacagtcaacaaaaacccagaaaatgggtatgaacattgaaaacaataccataaaataaactcagaaaattagaatgagcctacaaaaactatgcacaattcgaaaaatattttggcactaaacctcatagtcatcacccaatattatatttgattgattgaaaaaatgtagtgctaaagtcatgtaacatatatatttatacatatgtgtaagtatatatatgtaagagagaatggggtgtggatagacaactagaacagatccaaacaaagagagaaggacgaaaaaaaaaaacctagaatcatgtgcatcttcatccctattatacaagatcagatccaaacaaagagagaaggaaggaaaaaaaataaacccagaatcatatgttcatcttcatctctatcgtaccagatcgactatagatctgaacaaagagaaaagggaaaaaagaaaaaaaaaaaaaagccaacccagaatcatgttcatcttcatccctatcatatcatctgaaactccaaactcaaaaattcatttaactctaaattgacacataccctttgagagtgcacgaaccaccgcaacccaccctcgcctctatttgaatcgccaacatcacctagccccacctcaaattgaagcctcactcaatctatagccagatctgtgacatctccacctccatgaatgtggagcacgttacagatggaagaatggctactggaggagagagcaatcccctcttaatccaaaagtctatttccagaaatcttctttaggaagaagaagaagaaaagatatttcaaattaggtatttcagttcagataccttgtaaaaaacaaattaggtgttttagatcaagtttctaattatttaggtttgagtttggtttctttttgttctaatttgttgtttttactaattaaaatggtaagttttattttttattctaagaaaaatatattaatctcaagaaaaaaaataaaattttaggtttcagatttttctttttcaattttttttttttgaattttttaaatatatatttttgattttaacatgattttaatgaatttttaaatgtaaaataaaaattaatgatgtggactaatataatggtgacacatggacacttacttggaagaaaacggagaggtacctacggaagttccaagagtgtaacggaaggtatttttaccgccaaaaatatgacttaggtacttatctgctatacaatataaaacttaagtatttatgccgcaaattactctatatgatatattaaataaatataaattttgaaattaacttagattttcttatagacattctaaccataatatttttaaattcaaaaatagattattttgtgaaatatttataaatagtattttaaatatttaaaaaacctagatattttgtagaaattttgaaaatacttaatttgagatattttgacatataattagaataattattagttgtttattattttattttaaaataatgattacctgaccatatctatttcaaaattaatttattttgttattttaannnnnntaaattataagattagaaaataatattgaaaatatctatttggttattttcaaatcatttttctta

SEQ ID NO: 57330 - DNA, 2022 bp, Cannabis sativa
tctgaggattataagagaagagagggagagagacaaaatacaataaataaatattatgagaaaattctataatttactataaattgtattttggtattaaaataatcttttagttaaaatttttatagttataattgtttaaaatattttgtaaaattttaaaaaatgaaaaagaaaaaaaataagattgaaataaattataagaggggagagagagacaaaataaaataaataaatattatagaaatattctataattaacactacactaatatatatttttatctattttagtatttaaaataattttttaattaaaatttgttttgaagttatgtaatttataattatttaatatattttgtaaaattttaaaaaatttaaaatttaaagagtattgtactcatgcttattttattttatacgcgtatgaaataaattgtttaaacattgcattttatattgtaattatttcgaatttttaaaaaatttataaaatatcttaaataattataaccaatataaaaaaaaaaaaaaagactaaagaattattttggatatcgagataggtagataatgcattagtgcatctcttttataaggtatattgtagactcatctaatgttatatatttttaggtgattctacaatgcacaatcttataaaatgtgcaccgatgcaattcctatctatttttgcattcgaaaatcaccacaattaaaagcatctttttatagttgtatacgttatagttatttaaaaattctataaaattttaagaaatccaaaatactttacaatatagaaaacagtgttcaaacagtctcaaaaatttttagtatgttaaatttctctgtaggtctcaaaattttgtaagatattttaaataattacaacatacataattataaaaaagattagattaaaaaaatctcttggatgccgaaatagataagagtgtatcgatacatgtcttttaaaaatatgtattgtagaattttttatatttttttattagaataatttagatttttatttccaaacttttcgtgcttctaattttactatcaaaagataaaatttaatatatataaaaatttaatacatttcttttaaaaatatgtattgtagaatttctttatatttttttattagaataatttagatttttgtttccaaacttttggtgcttctaattttactatcaaaagataaaatttaatacatataaaaatttggtaacaaagtttagtatgtattaaaatttagtacttgaagaatagatatatataattgaacaaaattgaacataagtttctaaatttttgatgagtgataaatttaaaagtataatttaatacatgttaaaatttatgttaaaaaatttaattagtattttttaaattaaaagttgaaaaagggagaaataattattaaaagaaaagtaagaaaaaaaaaaagtgagtgagtgagatgtggcaaggtggggttggctttaagcaacaatttaataaaaagaaaaagactagagacgtagggtgaggatgtggtcatgtgactcatcactcatatatgccttatttcggatttgtttggctgagtttttgttttttgttttaatttttagagttaaaaatttaaaatttagtgatttctcaatcaacaacaaaagtggtttaacagcttcataagtttaaaaacacagccaatctccatttgttttggtagaactaaaacattcgatagactcgattcatttcaaattaagtttaaattattgattaaattcgagccaatttaaaagatatatataaaatatatttaatagaatcaatcagtttaatctaacattcaatatgtaaccaagtctaaaaaaattttaaaacattagatttaatttaataaacatccatagtgcaacgttgacttggttaattagtaattttttcccttgaattttgacatgtaccaaatcatgatccctgaactttttttgccgttaaaaattccccttgaactat

SEQ ID NO: 57331 - DNA, 1264 bp, Cannabis sativa
tgaaaccataacaaaacctgtaaaactattttcgaccgtataaaaaaataataagacaaaattaaaataaaaaatagacaaaacactacaaagaatggagaaactccattatagcaaaacataaaaaccagttacctaatgtgaacaaattaaaattaatacaaagaaatctgatattgagaaaccagttatgattatcagctagtgaaaaatttgacacagaaaaaatagttacataaaacacaacaaatgaaaaagtaacacgaaaaccagttatgtgaaataatcatttcaaatactaaaacttggaacctaacaaaactaacaattaaatgcaaaaaatcggttatacaactaactaagaaattgaactagaaacataagacacataaagcaactaaatgataaattaaggcacagaaactagtcaaagacataccacaagggagtttttaacaaatgacatgcacaactaattaaaaattttacccaaaaaaactagttaggtaaaaaaaattattgacctctttgaaagaagcgacttagctacacttgcacccatcactttgaaattattggttaatggtattcataaccatttttcacttttcttcccgcaaacagagtaaaatatcagtcggcaaaatatataaacaattcatctataattgcattctatttcctcactgctctacgttctcatatcaagtttttgtgcgtggcgcccttaacccggggtcacaacaagatatacaaggggaggggcattaagccttcttgataagaccaattcgcaagcgtctatgcaattcaatccttttactgctattaatattgtacacaactacaatcaaaatttcaaacataaaaagctcactcctctgtgacagtccaccacaactaaccaaaacaccatccccacatatatgtatccaggtacatgcaatgaacaaaactagctctatgtacttctaactactactaccaacgataacaaatctaacaaatgtagcaaaaaataaaaaagcacaacaatgactgccacctgtaatatcctgtcttccattgtattttttatagtgaaccacattatagtaacacgacgtgaccaattttatgtgccctatcaacaacaatgaacatgaaaactaaacaaaaaccagtttgatcgcagaataataatgaacattatgaaaaatacacataataaacaataaagagctgaaactatttgcaccagtcaactaaatgaaaggaaaaaaaa

SEQ ID NO: 57332 - DNA, 1129 bp, Cannabis sativa
cttgcagatgatgatgggtttaaacaagttcataagggtctgaaagctaatggtactacacaggctgatagcaccagcactagaaacacattcattctcttacaggaacaaagagaacctaaagaaaatgagtgcacaggaatactagcagcaacccgagataagacaagaggagggggaatacctcccaacccaaatggaaatactagcggaatgtccgaggagccaacaaccttcacaaacaaaatttgatcaagcaattgattcataatcaaaatgtggggcatgttggtctccttgagacaagagtcaaggctccaaaacttggttccttgtactctcatgtttttaatggacggtgctttactagcaatatagcatggcataaaggagggagaatggtagttgcgtggaatcctaataccttctgcatcaatataatcaaatatacaagtcaattaatacatcttcaagtctctactttagatggtatgatttttcttgttacttttgtttatgcttttaatgatgaagaaggtagaatgattttatggcaggatctaaaagctatttctactcaagacccttgggtagtgatgggtgatttcaatgatgttttggagcaagaagaaaggattggaagtagggtgaagactctcacttcttattcttttaaagattgtgtttcacagtgccaactggaagatatcaaaagcagtggtaaattctttacttggtgtaataaacaacagggggatgaccgcatctactctaaactagatagggtaatggccaatggtaaattgatggaaaaatatccgggagctaaggccattttcctaaacgaaggtgcctttgatcactctccagctctagtgatttttcaccagcttgctcacaatgggagaaagcccttttgctattttataatgtggatatctcaccctaaatactctagccgattgcagcatatttggcagcagcaggtatcgggtacgagaatgtactaggtggtggctaatcttaaagcattgaagccggtctttaagaagataaatcaagaggggtataatgatttgcaatcgacagtcatcaaagtagtttttgttttggataattgccaaaacca

SEQ ID NO: 57333 - DNA, 1570 bp, Cannabis sativa
ttcattatttttattaattgcaatttatagtaattacatgattaaaatttagagtaacatcactagtcctgataacacgatcaacaattaaataggatgctcgaaaacaatacgaaaataataaaaagaattacataaaaataacatcaaaacagtaacaaaaaataacataccgataataaaaaattaacaacaaattaataagtgtataatataaaaaaaactgtatattttataaataagataaaaaaaaatcataaaaatattaataagtgtacaataataaaagactgtaattttataatatatatatatatatatatatttttttttgtatttgtgaaataatttttttttttttctgaaaggaaggtaattttgttttggcatttcggctagaaaattaatggcatgtcaccgttattttttatttattaatcacatattaatagagaacagagataagaagaagaagagctgtcttgttaagtcctttcagttaagaccattgactaagatttctcagttctcagacgtcactgcacatgcacaacaaccaacaaggaacaaaatattcttcatttaaaaaaaaaaagaaggaacaaaactattacaactcatttcttttttaaactattacaactctgttttttttttatccacttttgttttcgtaaagagctatcttcatttcagaaatataaaaaataataataattctcacataaatgcataaagaaaaaataaattaagagcatccatatactttaaaatagaaaatttataaaatacttaaaaaataaatacactaaaaacatattacaccatactctaatttttttttttattttaaagtttttttttaaaaatttactatttaggttttttatatttataaaacgaatattgacggtaaaactacctgaactttatatttttttaatacttaacaacataaactatttgtttgaccataaaatctactaaactctaattccgttttactctttacactttcgtccgaaaactttaattgaatgtcatagtggaccgctcacattacacaagtgtacacgtagtaaatttttagtggttcatataatattaattatgaaagtattataaaaaataatttgaaaattataaaaaaaataatttattttctttatttttctctttttctctctgaaaccttttcatcttccacataccacacctaccaaaaccttagccttcctttttgtgcggcagccttccccaactctagaggagctactgccggcaatcctcaatccaaacgggccacactattattatctccaaccccgagaaacccaaacccccattgacactcttcctctcgtgtccaatctctctccccgatcccccatttcttttttcgtttctctctttctcattgacgaaaatggtgaatggaggtcaatggaggtctcgagttttaccttttagacacatcttttcttttattgagatctgtctttcttttcttacaggtcgacagaggttggagctttgactgggcttcggttggcggtggtgatggcttcgc

SEQ ID NO: 57334 - DNA, 2222 bp, Cannabis sativa
atcctttctccttttaggttggggacaaaaattgtactgatcatctcttttaaggtagtggttgggtagaatttggtcatctatcgggttgccaacagtttgattctggggcctggaattagaaggtttgtcatgtcagggtgattgcacataattaaatgggtgctcctcagggtcatacttttattctccaggggggatgtaaagcgcctttcccaagttaagatctcttctgagcagtgggttctccaatacctttcccttgtctgttaatgaaatcttctaatcaggtcggtagcctttcttaattgacggttaatctcttcttattttacacgcatggattcagcttgtatccgtccactattggaattcacgcctctgctgtttgaacacaggattcactacaacatgtgtttcttcctgattatggtgaagggcattggtgtgagtcttgatttgtcccagtgcctcccttagattctccatatcagtgtttcgcccatattaacttggggcacccccacagatggatgtttggtgcctgacccaatttctccagcacactcctgactggtatttctagcctcttagacatcgggcgtgaccccagtgagggggttgtaatcccagtagtcctagagttaacattggcaagagccgtgggaaggtttccccgaggtggcagtcaagcgttggggttgtcaactcctatatttgtgggagcttggaaattaggatccttcgccattggatcacgtagctcgattgatgagaaccttcttgtcaaaaacattattagaccatctccaatggaagatattaaaattgtgctgtatttggcacaaaaagtagttttgtggtagatttacaccaaattttaggattgtgctccaatgcacaattgtaaaactttgatgtaaaatttaatatataattaatatttttattaaaaaaaaataaaactaataactttattatcaattttattattattttaatatgtaaagttaattatactaataaaataatacaaatagtataaatataaataaaaaaatagtgcatttactgtgatgtaaattttacatcatagtagatgttgtgccaaattttgtacaaaatttactatgtgctaaatttacatcacttttggcacactattggagtataatttttgttatatgagctatattttagcttttccctatttatttgcatctccattggagatgctcttagccaaattgaaggtgtaaatttgtgttgacaatcgaaactcgtcaactatcctttggtcggattatcaaaatatgagttcaaaatttagagttaagatgaagatgaaatgaaaattcaaacatgaattggtatttagattagagagaaaaaatttctttgctttgcttcaaactatgtgattataaaattaatttttcagccccctctcacatctgagacaagagtatttataggctctaatagcctggggtacatttgtggtcccaagggacatggtgacatccatggtctgtaagtttcaagttgcaggaggtggtcttatgccttgcacctttgtatggtgtcaggtggtctcaggccataggagtggtggttgttgtgtacccttggttggattgtcaagccttgcaggtgtggtgcctccattacttgtgcctccttactttgagagcttgcagaagacgtagttctacagacctcacatgctcgccttgtccttgtgatcatactattgctactttcttttcccatacttagagaaatttttacctagtataactatgttgttgtggaagcacatttccatgtgcatgttcatggttgaatgactccccttgagtgcacgtcgagtgactttcttagaagtgcatgccatgtgacttccttgcgtgcatgctgagtgacttcccacgagtgcatgctgattgacttcccttgagtgcatgtcgagtgacttcccttgagtgcatgtcgattggaagtgcatgtcgagtgaattccttagaagtgtggcagagtaacatggtgaaaggccatactgagtgacttgcatggggatcatgctgagtgacttgtatgggaactatgccgaatgtcttccttgcaaagcatgccaagtgactaccaagaatagcatgctgagtgacttccttgcaaagcatgccgagtgtcttgtaatgctaagttacttgcatgaggag

SEQ ID NO: 57335 - DNA, 779 bp, Cannabis sativa
gaaaattggcccggagtatagtatagagtttggtgcaacatgctggcataatatagggctctcctcccccatgaaagggatttattcaataatggggatctaagggagattcttacagagagtatatctcatagcctctcggtaaatttccttatctttatctgctcacttctctttttttataacatcctttaaaatactcatacatctttgtttgttggtttctaaacatcttgcatttcctttgtcgcccaacgacgaggcatggaaaaaataaagtatctggagagcgagatccagaacctgataggtcagtgcgaggttgtaaccaagcaatggaatgatgccaaactggagaacaatcaacttacaaaagaagctgagaaggtgaagaggaacctcgaggctgagcttgaagttgctaagaaggaggcaaaagacaaggtcgatgcatgccagaaactccaaggggaactagatgcagccaaggtaatgatcaaggggaaggaagctgaaaccattgagcgatgcaatgttgttggcctacgtaccatctaccaagcctagatggaaaatccaaggattgatacgagtttcttgggagagtctgaggaggaaatccttgccttctgggagaagactaaaaaggagaaagaagatgccgaggcagcaaaagaagaagaattgtccaagactcttactatgtaggcttggtttttatttatttttattttatctaggcaaatggcccaaaggccgagacagtggtttgccccttg

SEQ ID NO: 57336 - DNA, 1488 bp, Cannabis sativa
acaatggtagaaactcgaacacgtcaaccctgtcctcctcaagacgcttaaaatcctgaagacgaggaagtggcctcaagagtcaacgttgactctgaggaacgagaggaggccaacgatgaaaagtacgaggaaaactttgacgagtatgatacctatgacgaagaaagttaaacagagctgctgctcttaaggcataaggctgctgatcatgaagctgagatcgcagcccaaaaagaacaaaataaaaagatgcaagaggtgatggtcaccatgaaaaaagccatggaaacagcagggattcatatacaccttaaggccataccagcagggcttgagaaaatgccagaagagtcctctcctagcactcagaagcataagtctagggaacctagccctatacgatatccctctaaaggaaatcaatgcaacaaccctacttccatcccagggaaaaagaaaaaggtgcaggatccgcgaaaggctcgctcaaatttcctgaaagggaaaggtccgcagaggggcaaactccaaaaggggagtcttggccctcaagatcgagaggaccgaaaaagcgtttttgtgcaccaggagcccggggagaaagggagagggagcgggagataccatcctattgatttgagacaccagatcaatgaaaagcacggtgatttgtgggatcacttggacaaaaagaaacacatgccggcggtctccgcagggacgctgaatgaaggaatcatggctgagctagcaatactacacaaagacattgctcgagtctcccggaggcaaataggggatgactcagactctgattgcgtagactgcgagccgtgcgccagatacattttggaggcagagctcctcaaaaactttatgatgcccgaaatggcagcctacaccagggactgagaccccagcgatcacttatcctagtttaaccgagtaatgacgattatgagagtcagtaatgatgccaagtgcttatgctttccactaacgttaagcggttccgcggaggagtggttcaaaaagttggaaccaggatccgtggactgatggaacaaattgcaagttagcttccggagatagtttctcgctgtaggaaaaattaatctcgaagtcattgccctgactaacatcaagcagttacccacagaaacattgaaaaatttcataaagaggttcaaggaagaggccttgaaaaccaagaaatttgatgacggacaaaaacttgcacttcttcaagctgggatctgtacaggaaccccgttctggaatgaattacaacaagaaggagctgctaacctccaagatttccaaaagagagtccaaaagtacattaacttggaagaaccccaaatagtggtatacggaggatactacccaaccggagtggaaggatatgtacccggagttcaaatctcgggaatcctacctcaggctactccacaaatgagtggtatacagttctccgctacccca

SEQ ID NO: 57337 - DNA, 2984 bp, Cannabis sativa
gagatctcatccttgtataatccagtggagagttaaatcttgctggatatactgattcttgttttcaatcaaacaaagatagtcgaaagtcaacatttgggtcagtattcactcttggtggaggagctatagtctggagaagcattaagcaaaccagtattgcaaattcaaccatggaagctgaatatatagcaacttgtgaagcagctaaggaagcagtttggttgaagaaattctacactactctagaagtagttccagaagtagaaaaaccactagtgctctactgtgtcaacagtggaccggtggtgaactctaaggaaccaaggagccacaagagaggcaagcacattgagaggaagtaccatctactaaggaatatagtagagagaggtgatgtgacggtcttaaagatcgtgtcagaatataacatggcagatccattcacaaagactctacccacaaaatcttttgtgggtcctattagtaatatgggactaagggagatgcccaatttgcttttagggtaagtgggagattgttagagtttatgtcttaaaaagcatgtaaagacttttttttgattattaaataaagagttgaacatttgatttatgtatgattgttaagttattaatattattattgaataatttatattaaatataaaaaaattccttattcatatatgaggctatggcttgcagttgtacagagaactaagagcacttagttatgaataaaacagccatcaacatattaaagttatagaatatttaattaatggttgctagtatagttcactgatactcgttcttcgttgcaagtaatcttagtttggattacggaggtagtatgatatcaaagtgaaggtgttgtacataatagatattatgtatgacaatgactgatatgaatgaagttatcttattaacatgtcgtttatcgtaaagacctaattcatatcataacgatgatcagtagtggattggcctaaatcctaagttatcatgaactcatgttcatgttattagtttctttaattcactcgttacagtttctcaaagaagatgattcttataacttctgttttgggaatctaataatgtggatgactgagaacatgatgtacaattatagaatctcgactttcctaacatatcgaatgttggttccctttaagtgttaattctagaactggaatgttgtgcacaaatttagataggatttaaattatacttccaataatgaattaatgatacttaaggataaagaagtaattcaaagggtaaaatagtaatttaaccaaaactaattacaaaccaacacatagagggctaatcactagaattaattatatcaatggacactgcatttaaacttagtaaatataattctataattactaagagatcaattctatatttatagtgaagtaatcatagaattaataaacaaaaaatatttggttgatgagactcaataactaatctagttaattggagcttagaattataggtccatggtccccgaatcgccaccttgaaacaccgtcaagggtagggataaaaagttgtataaagatatttgaaaaatcttttttgaatttgcaaaatagtaattatttatttttgtaataaataaatattttttcaaattaattaaatagagaaaagataaaaattgttaagataaaatttatcaagacaagatttgttgagacaaaagttatcaggacaaaagacaccaaacttgtcctaaaagacaagggtaggcgcctactgttgttcctgttcctatggagtttgtctttttgggttaattaattcaattaggtaaatatctaatttgaaaagtggttataaatatttcaaggttgttgagatattctctcaagtagttgagagattcagtcacaaatatcaataaccgaattcggttatagatatttttttatgtaaataattatatataatttaattaaaggttttaattactataaatagaagtctgatttgagaaattagatgagttaataagaacttaatttttgaaattaaagagaggaaaaagaagttgatttttctctcaatcgttcttactcgtgtgttgagcactcaagaacaaagcttatacactttatcctaatagcccacactattgcttgtgtgtggtggaacgatttggaagatactggtgtgagtccaattgcatcatcctcatcatctagattaagggaaacgacatacaagaagtttcgaggataccttgataagcttcaagaggtatttattctaaactaactatttattgttttgatttaatgtacacacatctagagattctttgggctatggtacaatgataatcaataatatgaaacccttttgatgcgtatccgatttagaaccattaaactaacattccagatgtcatgaaggtcgagtagtggctgacagtaattgagagaattttatactttatgggtgtcactggtaatgaccaggtaacttgtgccacattttagttctaggaggacgccttcgtgtggtgggaaatattgtccctcactcgagacatcactacaataacctaggaagagttttgggatctatttaattccaaatgccataatgaggttatttgcagtgctaataggaaagagcttactgacttggttcagtataaaaatatgtcagtaatagagtatgcaacgaagtttgattgactagccaagttggcttcgggtatagtgcccatagccttcggtaagaaggaaaaatacttagcgggtttaaatgccaagattagacacaatctggctattacaacaaatgacacaataacttatgttgagatggttgataaggctcttcgagccaagggtgcagtggaatttcttaaggagccctaagggactccaagtgttggtgggaccaccacccttcctacttttggttatggtaaggatggtggtgattcca

SEQ ID NO: 57338 - DNA, 699 bp, Cannabis sativa
gctatctcatctattttatgcacattatttctattgcttgccacacacaaatgtaagaatttctatgctcaattttaaatatcttcataaaatctttttgtacattattttgatttttaagagtaattacataacttttgaagtgatattatagtttataattcatatacaatacttgtaatcaatttttttttattattttattggcaaggattagagttaaatttagagttcaattattgtgtttcaagtttaatcaaaatgagaggttattccttattgccttcttatcattttatattgtttatgtttatttattaaagcctaattaacttttagtggaaaattatgcatatctacatagtatagagtgtaaatttatgaaactgctctaatttttttaaaaatatattattttaaatttgaaaataaaaacttaaatgaataggaattattgaaagtgaaaattttatttggatgcacatgtttgtagattatgtttaattggatgcacaagtgagagacggcgatgctaacaactttgaatatagtagtgactataagtgagatacagtaatcacatcttaaaatcatataatcagttttataaggaataagacagtgacaaatccatctccatcagtatccttattattatttttatataaaataatagtaacctaaacttaaaaattatat

SEQ ID NO: 57339 - DNA, 1517 bp, Cannabis sativa
tttcagtatataatcattgagtgacagtgatccttttcttagattctaaagttttgtacaaaactcaagaatctttgatgagacttgaagtgtgagatgcttttcaagagtgctctagatctggcgcacaatgttgcatcctaccattctagttagccgactttcattcatcaatgacagtaaccatgacaccaagagttgatcctggacctcccattaatcaagaaaggcagggttgaagatctgattggcttgatcaacatcactgagaaattgaggagctggagccacatcttgaatggatctctgaagccaattgccctcgaatagcagtaaaggatttactgttttctataaaaggaaattgtgatcatttagcttgatcgaaactatgtgagtgaagtagactatgtatccatctgtgcatctctgttttgagttccagatcctggttgaggagtacgaaggccagaactagaattaccaatggcagtgcttgccatgttcaccgataatggtggaaatggctttgataccatatgagatcaactgttcctctttgacataagaacatagtagaacaaaaagaagaaagaggaagaagaaggaagaaagagagagagtgatgaggtttcactcgttttagcctagtcactgtagaaaaaaaaaaaaaaaaaaaacctagaacaacagaaatataaaattctccgtatcacaatatttttgtaatctttctcttatttttcactatatatgtaagtaggcattttttcaccaattgagctaggcctatatttttttaaaagagaaatgctaaggggcaccttaaagtaccaaatatcacaaaatgtgacaaactgttattggtgaatttaaatatcaaattctataaattttaatttaataaataatataagaaattactaactaattatagtacaccatacataaatatatgtcccataccttaaaatactaaataacaatattcatttagtttgagaagaattttcgcatcagtgaatatttagagcgtctgccctgttgttgtgctctgagagttattgtccattaagtttttttttttccagtttctttctttttaaccgtttaccctgcaatctctactcccacaattgtctgccactggtattatggatcctttcatacacaagatgaaatcggctatgcaattgtcagatgctgagaaaactgttgttgctattactgatgatggtaatgaaggtcttcatgaagacactcctcctcttgactactctctgtttgcccgtgtgataacaaataaaaaagtctggctctcaacatttcaacgtcaaatggcgcaacactgggatggtcgatttaaggttaatattaaagaacactattctgggttgttcattctctattttgggtgcgaaggggatcgatttcgtgctcttgaaaaggaaccatggcattttcaagaccaccacattgttctctatccacctatggctatgcacaatgtcacccct

SEQ ID NO: 57340 - DNA, 1039 bp, Cannabis sativa
aatacaaataattgtattaaataatacaatacagcataatacaatctaacataatatacaataaagtatattacaatacaacagggtataccaaacgagcctctagatatataattagagagaggttttttttttttgatgaataagaattttattgctccaaccaaacttttacatcactaatctttacattttgctatcaatacatttacatttgattctatacaagttaagtcattaatatccatgctttatcttcatccttagctttcttaggaagcagccccttgattctaatcttactcatttgctgtgttttcttgaccgtggtgttgataagccattgttgttgattccataacacctcattccttgctttccaaacataatacaccaagcttgcaagtacagtcttcaccatactcttcctagctgctgagaatctcttcgtgttgtggcaagcttgaagcagttgcttgatattgatcaactcatgatgttcttaggagggcttgctttaatttttgaagtctttgatgaatttatgttattacgatccctctgttcattacaagtaattattagtttttacataattattaaattaaaataaaatttatagtaaattacctaactaataataatactacatatacattgaagagtctttttttggacagtgataattatcagtggcgatttatcgtcagtgaaaagtcattggtgataactcacaatgaaaggccctcaattttttttttctaaaataataataattataaatctattttatttttttttataaatattaatttgtatcaaacatttatttttctaactaattaatatacaaaataatttaattaaaagtaaaatatgataacaaactaaatattttcatatcaagtattaagagtgaaacataactcgttaagttaagagtacttattaaaaaagagtgttcataaaacaaagatatatataaactagatagtgatgtaaataaaaaatactaaaactaatttgtagtagcgtcgtc

SEQ ID NO: 57341 - DNA, 976 bp, Cannabis sativa
aacttacctgagcttaccccgaaggaacaatttaagggattgggtttcatgttgtattttctaaggattttgaagcattcatctagatcctctatgtgcctctagccttcctatatttgacgagcatatcatccacatattcctccatattttgtctgatctggtctttaaacattttgtttactagtctctggtaggtagctcctggattcttcaaaccgaacgacattactttgtagcaatatagacccatatctattcgaaaacttgtatgttcttagtttggtggatgcattgtgatttgattataccctgaataggcatccatgaagctcaggatttcatgttcagttgttgcatccacgagctgatcaattcttgaaagtgggaaacagtccttgggacacaccttgtggtggtcactgaattgaatacatactcgccatttttcgtttggcttgggcactagtatggggttagccacccaagttggttagaaatcttcaatgatgaacttgttctcgcgcagtctctctacctcttctttcactgctagcacccgttctttgtccagtagtcatctcttttgctggatgggacgaaagtttaggtcaatgtttagggcgtgagacatcacagtggggtcaataccgaccatattctcatgtgaccaggaaaaaatgattaggttttcttttagaaattttattaaagctaattttatttcgagcaacaaacccttacaaattttgagtttcctggccaggatatttgggtcgatttccacttcttccaattcttccattgtccttacatttttatttgtttcgccaagtcggggatccatgtcttcgtccctgccatgggagactttctattgggcaatgtgttgggatttgttccctaaataaagctctattttaatgtaatcttttctattcaattatcgatcaagaaatagatttaatttcattac

SEQ ID NO: 57342 - DNA, 818 bp, Cannabis sativa
tttactagttagagaaatttctcaaggtaaattaaaaaatacttcttttatttatcaattaaccaaatctacctctaatttatatttaattgaaacatactttttttttatatgtactttttccaaaatatcctaatataggagagagtaaaaataaaagaagacaatataaaaaaaatatagagtgatattttatcaaatttccctattttgatgacgtgttagaagtattcctactaataaaaagttgtagcttattatgtagatttctcttctaaatttttaacggccaaatgctagagtattagtttttatgaaatcagtcactaagcttgtaaatattactaatttttcttaatcataatatatttctttctgcatggaaagatcccattctacagtatgtaagtagtcacgcagtcattccttcctcagcaaagtccatgttattgttcgtaatactatcttctttttcaatattgagtcacaagtccacaacatttgggattcaacctaatgcccagcctgacccatttgctgactatgggctaagcccaagtctagggtccccataagctcatatgccccttaccaatattcttagggtatattgagaagtactttttttatttatcaattaaccaaatctacatttaattttatatttaattaaaatatacatctttttcatatgtactgtacctaaaataccaagacagacagggataaaattggtaaagtatttttttttttaaaaaaaagataaaaataatagactttaaaaaaaagggtacaaataaaagaggacaatataaaaa

SEQ ID NO: 57343 - DNA, 728 bp, Cannabis sativa
aacgatgcttgtgttgatttggatatgttcatgttggtttatgcgcatatttgatgattttttgaagttggacgaaaatatcccaaaattatagcacacacgtacgcgcgcggatgcaagagaacctccgtcatgaccgatgttcagacaacctcttggctgacgaattttctggcgataatatcaattttgacgatttttttggcgtcggtagcaactccgatgatttttctaacaccgacaactactctgatgattttcccagtaccgacagcaaactccggcgactttttcagcactagtgaaataaataaaaacattaaatatgagatttaaaaacctaatttacatgtatatagcatatcaaatactatgaaaaaacctaaaaattaaaaaaaaaaaaaaataccatataaattcgacttaaaagtaacatatttaacataaatttttttgtaattttctctttaattaaatagaaagaatgaatttttaatacacaaaactaaaatttatatttattttattacataaccggacgaagtgtaattacatttactagttaataatatattgctaaccaatggtatctcacaatactcaaatacttagtgcattttaagggaaaaaaaatatataatctgcatcgcaaaggtgaaacttaaacattaaacacatcacaaaatagagatattttaaatgataattaaagatattaactccatgta

SEQ ID NO: 57344 - DNA, 1702 bp, Cannabis sativa
  modified_base (957)..(959): a, c, t, g, unknown or other
  modified_base (1289)..(1295): a, c, t, g, unknown or other
  modified_base (1559)..(1567): a, c, t, g, unknown or other
  modified_base (1635)..(1638): a, c, t, g, unknown or other
  modified_base (1669)..(1673): a, c, t, g, unknown or other
gtgtgaagtcagctcgaacatcatcctgtcgttgcagctctcgaagtgacgatctaggagacaaagcttgaaaggcttcatcatcaggtgcagattcaaacacatcttcatcttcgtccatgaaatcgattggttcgattccaaggacagcttccatcgacttggtttttttgacatcaccagaggatgacggtccacgcttctttgcaggtttagttggtttcgacacagacagcttcttccccaaattcttggataatataaatattcgaacattcaaaattattgttattattgtatctcacttgttgtctcattgtttctcacttattttcatcacagtatctcacttgttgtcatcactgtatcgcatttcttgtcattactgtagttcacttgtagtcgtcactattgtatttccgaaatctatatcttaatcttagatttcatctcgaattttaaacattttttaaaatatttttaagacattagagaaaatttattagtttgtttttttattattaattaatatattttgaaaaagtgattattattttttaaatatcttaattaaaatatatatatatataaatgtgatattttagttattagaaatgctaaaaggcaactatctttgttggtagcatatcactattagtgtaattaagtagcaggtctcatataactttaagaaataagatttagggaatatcgctaaccgattgtagggtgccacctatgaaatgtattgggcaccactcttgccaaatagttatgctctttagttataattatgtgatacttgacattaaagttatcatttaaaaaaaacgtaaagtaggtttttgttaaaattaattaatattctttaaggaaaaatttaaatgtagtaaaaagccattgaaatattatttcaagtatcacatacaactgattctttttattattattattatnnntattattattattatatcttaatgttttttttttaaaaaaagtcaaacgtacacattagagttatcattttaatattcttatattattattataatatttttttaaaaaaaaataaaagccaaaaacgttaaggttgattattgtattattgttattataatttttgagttttatggagttatttttgtattttttatagaattaaaattaaaaaggtgagagaattaaagagaaaagagaaaaataattttatatgaattaaaaattaaaaaaaaatgaaaaaattaaagagagaaaagaaaaataactttaaagaaattttagagtannnnnnnaccgctttatgtctctactatatacatagatgtatagatatagatttatttatatattgattgatattttatgtatatatacaaacaaaatttatgttaatattattcgatttaagttttaataattttttgggaatttattttttattttctaactttttaaaaatgttttatatttttatagaaaattaaaataatagtaaagtatcaatttgtagatttacgtttttttaataaagaattattaaaataatagtaaaatannnnnnnnnaatttattttttattttctaactttttttaaaatattttaatttctgtgtatgaatttatattgaacnnnnttattttctattattaagttgtagtttaatnnnnnatcttcattgttggtctaacttgtcttgt

SEQ ID NO: 57345 - DNA, 2182 bp, Cannabis sativa
cggttcagtgggacttataggaactggtcgaccggttggtccccaggaaatcccaccaaactggaattccagttggggaaccggtctaccagttgggaccattctgtaaaccctagttttttccctttttgtaatatttagagtattaccatgctattcatcgataggaaaatctctaattttgattttaagtccctaaaaagtgtgttagcatgtctctcatcaaatttacaaatattgtgatataaagccctgtaaagcgttgagctgttgttcgactgtagctgaccggcacacctaaactcaaaaataaggtaagattagcataaagtatttatatgtacgaatgattgcatgttatcatttttttacacttctaacactggaatactggtaagaataagtgtgttagtatagtgtaagattttaatgggtagttacggtgttaccaacacgagtacaaatgggtattgagtgcatgtggtacaacacctagtagctcttggaagtacaatatggctctaccatcactagtatggagtcggtacttcagtgcatgttgtacagaggtcatactttcgttgagaacgttcttaaccatttggtgagatttgcatttaggcccaggagggcctaggtacaagctgatattgcattatatatacataatttatgcatatcttactgagtctgtcgactcatcagttttctaccttatgtaggtaagggaaaggctaaagtggaggagcagtgagttagggtttggcaaggattgtacatatcacgacagtgcaacctagaggattttgatcttattgtcttttgagtcacccttttgatatcaccatgttgcttgtaaaaaaatgctatgttaaaatataggatatatttattttcataatagtttttaactcgggatcccgacttttgatcttttttaagtataattatattattttaataataattaaatttcttaaaaactaaaattaattagtttttgaatacgggtgttacaaatcagccaccccttttcataaaaaagctctacaaacagagttaacttttttcaaaagaaactttggtagcaacataatctgagatatgtaagtatggagagaaataagcactgagttaatgagggttgccctccatgcaaaagatatgttcctcgaactcaaagttttgattttaagaaccattttatccaccaatatttcacaatcaaccttagcaatttgcttttaacttattaagagacccaagtatttgataggcaactctctttggtagctagaaacatcaaggattcactgcacctcattactatccataccacaacaatagatgcagactcgtatacattaggaaatagaccagaagtttgcaaaaaaagtttaagtctttgaagtaagtagtataccgatttgaaattgtggtaaaatagtaatacatcatccgcaaaactcaaatgattcaaagcaaaattaaaggaacaatcatgaaatttgaaatccttcttgggtcctcctttcttcattattcgggagaagtatttcatttccaaaatgaagataagaggtgaaagagggtcaccctgccttatgcctcttttagcctaaaaaaatcatgcattaagccattaagtattaatgtaaatcagggagtagtgatacataccataatgagtcaaattattgcttgcggatattaaagaccttttaggatttcctccatgaagctccatttaacaatatcatctgcctttctcaaatcaagtttgatctaaaattcactttagagctcttccttccataatgtcgaactatatcttgacacatcatgatgttatggacaatgtgtcgtccgtggatgaacctaccttgattttgagctataaagttaggaagaataagtcacaaacaagaacaaatcattttcattgccactttatagagcatattgcaacaacgtgacaatacaactcgcatgtccctgaaatatagttttgtcatttgacagagaactgccatcacaaaactaggcgcatatgttatagtgcaaacttcttgccaaaaaatatgagtacagtcttgtaacaccctaatctatagggacgccacgtgtgtgattttataaactagtttaatactaatagaataattaattattaaaaaccgtg

SEQ ID NO: 57346 - DNA, 574 bp, Cannabis sativa
atttaacctaaatttaaatttcagcattggacatggcttaaatgatttcattttatcttgtcccttatcattatcacttatcatttattatgataagactacactaaacatgaaaattggacttgacagaaacaattgtgtaataatttattatttgcttacaccccacatgccaaagtagaggagaggatctataatttttaagaaattgaagttacctatcaaaataatgaaaagatatgtgtcatttccatagtgggattgagaaaactactcttgctcaaactcttttttcaataatgaatgagtcaagaagatgtttgaatctagaggatgggtgtatgtttcagataaatttgatttcacggttgtgacaaaaactctcattcaaacaatgacataaagttgaatttactttaagttaatttgtcaaataagttaatgagaaataaatttttgattgttctagatgttgtttggaaagatgattatgttgagtggacagaagtgatgaagcctttcatagtaacaaatgtcattggaattgttgatacacaccatcttagagaattat

SEQ ID NO: 57347 - DNA, 606 bp, Cannabis sativa
gaagcagacattttggttccgaaaaaattgagaaaatccagcagttaggccccaaaccaaaccctaatgtttaacaaagggaatgggggtccccctaactgctggaaatagggcccctccggatgcttgccaaataaggaaaccccaagagactttccttagcaagcatcagatgcaaaaaccccaaaggcagtgacattgcaaaaagaaagaggaaaaggggaaaaaaggcaaagccgagaaagcacgaactagtctaagccctaaaggcattattacaaaaggtaaaggtgattcctcaaaagaaacgtagtaaaagggagcaatcaagacacaaaaaagaggaattcaacgcatcacacagaaaactcaagcaaaattatccccagaagttcaacattcaacctagaaactgtaaacatgtaatataaacaaacagtaagcaagtgtaaagtgtactgagaacttacatgaagtttgaaggctgtgggttggtgttaatcgccggtaaagggatgattggcaacggcgaaggaagagaagcaagaaatctatggtgcctgaaattcttacctctctgtgaaagctctgagaaaatttggtgaa

SEQ ID NO: 57348 - DNA, 1215 bp, Cannabis sativa
aggactttctatccttttcagtggcatcatcagtaggtttcggaggtgcatcagttctcaaggccaaatccactctcataagagtcaaattcatcgtgagagattctaaatgttatgcttttatatttattattatgctatttttaatattttattattaaattttaattaacatactctttcgtattaaataacttgtattattattattaaattttatatttttttgtattattataattattattctttttttttttaaataagcgtgcatatataagataaataaagttagacctcacggtcattacaaagaatttgttcagggatggaatgaataggaagtcatccaaacttctggtgggtaaaagcccacttagccacattatgggcgctaaaattacaatttctactagtatgatagaaaatacaactaataaatgaggaagaggacctaatacaaaatgagacatagctctcaagctcccacctggactcagtcctgttgagagcgttgatgactatcctcgaatcactctccaccataataaatttaaaggcatagttcttcgctatatccaacgctaagcaacacgccgccgcctcaccgcataaaacattcgcaaaatccactctagcagtataaacccagattaccttgctcagatgatcccttgcaacaactgcgatgcacattgagtcaaaccccacttttacgtcacgattcagcttgatccaatcttgcgggggaggactccaggcaaccgctaagcagggaggagagcaagggaacaccgaagcatggtgaactgcataagtagagcgaatactgtcaacgcattgaagaatatcaaacagagtattattatgtaccttttcgtttctgattcgccaaatggtgtcaaccgttaaagaggcatagaggaacacctcatctgaattgaggcctttatttttgagatcccatatgaacttgacccaatcccacatccggataccagaaccacagataggatagatgccccagggagaggatctccaaagatgcatagccacatcacacgataagaacagatgctcaattgattctgtctctaaaccacaaagagggcacacatcctgatcaataggaaatttcttactgatctcagcccgaacaggaagagcctttgctaaaatgcaccaccatagggtctttagcctttcagaaattct

SEQ ID NO: 57349 - DNA, 1087 bp, Cannabis sativa
  modified_base (458)..(460): a, c, t, g, unknown or other
  modified_base (539)..(545): a, c, t, g, unknown or other
  modified_base (593)..(598): a, c, t, g, unknown or other
  modified_base (1032)..(1035): a, c, t, g, unknown or other
tcattgtttcacttctaaatacttatagaagctatagatttcatatctattattagcggtcccactcaattacactatcatgtttccaagatgtagtgttcagccgactagacattaacaaataactttaagaacataaataatacaattaagattgaatctaaccatctcacgattaagatttatataactaagatcaaacagtgatattgagttagaaaggtataacggtaagcttatgatatcttatctaagatcaacatctatctaatccaatgtatactctatacatccgacactggcatactttgccaatgtcctgtgaaggacataacacttatccaaggtgtaagtataccttatcgctaattatcatgtgagtataatgccaatgtactgacaaatcatgggacttaaacctttaaacatataatcatgattatattccactgtgttgnnnacactataatcatgaataaatatgtgttatggacttaatagaatttatacattagatatataatcatgaaataaatcannnnnnncatgcaacataaaatgattttttatcttttattaattaataaatctgnnnnnnttgaaatgaattttatttagggcagagaacccaacaataatggctaagggctctacctcgaccgatttggtaaattaatctactgccactactgcatattgaactctgcctttctccttaggttgtgaacctatgaggtcgattccccagaaaacaaatggctagggattttacatactcttcagttcatttgagaatatttggcacttgtaacactttttgacacagtccattgagtcttctattattgttggttaatatttcccttatctcaatatcttctttgaaaggctttgcccccaagcatggtttccacgaaagccctgatgtacctaaaccatgagaagtttagcttctttcatgacacacctcaaaaatggcattgaaaagcttcttctatactgtaacgccctaactagcataggcgtattacnnnntttttaaacgtactgtgcagctcgctgataaccaacgaggtttatggaaatc

SEQ ID NO: 57350 - DNA, 1324 bp, Cannabis sativa
aggttgttgctgcagtaatgacccaaattgatcatacacatgttgttgttgggatgaccctaattgattgtacatatatagggtattgttgtggagccgacacatgtcgacggtagcctacttggtagcaaaatttactatctaagatcaacagttaatacaaaattggatgacacaattttataaaggcatataagattttatgttgatgacactatttgatgatatcttaagttaaaatattttgtatcaatttttttttttttaaaaaaaaaacatgttctattgtttatatttaaaaataagtattcaatatttaagattatcatataattaattaattatatttattttttaaattattattattttatttttttatatttattaaattttattattcaaaaaattaatattataattgtaaaattaattacttaattctttgtaaattattattttattaattaattaagtttattttttattattgttaattattacttcaaatttgtgatttattaaatttttattatttataaaaaattaaattattatttttaatattagttatttaattatttataaattattatattattaattaattaagtttattttttatatatatttttaagtaattattacttatatatatattaaatttttattattcaaaaaaatttatattatttttgcaatattaattactcaattatttatatattataaaattaatagctaatttagtttatttttaaaacatttaatacttcaaatttgttatatatattaatttttttattttaaaaaaattatattattatttttattactaattaattaattattcatgattttttatattataaattgattacatttttttatatttatttttcacgcacttttgagttacaattttttttttatgttaaatatttattattaaaatagtacaatgttatataattattttaaaatattttttttattatttataattaactttttgagtaatttatatattttcattctaatttttctagagaaattttaaaaaacattacataatcaattatttaacaaacttataattttgtaactattcaaaaattgtaaaaaaatttcaaaaacttaaaagctaaacatttttaacaaattaaaaattttataatcctataaattacatttattactacatacacttaaaatttaaatttttacaaatttacacattaaaattttttaagcaatatattatatgtatatatgtaatagcaggttactaatagttaaacattcattttttagaattaattaa

SEQ ID NO: 57351 - DNA, 554 bp, Cannabis sativa
  modified_base (525)..(528): a, c, t, g, unknown or other
caatgactacggtcatgacactgatgagtgcaacaatttgaaggaggaaatagagttcctcatcaaacaaaacaacccccacttaaaaagatatgtacgtcctgacaacgatcaacccccacgacaacaacaacaacaagcggtcggggatgaccaacaattgttacctccccccattactgtccgcttggacgttatatctggaggaccttatcttgccagaaactctaggaaatctcaggagaaatatgctcggtctctgcgatatgagtcgggtgatgtgttggctatccaggagggagctcccaaataacctcggtatgagcatgagtcaatcatattctctaaggatgacaccaaacacgttcgatacccacacaacgaccccttggtggtagaagtacaaatcgccaatatgattgtagcaaggacaatgattgataatgggtcgccaactaatatcctcttcaagtcttcattagaaaggatgggtttaggagtaaaggtgtaaagcccgcttagttnnnntggaaattagcagttgtttatgttaa

SEQ ID NO: 57352 - DNA, 2280 bp, Cannabis sativa
  modified_base (2041)..(2047): a, c, t, g, unknown or other
  modified_base (2084)..(2090): a, c, t, g, unknown or other
agcttaaattaaactacaaataataatatcccttgtaatacataagatcttgatcgtatacgtacgtaagtttcttcaaaccctacgaaattcacacatgatataattaaacacaagaatattaaacttcaaagttattattatatattaattaattattagcaaagttattacttactgagtgaacttgatgtttatttttccttcattaggatcagcaatcatagcaaaagcttcttgagagagatcaatggttccgcgacaaccaggagagggacaaaggtcgacgattttgacgacgatagagcctccacccctgcatgggttcgaaacaccttggttggtgccgccgatgcatctcaccttatacattcttccacatgcgcccttatcatcccatatggcttcgcttgctgctgctatcataactccttcctcttcgaatccattgcatgcagacgctgtaatatatacaaaacttttacttaattgggtgtgaactaaagtcctatatatatattcattcgaaatagaatagtcaagtgtgtaacacactgtttacacgagaaatttttttaaggaatatcttaaatacctataatttacatgagcatgagaaaaaatttgtatttcgggtggtaaaaaacagataaagatgtatcaatacatctcttttaacttacgggtatatggaggtgtgtagaaagttgcggttcccttctctgcaaaagcgactaagaactggaataagagcatgcctacaaaaattgttattactctgatcattattcccatattttattaaatatatacaataagaaaattaaagcactataatttaatataatatatatatatgtgtgtgtgtttttcttatatgtttttctctaactcgaaagttttgctcccattttatagagagaattgattaagcaatcaatattggtcatgagtttacaatgtgtgtccgtctaaaactacaaattaacttttaattattttattatattcttttcttggagctaactataaaatcttctagctacgacaattggatctgatttttttttagaagttaattataaaatattgaattatatatgtatttactgtgccagtcgactcattcataatataccgtggatattatccattgtttctgaattaatggtaaagatatatttatatatatatttacatatacagtaatgtatatatttttgtctttttaatgaactcattataggaaaattagtacaatttattggtaaaccaaagtttatattaacattatcaaatgccgcagttaatatatattttaaagccaatcggccaaatatataattatgagcaaattaattacgttacaataaatgcattatatatctatataatatgacaatgactaaattatatgagcatagtgctgatacattaattatataattataaattaatttttttcacgatccttataggtatatttctaaatttatatataatattatatattatccggtaaattaactttttctgcagaaatgaatcaaggctttactcaagataaaaaaaaattacaaaattacctcttacacttaccatacagctaaacgacgcgcgcttctcatcctcaaaactttgtgcaatcgtacaaggacaaggacggcaacaacaaaaagaacccagccacagtcaacgatccaccattgatctcggttacataacacctgagaagaagaccctaatcaatccaactatctacaatcactgattgatgcgaaattttgcaaaaagaaaaaaaaaactagttcgaaacaaaaattcaaacgtgaattataattcaaatttcaaaaaattaattctcttaatttttctttttttagattcataaaatgtagatctgtctgaaatagatttggaattctcgattaatccaaatcaggtataaataaaaaaaaatatatatatatatatatacactacaagaaatatcacttttaccaacacagttcgctactgtgctggtaaaagtaacttttannnnnnnatttcgcaaactgcgctggtaaaagtaacttttaccnnnnnnnttcgcaaactgcgctggcaaagagatcaaagttttaccaccgtatatttgcagtggctaaaatctaacttttgccagcggctttcatttcatgctggcaaaagttctaataccaacattgatttgccaacctcttttgccaacacatcataggtaaattctattttactagcgcaataccaacttttgcc

SEQ ID NO: 57353 - DNA, 557 bp, Cannabis sativa
ttaaagaatgctctattgaaaatgctcttatataccctgatagaaacacacattccaatccacttggtagctttagattggtttagaaagctacaagagttgcaacaacttgtagtcctccgatttgaagttattagggcatggatcagtgttttcatattctttgttgtgtacaatatataaaatgacaatcactactaaaaaaaaacttttataggtacttttttttcagtcactaaaaagaaaacgttgccataagatcccttatagtggtttttttttttcgatccctttagcaatttttagaatgccaatagttataagtttcgctaaaatcacctcaaaagactatttttatagtagtcagggttgactttaggttaaggcgggctaggtccacgcttaggactcactgctattaaggactcaaatgaaaaaataaactttttataaatatatattttttcttaataatattatttattttaaaaaaaaaggttcaattttttttttctatgacccaattttactttgggccggccctaatagtagttatt

SEQ ID NO: 57354 - DNA, 1771 bp, Cannabis sativa
ttttttcgggttatttcggtttgtaatttttatcagttttttcggttcggtttgagcggttaatttttttgtacagccctactagggggtttggttggattctttcaaaatgaacacactacatgtcgtttggtaagaaacgacaatttctcttttcctttataactgaaacgacaatagagtcgagagcagggcaaaatagtaaatccaagttgacccacaaaaccctaatttctgtgaagcctcctatatataaaccagaagcctcgttgacctaccccaacacactcagcttaacactttacttcgccgcttatcccaaggttgggttgttctatcagttaaatttctacgattgacataatttgctctttcttgtaaaactctttgtttttcttcaattgttttgattttggttcagtatttgtatgaaaatgcatctgctttaccttctcctttcccagcaaatcctaaagctgtaggagatatatcggatgcaaagatctaaaggtttgcttaccagcccattgcatcttttttattcagttgctttggtgtcaaatgactcttccgatatttctacttagttttgttttctttactttaattatttaatggcagttgatgatcattaacaaaccgcttattgatattctgattgtttgtgttgatacatttttgcttataatctgatgccaatcactaatttctaactttaatttattttacttcaaatttgtaactattttttttttatatatagaggcaggcatgtgatgaaaaaaaatacaatcacttatactacacactgaatattcaaatgtagataacaaattctctctaatttctgatgcctatgtttttatgttcttttatcttttttagtttttgtttttaaaatccatttttgttagttgttgattttcaatgatgagaataagcagacgggcggtctgaactgatgccatgttgattgtctgcgtcttccaaattttggaatttctgagcctttatttctaatcctgttttgtaaattagctttaggtttttgcttcttttgagttgttttgaattagcttttttgtttacatttttattcactttctatgatgaggtttgcttccttatatgtctggacatatgaaattcgtttatgaatttgtatggcaatatcttctgagcttgttttctgattttttacaaacttttattcttttgaagatgattaatggcatgtgatgatacaatgatatgcaattacagatgacttgtgatgatacaactccgcttattatctgatgccatcgtttttaatctaattatatatgaaaacttgagctagtcttggcaatggtattcaacattgttcaattttcgaaaccagaccagaaaataataatcaataatatagttgtgaaaatacgcttgttgtttcaatctgagagtgacaattgttggtaagtaaattactgaacttattttttatggacatgtttaaaatgtcacgccatatttagtttgcaagataagcgatgctaattcaaactaattcaagtcaaggttcagattggaaattagtctcaagtagataatttgataaatctagatgtcagttgacagctttacgtattttcatagtaatgcctgaaaaaacctcgtttacatctccagaaatgataagccaagacctccattgaacatagaaaaatagagatttctaatttttccaatggatttttcttttttcctttttggatcccaccaaaagtta

SEQ ID NO: 57355 - DNA, 909 bp, Cannabis sativa
ctctattatgaagaatcacatcaatcaagaagggatgagggttaatctcacttaaaacctaaacagcctactacgtaggttatgcatgccctattttgtactttttgagaacttgtgcgtgcccgtaggtggcacttgaagacaagttacccattttcttctttccaccaatcgctataaaatacccctcaataaaattagtgaggggatcgaaaaaaaaaatacaagaaacacattctctgtaagaaacactcactcattaataacagagactcgtgaactacggataattaatgctcaaaccacgtaaaaaactacctacattaattatccctaagctctgattattactttagatatttcgttgccgaaaatctcggtcaacaatacaaaccaacttttaaacttattggctctaaaatcaataactaaagtaaatatatatatacaacaaaacttaccacaaaaacttcaagaacaatctccgaactcaataaaatgcttcaaaaatttagaatagacgaagacaaacacgaattagctagaggacgaagaaggaaaaaataaaaaaggatgaatgaaatgatgatgatgatgattaatactagctaaaaaattccccaacctaaaaaactctaagctccatctgtgataaagaaagaagagctaaaaaatggagaagaaaaaggaaggatatgaaattgggaaaagaaaaagtgacagagcaataatgactgtaacgttaaattgagtgtaatctgtagtagttgtgtatacaaaaagcaagctactattcctattttatttccttattttattacattttaaataaaattaacaaaatgaaaaaaaataaattatgtgttataaaataatataggataatataaagggccaagatgcaaaatg

SEQ ID NO: 57356 - DNA, 3213 bp, Cannabis sativa
ctgcttggcttatctggttcaacaggaatagagttataagaggacaaacatatgatcaggcccatgccatttcccacattagcacaaaacttcctggatgactacaagctcccagcttcagctatgtcccctctcacctgccccaacgggacctcagctcagacttcttggtcgcctcctgacccgggtcatcttaagctcaatgtagacgcatcagttcccaaggagaaatcgatgatcggttttggcgacgttattcgcaatagtgaaggccttgttgtagctgcgctggcttctccttatactggtggtggaaatgtggctttattggaagcaaaatccctccttacggcattacagtggtgtgttgaagaatattttcttgtccatgagatagaaacagactgcaaaactattaccgaagcgctgatctcccccagagaagacatctcagcttttggtgatgttatacgacatattaaagatgctttatctcatctccctgctacccacgtttcttacattcaccgctcaacaaacactttggctgatagacttgctcattgggcttcagggttagacgaagctactatttggattggcgataacccttgtaatcttactgaatttctttctctctagtgggctccctttcccttaaaaaaaaaaaagaaaagagagagatttgtttgacatgtgaagaagataaattttgtttttaaaagagtcaactagataagttaaaagaagtgatatatcactcatttttaataattttataggaattacaaaaaaatgaaaaacgtgacaacaaattttccatcacattttattttattttttttaagaaaaatattagtaaaagtgtttctttaattaaaaaaatatataataaaattatttgaatatataaatatatttaaaataaaaaaaataaaaattaaatacctcaatttgataaaatggaaaaaaggaggatttaaaaacttttatagtgctaatagtatacacagtataaaaatgagcaataaaaacaaattctaagcgtattacagtaaaaaatgatagaattataaaaaaaaatagtaccccgtgttaactcacaaattttgaaataaattaatatattgacaaataaatacttattattattattaatgttgaactataaggttttgtgttttgagttgggttgtttatgctaatgtgttgtatttttatacttgtcgttgttatgttaaagtctacatttttttgcgtcattctaatttacaatattatgtttatttaatttgtaaaatcatatttgatttaaatttttaaatacgttttatgttgtgtcgtactagaaccaacgttattaggaaggagcgaatgggattgtcgtccaagtctccacaatttggcctaaagttttcttttaaataactgtatttttttaatttttttatcattagatattaatttttatttaatttagaaaatcctaaaagaaactttacaaaaagtttcaattgtaatttgtctcttttatctaagatctccaattgacttgtgctaatgccgattttgtgcaatgttaaaaagtttatacactaatattagtatgataagtaaccatcaacggaaaacaaaaatgtaagattctgagttttatgagaagattgtaagataataacaaaatcaacccataaaatgatggtaattgcttaaaaccaaagaaattaacagaaaagattttgtcgtttattgataagatcatgaataaaggaaaagattttttaaacatgttccccaaccagaaggccatgaaaaaggaaaattacaagaaaggaagaatacgcctaaggaattgtcgatcaccttctcggagatagcgcgtgagccttgggatcaccaagaagtgccacgtaagaacggcgattggacctacccactcttaagaaataacgagatttgcgtcggtggcgccgccgaatattctcccgttttgaaaatatatatgagagagagtgaatgtgacagtggcaaatcataatgacccagctgggccttgggtggggcccacaacctctatttctgcgctgcacacgtaggtcccaccattgccttgtcggcccacgctcggccgttctactgccacttttctccctcccactaacttgtgctttgcgatgctaccccatgcccatgcccatcgcccatatttctttttccttacttttccaatattattattattcaaaattagtatgttgattatgtggtgtgtttcgtgtgctttttttttttacatattttttgggatgaaaaaaaaaactttgtttaataaatatatgaaagtgaacagttttaaaagtttaagttggtaattaagaggtagattaattgtttataagcacattaccatacttgaggaggaaacatgcatttactaccacgagttgaaaatgaaatcgtgcatgttattaaaatcaaataaaatctagtatagattttttttaaaagggtaatttacggctatattttttaatttttaaatttggtacaattaattctcctactgaaaaaattataactaaagtctctaatttttataatcgtttaggtccgtactcattcagttagttttttactgttaagtgccgaatagacatattattgtgtacacaagtatatacataacaaaattttattgagtcgccttaatattaataattaaaaatatattcaataatttcaaaataaaaaacctatgaaaaataaataaaaaagcatacacgagattagagggtccttcagcgtgaagctggtggtgtggctgattgttgctcgatcgagtagataggctagggcacatggaagattttgaagatagatttgattaagaagagacaccttgatggagaaaaagaaggtagagtgaatcgaatgtgaggctttggggtcgacagcgagaaagatagagaagatagaggaaatcaagggcgagaaagagggattctagggcgagaaagagggagtcgagcttttaggttgagggcgagaaaaagggagctcatcttttgggtcgacgacaagaaagagggagtcatcggcggataagggaggttgagagagagaaaaggaaaatcgaggctcctggcttttcttttaaaagaactcgaggcccctagttttaggtgaaatgaagaaaagaaaaaaaaaaaaaaa

SEQ ID NO: 57357 - DNA, 2274 bp, Cannabis sativa
aattactaattagcctaataaaattatgaataattaatatttttattcttaaacttaatataatcaattaaaatacacttttaaaacactttatacaatgagctcaaaacatgagaccatgaaattaatcaacattatcacaaatacacaataatgtcctgcttttcaactttccaacttttactcttaattaatatcattttagtatcttattgtttgccatcacacaacttaatacccctattatttaggagaattggtgttaaatatttaaaaattatgatatttaaaaaatagtttttttttttattaaaaaaagtgtattagcataattgcaataaataattttttaaatcccaaagttatgctatcattgctatttcataggtaacatatacaatgatttcagtaaaacattctaagaatcaaacttaaacacagttgacaaatcaaagtcaaaaaatgtgatgaatcaatagccctgtttcttcttcttctatctttagtagtcattagcataatactgcaaaaacttaattataatcaaatctgggcacctctaatcctctcttcattgttctctcaacatactttgtagcttccaataatcaaatctaggcacctctaatccactctttataacattatatatataaactaatatactcactctgcaataacaacttcagttattcttgttacaattatatatacaaaattttgtcaaagcaattgcatagacaaaatcttcaaaaagaagtaagaataacagaaaatggagagcaagatttatattaagaaaggtagcaatggaagtttgttatctctactggtactaatggtagtagaaaacattaacattatcactcactctatagactatagtacagttattattattcacaatcacaatcacaatcaaactaaaagtaagaaattaagagaggttaagtctcatcatagtcatatgtgtttattgggtggtaactgacttcttccattcttcaactcagtcttccatttcactactcatatataatttgattaccttgcaaaaacaggacttaaattaatagcttgtgttgtgattatatatttacatgtaatttcactcaaataatagaaaattaaactttttatcttgaatgccaccaactaatattataatcatgatatatatagttatgttctaccagcttcatcaactaaacttcacatgcttaaattaaatatgtacgcatcaaattgggtgatgactccaaatgctactattagacactaattaatcgttgatttaaaacaagagaccacagtcacagcctaaaaggggcacaaatcgaagactatttgattcaatattgaataaaggttttaaacaattaggacagaagagaagagaaaagagtaatacctatatattcttgccattgacaatgatatttgggatgtgagcaataattggccagtcctcccctgtctccctctccactcttggtgttatcaatggacaataagtgatatgaagatcagaaagagaagtgggtagttctttcggcaagcatcggagataacgacaggtttcaatcatcaacttcttaagacgaggaaaagctccaccttccgtaaatgaccactctttcaacttctccaaattttcaattatcaaggtctccaaagatgtaaagaataagggctttgttggtattgcaacagaagaagaagaaccataaaactctgaatctattttctccacaccacaaaaactaatatgaagatatttgagacaaggcagctgccccaacgacggcaagaggctgcaacagcaacatataaacttcaaacttactaaattagacaagcagcgaggatctcccatccaatttgggaaactgtagcctttgtaatgccaaatgctaagttccttcaagtttggatgaggctcgagggcaccgaatatatctatttgtttgtgcaactcatcaacttcagcttcacgattatgattccatgccaaatctagctgactaagagacttcttactctttaataatggtgctgcagcatctgaaacttcctcaagcctaccaacattcacaatttctagtccgaaaataaaaagactcccgtgtagatcttgaaactctttcaacaattcaataccaccacaatctctatttcttcccaaaataaatctattcagtgtttgcagattttgtagcttccccaattgcattggcatctcttttaaaaaacgagaaacactaagatgtcgca

SEQ ID NO: 57358 - DNA, 1300 bp, Cannabis sativa
taaaaagcaacaatttaatctgcatttttgcagattaaatttgaattattatgtacattaaatttgcaacgaaatggataataacagaaagaaaaatactaaagggtactagtggtgactatcaccctcttatgtgttcatatcgctattggtccaactgagtatcgggttccatataatttaatataataacttttaggaagtatcactagccaatcgcaacgcgacatgtcgagaaggtgctaggcaccactggtgactaatagtaatactctaatagaaaatgagagaggagagaaacagagagaaaagaaagattgaaagaattgaattgtgttgattgattaagtgttgattacaaggagagacatttatacccaaagagtttgtaacagatataaaaaacttgtaactgtaaaaacaacacttaactaacacacgaataactaactaactgttagtatcattgacaaaattagatccaaaatataaaattcgggcacagattgatacattatgagtaaaataatataaattaaattagatgaacacctctatacactatattattatttttatttacatattcttaagagaatttatactattttagaaattatattttaataaattacctatttaggtcgtaaaaatttaaaattacacattagatcgagtgttacgtaaaaaattataattaaaatcttacattcaaaatatatttaaatatgaccaaagtatttttagttattttatttttttgtaaaattaaagttaaaattaagactctaaaattgattttagtcaaaatatttttaaataggactgaagtaccctttcatttaatagaaataaaaataatttttggataatcgaaaagtaggcctaatgatgtggacatcaatgtttgacacatggcaagaaggaaaacattcacagagttaagttacttgagtcataacagtcaacttgggaaagggtccctatagccctgcacccaggttgacttaaaggctctaaaattggtatttggatcccaccaagtcaagaaaaatccaagtccaaagcttggagaccaaaaggagtcgaaactaaccctcagaagccaacctaggcgcctaggatttcacctagcgcccaagttgataacctggctagggttttagttttcggaaccgtcttagtgcaaatggatcaaactttgtacatgtcacaaacatatttgaggcaacaaacatatttttgatcttatattttcataagttatattttagactttatttttttgtaaaattaaagt

SEQ ID NO: 57359 - DNA, 1593 bp, Cannabis sativa
  modified_base (1416)..(1418): a, c, t, g, unknown or other
gttgctacttctttaaagaagctcctcccgaagcgaaaactttacttttcaaagaaagtactcgaagagtcaatgttaatctcagtacaaattataataatttaagaaacagagagaatgttaatttgggatttaagtcgttagacaattccctcgaagcatttaaaagatttgatagcgagaatcctacgaatgagcttcgtcgaattcttattgttgttagccaaatggttgcagaggctgcgagatctaaatatattcaacaaaaaatagaatggaaaggctttgactctggttttttccctagaggtgatattttaagctatgagaataaatgggaagatctttcgaaagcaatcgagaattctaaagatggaaattttcctaaaatacaattacaaaatgaagattatagtgtttgttatgtgtccaaagttgcagatgtgaaaaaagacatggcactcttgttgaatattgcagcataaagctttgtccaatatttaacttaagattattgtcaccaaaaaataaatgacatcaatctttgatgtcatatggtatttgagtctgtgtggtatttttaataatatgatgtttctctttatcatctttctatggtgtgatatttgtaagggaaaatttcaatttggttcaatatatgtactttgttaaataataatttaaagtttatattttgcaaagttgatcaaattgatacaacaaattaaattttagttagttaaattgttttttgatatgagctgatatgagtattttataagttatggttttggcctatatatatccaaaattattattgcaatcaatttggacatcttaattttcaatctcttctattgctgaaagagcatgtggtgtaagagcaccctaaacgcaatcatactaaaccaatcaaagaataaaaactatacttaattgaacgcaatgagagaataaaactatttaaattgaatctttattaataagaataaaaatgatgaggatcaaacctcattacattaaatctcacactgaggaacacttatcaaataatctatatatacaactctctccacagacacacacactgtaattttggacaatcactctctaaacttgtctctgaattctgaagtatgattgcattcctttgacttgagagaactgagacatatatataggtgtcagtgaggctttgtttgggttggtgtcaatgttataactaatagttgccttttttgttttaactgacaagtgctaataagatgacactacaaaaaatcttttattcacgacaaaacttgtgactaaaagttaaaaaagtgtgactaattataaattattattcttatgttgtgattaaaaggtctgagactaaaggaattaggacaaaaattacaatttattgtgactaannntatttttagtcacaatactttgttgtgactaaaactaaattagtgacaacttgtaattaaatactatattttagtcacaagcaacattttgttgtgacttttaatcacaaaaaaaatatgttgtgactaaaaagttatcattaaaaattacaattttttgtagtgtgaaactact

SEQ ID NO: 57360 - DNA, 995 bp, Cannabis sativa
ggcccaaaggaggggaatttaaccttaattaaataattgttattcattgaataagcccaatactaattggacctaaataaaatctatcataagtgactgttatacatataattcggctagcatttcaatggaaaacacgtgtcagattgggaagaatagggatcattgccttaaacgctaatcacatttgaaaatggaataactcattaaatacagacgtgacagaatatatttacaacttcctgactataatgtcttacgcaagataaagatatacaaactgttgcctcgtacattagtgagaaaccatatggcagtggatgcgtgaggcgtcaacctcgttaagcatgagtagacgtaagcgaggtataatgactgttaagatacatagcatacaaactaagtgtaacagtcgggtaaacccaatcaactaatagcgaggcatccatctctccataggaagacatgcgcatggtatcttcactaatcaacgccaaacatctttcaatgagattcacagctccgtcgagtcagtcctctcaaatagaagctaacattcaaatgatgtagaatgttgaagttcaccttgtcgccgagaatgcgattgtcagatggagcgttatgtcttcagcgcaggagcgatgagatttatattatcaacctcgaaaagatatggaaaaagatccaggttgctatcaaggtcattggaactgggttcttatcgagaagtcccggaacgttatgatttataacgtgtttaatatacgattactttgacccaataaaagcggactaatcacagctgctgtgtgatattcaaatattaaccgcatttatcttacgtgatatgtaattaaacctcacgattttagggcataattgttgtaaagatttcagttaactctgtaattaattgcctgactatgtaattataaatagaggcaagtaagactaaaaaagggacgaaaaattcataagaaaaaaggccctagaac

SEQ ID NO: 57361 - DNA, 692 bp, Cannabis sativa
  modified_base (608)..(610): a, c, t, g, unknown or other
catctctagagtgaaatatttgatgtgttttaaggtcaagtagggtataagctttcataccaactgggtatccaatgaatgcacaagcctgagatctcagagaaaatttgtgccttgagctgtccaaggtgaaagcataggcaaggcaaccaaaggtacggagatgatcataagaaggtaacctgttatacaacaactcaaaagaagacttaaggttaagtaaaacagatggtgtgcgatttaacaagtaaacagttgtattaataaaataactccaatacccaagagataaacgagattgaaaagcaagagaacgggcgacattcagtatatgttgatgcttgcgttcaacaacagaattttgttgtggtctttctacacaagagtgataaggaagaatacctttaattgtaaaaaaaagatggcaagtttagttctttcgcattatcacatcgtatacctttaatggaaatagaaaattgattgagtatataagcataaaattgaggtataataatgttgatatcaaatttatttttaagcatataaacccaagtaaatctagtatgatcataaacaatagtaagaaaatatcgataaccttctannntggttttgtgaaaaggaccccaaatatccaaatgaattaagtcaaaagcagtaggagccatgttattaactgaattaaaagg

SEQ ID NO: 57362 - DNA, 774 bp, Cannabis sativa
aagttaaatatttgagaaatgaagttgaaagtaataataataaaagaaaaaaaaaaatacttttatagtcttgattgatgacttattcaatcgctcaagttgattctctatttccataatttcatcttctgatagttttccagattcacaataacataaaagtgtacacaatacaatagcaaccataaaaaattctctcatagccatatctatatcaaaagattttatcagcaatacaaatatacattcagattagccaaacaatcaaaataaataggtgaataaaaaattgttaattaaaaaaaaataaatatttagataactacaaatttatttacattaaaaagggagaaatatgaaaaaggtaaaaactataaaatggtatgtttcaatatttgcaatgttgactgttattttgatattttcaatgaatattgaaatattacataaaaaaataaatattattagctgtataattaaatacaattttacgttacaaaattaaagaatgagataggattctgaaaataaaaataataatattttaagttacaaagttatttttaattgggataagtgttttacaactagtcttttttttttcccttaaaatattagaaattaaagaacagtttcaaaaggtttacattaaaatattttgtgaaattgagaaatctattatggctgaatatcatgcgggttatgggttctatagtacacgggttaggggttcatgaatttcaaactaagaaaaataccagcacccgcccatgt

SEQ ID NO: 57363 - DNA, 734 bp, Cannabis sativa
taagggtttatatcattttagagtattttcacaaattaccagttcgactttatagtttttaaaattttattttagactttgtattttttaaaaattacaatttggactttacggtcaatttttatttgttatgacaaaagtactcttaattataaaaaaaaattatattatttaagaccccatattaaatattttagtatattgacacctaatttttaaaaattttacttcggacctcacttttattttaaaaaaaataaataaaaataagtaactaaaattatttcttagtcaaaatatttcctaatgtatacagattaatataaataaatgagaatttaatactcaaaatttaaacaaaaaaatatttttctaattattaaagaaaataaattttgctacaaaataattttttaaaaaaattaagggtcataatactaaaaatatatgatccgaaaaattgtaaaaatctttttataactaagagcttttcggtcatagttagaaatattttgaccttaagagtcttaattgtaatcttttagaaaatataagattcaaaatagaatattttaaaatatgaggtctaaactggtaatttgtcaaaatatggggtataaagtagtatgaatcctaaatataatttttttttttgacataaccttaatttaattaaaatggtatagagtggaaatatatgtcgattataagaaagaaatggagagagaatagtt

SEQ ID NO: 57364 - DNA, 1330 bp, Cannabis sativa
agaagaaagcaaaaagaaggatgaggatcttgaccctcgggttcaagatgaaagaaacttattaaatttaaccaattgaagaattggaaaaagttgttcttgacccaggaaatcccgcaaagtgtgtttacattgggaaggacctggacgagcagctaaaatagcagctaataagtttcttaagggtgaaccaggatcagttttcctggagccatagagatatgatagggattgaccctaatattatatgtcatcatttcaatttcgatccaaagtacccagtaaagaagcaaaaaaggagattcttggattctgagagacaaggggcgttaaaataggaagtggacaagttattagtcaatgactttatacacgaggtgttttatccctcgtggatagccaattttgttctcgtcccaaagcccaatggaacttggagaacttgtattgatttttctaatctgaataaggcgtgcccaaaagactgtttcccactaccccgaatcgaccagttagtggatgcaactacttgttacgagcttatgtcatttgtggatgcatattctagatataaccaaataaaaatgcatgtccccgattaggaacatacgagcttcgtaaccaacatggaactttactgctacaaagtcatgtcgtttggggtgaagaacgctggggcaacatatcaacgattggtgaacgagatgttcgcaaatcagatcgggcggaacatggaggtttacgtcgatgatatgttagtaaagtcaataagaagtgggaatcataccacagacctcgcggaatgcttcaaaatattaaagaagtataatatgaagttaaacccaaaaaagtgttcctttggagtctccttaggaaagtttttgggattcatagtcaacgcagggggtattgaagcaactgataagtgtttgccattcttcaatgtattgcgaggcaacaagaaatttgagtggacaaaagagtgcgaagaggcctttcagaacataaaacggcatctagcaacccctccagttttggaaaaactaataattggagaaacgttactcctctatctggctatcttggaagatgcgattagtgcggctatagtgcgagaagagggtaaacaccagcaacctatttactatgtaagtaaaagattactaggggcagagtctagatatccccctctcaaaaaactcattttgtgcctagtccacgcgtcttgcaagctatggtcgtacttctaggcacaccctataaaagttttaaccgatcagaccttgagacaagttttatcaaaaccagatgcttctagaagattgataaa

SEQ ID NO: 57365 - DNA, 1218 bp, Cannabis sativa
  modified_base (85)..(86): a, c, t, g, unknown or other
ggaatgactattctatttttaaatggaaggaaagaccattccaatgcatagtaagaaaaaatttaataattttttttatacattnnaaattttattccattccattcttattcccttttcaattctgattcccattcctattttttcattccttcaaccaaacgccaaaggtggcgtttagttagaggtaataaaatagaatagaatggaaaggaaataattttaattctattcatttgttaggtttcattttaaaatattagaatgttattctaatgtaatgcccttcttgccattttgatagactgactattctattttgaaatggaaggaaagtctattccaatgtaacatgagaaaaatttttataatttttttatgcattttaaattttattcaattctattcctattcttattcttattctcattcctattcttatatttttgttcattccaatcaaacaccacctaagggtctaggcaacatgttttctaggcctaggcggcatgtctcctagagcattttgttaatgtccaaatttatattttttttcatgtcttttgcattgcttggacaatatgtcgtctcggcacactctccaagtgtaattgttcgtctcttacatattttcaaataagctaaaatttccaaagtaattttatactttatacatggtcattttacactttttcaaagcttacattctcttaatatgaaacttcaaaaagtataagtgtaacaccctaattcatagggaggccaaaagtatgatttttcaaagtaatttataatgattaactacaatttatgataaaaaaaaatgtgatttaaataaaaatttactaataaaaaaaaataatttaaaacatagcacaacttttaaactttggggattcccttttaagaaaaacaaactttacgaaattgtcaactcaactttacatttaaaaaaacaagtgacattatatatgttttgaaaaatcacccccgttggtcgtataagatgatatgtatatttttttggagaaaaccccaactcatgatcgatctaacctactctatcccttacttgcatcacaaagcactcgtaaaaaaaataagcacatacttcaattcatatgtaagaaaaatacactacacattgtaaaataacaattaatatcaaatatttgtctaataagacaaacgtttactgatacacttaataaattaacc

SEQ ID NO: 57366 - DNA, 924 bp, Cannabis sativa
agaagaccatcacataagagtgatgtttaaacattgtgcaatttatgtggtcctcaaaccttttgcacttattgatattattttcttaaatgttcaacattcaaataccttagtactagaacttactccatgttttcatcataccgaccaagcttgtgtgctttatttttgtaacttcagttacttgatatggtccttccgaattaggcttgagcacactatccttagtattaaagaataaccttctgagtaccatgtctctgatgaaaaatttccttgctttcacttgcttgttaaaatatcgagctacttttttctgatgagcttgttgctttagatttggtagatctcttttcttcaatttcttcaagtggttctcctaggaggttatagttattctcctagttgtacgtcaatattctgtgggatggaggttctaactcaacggacaacattgactcatagtaataggccatggcaaaaggtctttgcccggttgttgtcctctcagttattttgtatgaccaaagtatctcgtgtaattccttcagtcggttacccttggcctcttcatgtcatttcttcatggtttctttcaatgtcccattgactgcttcgacttgtccattttttttaggagtgtgcaactactgagaagctctttataattccatgtgtcacgcagaagtcaatgaacttttggctgttaaattattttctattgtttgaaaaaatctttatgaggaagttcgtattaacaaataagacttttcaccataaaatccaaaaatttcataaaagtgatagtttctaatagttcgagttccatccatttggtgaaataatcaacaatcacgactgcatattgcacgccaccttttccatgggaaattttgtgatcaggtctattccccatatagcaaa

SEQ ID NO: 57367 - DNA, 1117 bp, Cannabis sativa
ttatatataacaatctatatatacataaatgtatataagagcttaaatttattatttttctctacaattccagcttcaataatagcaaaactggtcacagtgtgtcgacacaaacgtgacacgattttttactggtcgggttagggttgagataattagacacgagtcaaaaaacgggtcgacacgctttacacgaaatataaaagcgggtcacataaaatatgatacgaacacgacaggatgacacgttttgctactccgtactcagcagtgaaactatttcataaaggaaaggaaatcaaagttacaaagtgatgttatatataaaaacttgttaaaatattaatcaaatatgtattaataagataattataagtttacttttagatatgaaagtggcatatgaagttcattaactactgaagatcataatatataacatcaaacaagatacaaccaaactatggatttagaattagacacactagaaaaaccaattcaattccacaactatgttaacagaagtagaagtgtttaaaagtggaatttgcaccatttgttaatgctgttgctagtgatgccactttttcttccttggattttcgtcaccactaagatgctgccgacctataaaaatgtatctaacatgtcaataataattttggagcactaccaattccaaaacataaaaagagagaaacggtaaatatcaatatgtataccattggcctaataaaactcttgcaagaaatgaaggagttggggatcattatctgtagtgatcaaaccttcacatgcattcttgaacttcattgcagaggccttattccaacaatccttcatcaactcagactttggcaatgacttgtcattatactcttcacatttccttcatcaatctcaaatggtaataccattgttgaagatgatgtttggtgatgtctgccaccatagtagagcacatttccttaatgacctcacataaaacagaataaacaatgcatttccaatcctcctcagcatgccaactgtcagaactaacatctccatactgatcaagtaatttgtttaaaataggtactaaagtaaaagatatcttataatctcccacacttac

SEQ ID NO: 57368 - DNA, 1927 bp, Cannabis sativa
acttggttagagaattacgattttgtggtccagtctacttcagatggatgtatccatttgagagatatatgaaaattctcaagggatatgttaggaatagaagtcgacctgaagggtgcattgttgaatgttatattgctgaagaggcagttgagttttgttctgaatacatgtctggtgtacaaagtattgggcttaatgatgaagttaaaatcaagtaatattgtccaatcggcgaggtagtgttgtatgcactgttggcaaaaatgaattagatgaagcacatcgactagtgttgcaaaatacaaatgatattcaaccatatattgagtaagtgtatctttacccctattaattaatatgcatttcaatatattaagtattatctaacgatataccatatgtgcttcaagggaacatttcaattggattaaggcaaagttttcgtctaagtccagaaataaaaaatggttgcaagatgaacattatcgtacttttagtagttggtttaaaaatataaggtattagatgtgttattcattttttttgtatatttgcttcgcgtaatgtgtattttaattagtttttgtgtcttattaggtagtatttgaattgagaagtacacctaataatgtgagcgacatcgttcgatggctttcacgtggtccttcttttaatgtcaccaagttttcatcatatactgtaaatggcagaaagttcaccactcaagagcgtgataaaagcagaaccacacaaaatagtggtattagccttgtcgctagtgctttgcaagtgtcgagttcaaaggatcgtaatccagttcaatgtaacatgactttctatggagtagttaaagaaatttgggagttagattatatcattactcaagtacctgttttcttatgtgattgggctaaaagtgatagtgcagtaaaaaatgataatttaggctttacattagttaatctaaatcgattagggcacaaaactgatcgatttgttctagcatcacaagccacacaagttttttatgtgccggatcctgcaaacgaccaatggtctgtcgtgcttgcaacgcaatcaagagactggtatgatgaagatgataatctacctcttgaagaacaacatgtcccgatcactttaccagaaaatgatgatcaacttgatgatgatagcatatgttattgtgaagatggtgaaggtttatgggttgattcgtaggtttatgtaatatcgaaaatatttggacaattagtttctttatctcatttcttcttgttattctcaatcaatatgtaatatttgtttgcttttgtaacaatttagtatttttgaattattggtgattatggcaaacttattttgtatggttgcctatattattctgttccatgttattctcaattaatatgttgttttgcattcacttatgatgttattatacagatgtcatcttatgatcctttggatgaaaattcaagtgaagatgagaatatacaggaaattgaagatgagaatatagaggaaagtgaagatgagaatatagatatagatgaacatgaggaccatggtagcataccaactggtagaggaccatcatggttgccaaacattaatagatgtagaagtgagggacatctaataccagttgagtataatgaaagaggtcaattggttgggacgggtagggtgagctttgcatctatgcttggatctactgttcgtagaattgtatcaattcttcatgagaattggtttaaggtcccaaaagaagataagacacaaatatgggaaataatgaaggtacattcacttcttcattgtttctttttccaatattgataatatttttctatatgtgtttgacaatttcttaatttgcagagtacgtttaaattacaaccccaacataaaaagcaattct

SEQ ID NO: 57369 - DNA, 1428 bp, Cannabis sativa
ttttaattatatacgtaatgttcaaattaattacaaaaacagatgtaataatttaaatagtgcacacaatacatacctaatgacgctatctaccgaaaagttgaaaataattatctccctatgtgttcagtttttagtttatcatgaccacttttctcctgctatgaatctttttagttttcattttttttaattattatttttatctttttctctctattctttattatttcaaaaaaatttcctgatcacagcgttaatcatttcagtttgaaaatagtattactgtgacttattttttaaaatcatcattttaatatattagaagcatatattttttggttgttacaaaaaaaaaaacgtaatcatagtcaaaagtaatctcttaatttcttttataatttattaatgaaaaaggaactaattgatatcataaaattataattaatgaaattaattgataaagaaataactaatttataattaatgaaactaattgatatcataaagttaaaaattatataattaactatattataaattttttaggtaacttgcattgttgcttaagatattttttagattacttttttcttaataacatttaaattactttcaaaaatttatttaagaatcaaaattagtagcattatcttcaccgatgaagctagattgttgtaataaaaaagctacattttagtttctttcatattttatttagagataaaacaactaaattttaaattaaacaaaatttacgtattcactgacttttggttactttttcgatttgttatttttaaaattatagctctaatataatgttaaagtatgtacttttattgtttaagatatattttcgttactttttatttattttaagtaacgctatgttgtcttgttggttataatacttttaggttacatttatttgttgtaataaacttataaaatattttttataatcttgtaaaatggattggtatatgaaattttgtttgattttttttttttttgataaatcaaatcaaatatagtatttatccaattactaataaattttatttgagttgaaagtttattatttttatagtaaagaaattaaaaaattatgaagcaaacaattagtaacttttaaaaatattaaataacaatttttttttaataacaaatgaaattagttggtaaattttgttttgtttaaagttaaaataaatgaaactaaaatgttacttttaatttcaattatatttttcagcaaataaaaatatgcttcttatatattaaaaaaatcgcattaaatagtaggactaggtgataatggtgtaacttttatgatcaaacgattatcagtgatagttaaaaatgatttttaaactaaatgtaaaataataggaaattacttcatatactatttttaactttttt

SEQ ID NO: 57370 - DNA, 1100 bp, Cannabis sativa
tgtgatcattctacacattttgtaactccataatatatgttacaatttgacaaaattaatactttgtcacacttaattatttatacactgctacaaattaagctcttagtgacactatatagtgacacgcataaaagtgtgggtcactaaaaacttaagagtaagttttagtgacacacactataagactataaatatttggtacttatcactcgaaatgtgggtcactaaaaatatggagtgtcactaaatattaaaagccaaaatttataattttataaaaataaaaaaaacatggccaatagagacgtgccacacgtgtgagcaaatctatttaccaacacgttatgcgtgtcactaaaaccacgtgtaaatcacgtggctttagcgacacgcataacgcgttggcaaacaaatttgctcacacgcatagcgtgtcaccatacatccgtttattttaaaaaaagataattaataaccagccctaattaatacacatatatcatataccttcatcgtcccactatcatccacacactccagaccgccttaaaatatattttatagtaaattaatctaaaaaaataggcggtattttcagtagtcactctttacctactgttattgcttccctagttcgggatgatttaagttaacaaagtttagattttattcaaaaaaaaaaataggcggtattattttggaaaaactcgcggtattattccaaagcccgctcaaatttaataaaaaacatttcatttttttttcaagtttacacgaagggttttctagcaaaagaaatttaaacaaggtttctctcttcttctatcatctaagacacttcgcttgccccaataaccccttcattctaagattatcgtcgacgacgacacttaacgaccctccaccatcctctgctgctgctcaagcttcgcaaaagactcagtccaacactcttcgtctttggtaagtgttcctcctttgtccttgtactacctttcttctcttctacattttctcctatgtttatacattgttgggtttcatttttcttctcatgatttaaacatctcattttgtttggactatatgtgtgtatt

SEQ ID NO: 57371 - DNA, 1717 bp, Cannabis sativa
gagatttagcaaggaatcaaggagtttcagtctaaggtaaaaccctatagctatagcctttgtgctgtttaagttttaagtttggttggttatgcaattttgagatatagtggctgtttaggttaggttttactctaggttgttttaagttagaattaattgtttgttgttgattttgctggtttgtttgtggaatggctaagtttgagcttgtgagctcatacttggctcattcatggtagaattggattcatgggttgtatgtttcttttatcgattggaatatgttgtttgaggttattataggtgttttggaaagtttggacacattttgatcaagaattggattattttgggttacctggtgcaaacaagttaaccggtttgacaggtagtgtaaaactggctaaccggttctgggacaagtttcttgaacaagccatttcgtcaattcgtgttatttttagagccttagttggttaattcctttttaatgagggtaatatttaattggttacctatagcagaacccttagttgggggtttgggtttctcagattagggttttgacgtgttgtttactcgtttacgtaaatgtgactagagcatccatccagcatgaggctttttgttcaagtcggccaactcacttgaattcagaatcaaggtaataatagcatagaacatattatatatgcaaatgtaagtatgtgtgatatatatatatatatgcatgcttgttgtgattcgtacactaccaacactagttcggtagcggtacttagtacattggtatagtgtacgatgtctaaggaatacattatggtgttaccaacactattatgggtaggtacagagtgcatgtggtacaacacttagcggtactcggggtacggttcataccctaccaatactagtacagtggcagtactgagtgcatgtgctacaattgtacagtggtcgtatcttagttaagaacgttcttaatcatctgataagccttgcgcataggtgtgtgggtgcctagatgcaagttagcaatatattatctattatatgcttttcttaatgaatctattggctcacagtttcttctttcatgtgtaggttgagaaaaggcaaaagctaaactagagtgagttctgattttgaatgatgattgttcatgtcgagacaacatagcctggagtgttcggtctcgggacatcttggattttattttgtagttgttgagcgaccagtttataaatgtattttgataatgtttgtaaaagtttaaagtatggaatcttggtctatgtaaataaatatatatataagttaataaaatttagagtttatgaaagttttaatttagcacaatttttaaggaaaacccctttcattagcaatggtggtatgtaattggaaaatcacaataacacgcctaagtatcaacgcgttacatttttagtatcagagccgccaaaattgtctaccgaagatcgtcaagacatgtacaatcatcatcagagaaaagctcgactcaagttcagtaagcctttgcttgtttagtaatgtatgtaattagaaaagcatgttacagagcataatagtttataattatttatttgaatgcattgccctaaactgataagttcggtagtaagattacaacttaaatcgttgcctgactaggctgacttatgaatcgacaggtttgtcctgtagaatggac

SEQ ID NO: 57372 - DNA, 1714 bp, Cannabis sativa
tactttcaattggttatattgaaactaatgctcttagctaaaatatttttttgatagatataaccaaaatgtgtatgaaggaaataaatagtgttggaagaaataagactatataattatgtatatattatgactttttatataaatgtgttgtacatggtgtgtaatgtagttgattgtgatgaatctatctaaatggatgaaaatgacaaatatgactttgtattaacaaagtttcctaggtacatcaagtacatacttataatgtcagttcatagaatagatacctattaatgtaacagttacaaaaagttagagctttagtgttggttataaattgacactattgagttttgatgtcgttttacgaccgacacataaaatgtacatatatgcttttccttttaatgtcagttcaaaactaacactattgggcattatcgtcggtttaaaaccatttcttaaggatgttgaggaagaaatttggatacaggtttttaagccacactcacttgctagattggtgggaatgaattataagttaagtatatattagagagacacaacgaatttatagtagttcaatccatgtatcgaacagtaatggagctatgtctacttcaagttttatttctcaggagatggattacaaaaaaaaaaaaacaaatctaatttctagagagagaaactagagagagatgttttgaccttatggctatttgtttgaacttaaaaaaatgagcttgtggaactctccttttataggtgaataatgtctaattaaatagggataaaatattccaaaaaatttatataaaaaaaaaataaatttaggcttttttttttaccataaatgatgatctaacggtaaaaattgactttggagattgattgtcaatttttggagtttgagtcgcgctggcaggacccactcagggtaagttgcaacttaaatttgtaactcccttggggtgaaattttaagtcgataaattcagaattgttattgatgtgtgagacatgactttagagcattaatagctttgaaatacaagttgaatcgggtcgatcaaatcaatattgagtgagttatgaccattttattgaaggttattctgggcctagtacccatgttgacatcctggtgcccaagttgacatctagcacccaggtttacatgtgatgttaacctagacattgggtgagtgggaaaacatgtctgctgtattttttgatacctaggtgacattgtgacatcacttagtcaatttctgtgttctaacgaagctggtcaccaatacttagagatgttgttattttgcaaaaactagagactcaaaactacccagttttcgagtaaatcaccttgttagaaaagtgaaaatatgaagttctgaatttgactcttcagaattcatgactctcaattatgatgaaaatatagaccaacggtcgagacagaattagaatcggataagtagaagtatcccacctggccatttgtcaaaccgagtgctgggtgcttattttggagcttctgggatgtcattttaatacttccaaggttatgaaacttgaggatgaggtagccaaccctattttttttttttgaccattttggagataattcccagagcaaaattggattctgagtgataaaaactagcaaaaaattggtatttttatcaagctttttaataatttttataattttt

SEQ ID NO: 57373 - DNA, 2302 bp, Cannabis sativa
tccctttatcaacaggtttctttttttttttcttctcttcttgtactttctttttggctccactggtgttgctgctggtttacatctgagcataccaatctatttgagtagttcaataacatacttacattgagagactgaaatcccatgttttgttcttgcaaactacatgtctagaaagtatcttatttgaccaaaatcttttacctcaaattcttttgcaagaaatcctttcatctcctccattccattaaggtcattttcagttagaatcatatcatcaacatagataataagaattacaatcttaccatcttgtgagtgcttgaagaatacaatatgatctgactggaatcccctgtttgagagactgaaatcccttgtttcgttcttgcaaacttcatgtctagaaagtctcttatctgacgaagatcttttacctcaaattctttcgcaagaaacccttttaactcctctattcaattaaggttatttccaattagacattagaatcatatcatcaacatagataataagaattacaaccttgtgcttgaagaatggagcatgatttgaatggccttgtttgtacccatcatttttaatcacttgagtaaacctctcaaacaaagcttgtggtgattgcttcaagccataaagagatatcatcaagtgacacacgttttcttttccaaattttactttgaagccaagaggaaccttcatatagacctcatcatctacaatttcatttagaaatgcattcttgatatcatgttgctgcaatggctaatcaagattagcagctactaataggagaattcttactgtggttagttttgccactggtgcaaacgtctctgggaagtccacttcgtaagtttgagtgaacctatagcaaccagcctcaccttgtatctttctatagtttcatcaactttgtatttgactgtaaatacccacttgcatcccaccacatgcttgatttttggctgtgcaactatttttcaggttgtattttctccaatggaccaagttcttcttcaactactttcttctacttgggaatggacaaggctttatcaatattctttggaatattgaatttctcaattttcgcagcaaagactctaaatttgggtgtgagtttgctatagcatacatacttagatataggatgtaaagtacaatttctcactccctttctttttgcaatgggaaaacctgattctaccactcatgaattaggattagaatcaaatgaaactgggctcaaagaatcacttacattgggatttgtcattggttcagattcttgggaggcatgatctgtagctggtggtattacttgatgtttgttctatcatctagtgtaaatcaacaattctatttttgcatttatttgctctgtcttttccattttaggagtgttttgttctaaattttgcacataattaggcttaatgggtagattagactcaataggtggagactcaaggaatgagcagattagaatcaagtcttaccatgggcaaacaagtatcccaacaatgagtatcactattatgctctccctgaagtgaagtgttgggataaaaaggttgttcttcatcgaatgtgacattagatgagacactaaggtgacccgtgagtggattgtagcattagttcccaaggaaaatacaatttttgagaatggggattaagtttggtatgattagggcctaaaacatgaacatagactgtgcaaacaaatgttttaaagagaagatttgagagtagatgagtatgagggtaaatcttaagaagagaagaaatcagagtttgaaattgcaagactcgagaaggcattctattgattaagtaagctgctgtcaaaatagcttctccccaaaaagtcttaggaactgaagtagtaaacatgagagccctatgaacttctaatagatgtcgattttttctttcagcaatcccattttgttgggggtactaacacatgaagtttgatggacaatgccattggaagtaagataatcacctaagattgaattgaaatattctgtaccattgttagtgtgaagaacttggagattggcatgaaattgattagtaattatggaatgaaattttttgaaagtggtagacatcagatttctttttcagaagataaacccaagctagttgagtatgatcatctataaatgatatgaaccaacgagtgttagggatatttgtaatgcgggatgacccccacatatcactttcaatgagagtgaaaggatgagatgctttatatgagcaa

SEQ ID NO: 57374 - DNA, 1091 bp, Cannabis sativa
  modified_base (263)..(267): a, c, t, g, unknown or other
  modified_base (391)..(393): a, c, t, g, unknown or other
aaggtgtggactatgagaatactattagttcagtcgccatgctcaaattcattagaattatactctccatagcttctgcttccgactatgaagttttgcaaatggatttcaagacagcttttcttaacagaatgcttgaagagaccatctatatggagcaaccagaaagttataagcttccaaggcaggaagaaaatgtttgcaaactcaataggtccatttatggacttaagtaagattcttgttcttggaacaaaaggttnnnnnaaataatcaaaacctacggctttcaccaaaatgatgatgaaccttgtgtttaccaacttagggataatcaagtggtagtattcctggtcatttatgttgatgacattttgattattggcaacannntcaagaaaatgactgacattaaggaatggcttaacactcaattcgaaatctaatatttgggtgatgctacttatgttcttggtattcaaatcatcaaaaactgaaagaacagatcacttgctttctctcaagcaacttacattgataaggtgctagagagattctcaatgacaaacacaaaaggggcagtgatgccttctagacctggtatccgtctatctaaggaatagtgtcccactgatccttaagagatagaggacatgagaatggttccttatgcttcagcagttggaagtctaatgtatgcaatgttatccactagaccaaaaatttgttatgcggtaggaattgtgaacaggtattagacaaacccaggagaggaacattggactggagttaagcatattctaaaatattaaaagagaacaaggccttatgtgttagactacaagggtggtgctttaaatctcgtaggctataccgacttagatttccaggcttgtcttgatgacaggaagtctacatctaggatggtatttactcttaggagtggagcagttatttagagaagtgctaagcaagccgcaacatcagactcaacagtggagggcgaatacatagctatcgatgaggctcctaaagaactagtctggcttagaaagttcttctcaatacttggtgtagttcttggaatggaa

SEQ ID NO: 57375 - DNA, 1236 bp, Cannabis sativa
  modified_base (1029)..(1029): a, c, t, g, unknown or other
atagagttgtaaatttcttggtctctttattcatcttattgttattcttctattgatatctcatattttcctaacactaataatcgctctcgcagagaacacaggactggacagaagggactcgacttgaaccagcctacgtagagggaacaagtcgcacagaactctaaccgcgaagtgccgcaagaggaggatcccgagcgatgcaaccctcgaagcagggcccaaccgcgtaaaagttgttctcctagtgtctataccaggtcttgctttgtggagacgccgcgaggagtgagataccaagttcacaggggtgatctttgtgatcaccttaacacagttttcaaggcacggtctgaaacgccccgaaaccgcgatgagcccgtgatccccaattgggtgatcaaggcacaaacaatggcaataacccaacaaatgttgtaaatctgcctaactcaccagctgcaaccactgaggtagtgatcccagctaacatagctgcgattgccaccgcacctgcgacaactgaaactgtcgtaccagggggtgttgatcagagcatcctgctacgagcattaaaaataattgagcagcagagacaacccatttacaagctctatgggacttctcctttcactgcagaagtgcaacaaactcgacttcctaagggattcaggcaatctgaatcgctaaaatataaaggtactactaatcccatagattacttaaaaaaatttaatacaattatggaagtagaccaggtacctcaattagcgaaatgtcgcatcctagcggcaaccttggaggagaaggctcacaattagttaagccagttgcctgaggcatccatatcgacttgggagacttttgtggatttattcttgacgcactcccaagccacaatgacgtataaatcgccttacacaatcctggctaacatcaagcaggaagtcggtgagtccttacaggattattttaagaattttaatactgaagtaaccaaggtcgagaaggcccccgagttttcgntagtttgtatgttgattacaggtgtcttgccaagaaccgatttctgaaaagagttgtaggctcgaagactagaatcgttggtacaattcttctccatggctgagcagcataagagaatcgagaattctctagctgaactagaatgggtgaaggagaagcgcgagtcacccgtaccacggtcatgatctcgcagtccacgagggaaga

SEQ ID NO: 57376 - DNA, 2229 bp, Cannabis sativa
  modified_base (1438)..(1459): a, c, t, g, unknown or other
catcttatcccaaattctaacatccaaatctataaaaagaaaaattaaagaaaattgatgatacaaaatatcatttataaattgtgttggtatgtgggattggattagaatttcttaaagaattgattgaattatacttaataacactttttatgcattgaaaaaaaatgaaaaattgtataaatataagatgtgtttatttagttatttaattaatttttatttttttaattaaaaaatatatttttgtaattttttttaaataagaaccaaaattttgaaaacaaaaatatagtttatccaataattctcaatttttctcatccctaacttaaatataaaagtttatcaaatacatttttattttttttcaaaaatcaaaaatcaaaaaatatatatttttaacttatatgtattgatgcggttttttgtcaactaatctaaaaatatcgtgaataaataacgattaaacttaaactatttgattgtcacaaacaaaccaatttaaataagaaataatattagacacatgatttttatagtagttcacccccttgatgtggcagtaatagaatattttacttgttgttttattgattaatgctcaaacacattaatgttatattttcaagagtgtgtttgagggattacaatgagcgagatctttaatggagatctctttaatgtctttgtgaaaaatcatcgacaaacactttgtttagcaggacaagaatttctaggataatatgaggaagcacttctctctgtgactgtcacaaaatatgtatgacttcaaggtgaaaagattgctcttttggatgatgatgagagagtagattaaaggtcaaggtcccttttggtgataaaggactaagatggtgtttggttggaggtaatggaatggaaagaaaacaattttcatttcattcctttgtttggttgcatttaaaaccattggaatatcattccgatggaatcgtctttccaccattttggtagaacgactatttcattttaaaatggaaaaaaaaaaaaaaaaaaacattccaatgtaagatttgaaaaaatttcataattttttttattatttttttatgcattttaaattttattctattccattcctattctaattctcattcttattcatattcctatatttttatttctcccaactaaacgtcacctaggagtatttctaggaatgcttatatgagaggaagagagagtcgccaggtcttaggtgattaaggaccacgtatttcacgttatgaacttaaggtgatgatttggccgtcagagctgaggcaatcccagtcccttctctaaatctaaaaattatgtgtatatagacgtagggtttgtaattgagaaatgctaaaaggcaccagtagttccttgcacccttctatgcgtcaatatcgctattggtccaacnnnnnnnnnnnnnnnnnnnnnnttaatataatagcttttaaggagtatcgttaaccaatcgtaacgcgacatgtcgaaaaggtgctaggcaccactggtgcctaataacaatgctctttgttattcgttcccccacaattcgagagaatgatacatttattgtgcccttttacatttaataataataaataattacataaaaagtaaatatcttctctattttcggaggtagctaagttttgaaagtcttctagaagcttcatcttcgagagataagtcgagaatgtacaaaaggggtttctctcttagaaataaccattgtgggtgagcactttttgtgataaatctaacatgcaagtatatttatcgtttacaagtaacagactcacaagagtgaggtcatcacacaactgtagttaattaccaaacaattaaatttctaattctatttggtgacaataaaaattgagaaaagaagtttaaaaaatattaaaaaaacaaaaataaattaagctgaaacttaacaatgattaaagcttaaggtgattaatttcgattgcatctactttatatggtttaatataatttaattctcaaattctaattttcatgtgatagcggatttactaaagaaacttatattcacactaggacatataaatcttaacttacatgcaattttttactctcatgataaatttaaacacatatgaggcattaagcataaaatttctgaatgctacataaaccatataggtactctcgtcctatatcaaaatctatgtctatttc

SEQ ID NO: 57377 - DNA, 716 bp, Cannabis sativa
cttcctttagggcattgagacaaaatttgctccctccttcctttaacgataggggtatcacctagtctacgatcttgcttgccagactgtttgagtactttatcgatatagctcttttgtgataatccaagaataccccgagaatggtctcagtgtatttgaattcctagaataaaagagacatcaccaagatctttcatctcaaaatgcttatatagaaatctcttagtttcatgcaataagcatatatcattaatgacaagcaatatgtcaccgacatatagaaccaaaaatatgcacttactcccactaaacttatgatacacacaatcatcaacaacattcatctcaaaaccaaatgagagaatcacttgatgaaatttgtggtaccattgacgtgaagcttgcttgagtccattgataggtttttttaatttgcaaactatattcttgggtcaccacacacaaagtttttttggttgctccatataaattgtcttatcaatgttgccattgaaaaacactattttaacatccatctggtataagtcaagatcaaagtgagcaacaagtgccattattttcctaaaagaatctttcgatgaaccggagagaaagtctctttataatcaatgccttatttctaagtatagccttttgctacaagacgtgccttaaacctcaccacattaccattttcatccctcttggtttta

SEQ ID NO: 57378 - DNA, 920 bp, Cannabis sativa
aacatcatccctgtaaatttttgaaaattttcgaatagtttacactgtcgaaaatacgtttgaagttttttgaacgcgtgtggtaaactagaatactaggaactctgttttcgctattgtaaattcagaatttttcaaaaatttacaatactgtaactataatgaataccgctatgaaaaaaaatattttggcatgtgatttcggacgcggaggttgactaaggttgtaataagaggttgtaagtaacactcctcttgactagaacctttttctatatcaacaataaaactagtaacctttccaagctagcattattcgaccatttggatgaaaaaaaagagatttttagtaaaacacttggggaacatattgaggtacaaatcccctaattcagaggatttaacttttgtttcaaggagaccaattaccccacatttttaggttagaagaacctcttcacttcttattttttttttcgagtgggcattaatctcccagacattccaagtaaggatcctatccatgtgggataagaggaaccccccttccatccttagtaactcctagatcacacaaaacctttccaacttggattttccctccagatagctcctttagaacctgaaacgaatccttaataggagtcgaagcatgttattcctcctcaaatttcctcttagccttagtatctacctttgagctaatattttcaacttgtttagtaggcttagcaacccacttaatcgtatcccactacaaaaatcttacttttagtcacaacaaaatttgtgactaataaaataagaaagttgtgattaattataaattatcatttcctacattgtgactaaaaagttcgtggctaaaagtattagtcacaaaagttataatttgttgtgactaaatgcgtttttagtca

SEQ ID NO: 57379 - DNA, 2705 bp, Cannabis sativa
  modified_base (36)..(45): a, c, t, g, unknown or other
aacattaaatgatatttctgatctatattaataagnnnnnnnnnntatattgaaatgagttttattaagggcataaaacccaacagagaactcattaaagtcagtttcccattttatatttaataaaatacctattttagaggatttccatatgtaattatcacagtttaaaaaagttatttgtttcctatttcgcgacttgacaacttttaagaaactattttctattgtaattatgcgttataaatagtggagccattccattatttagggaggggaaatcatactttcaagagatctattacgccgctcaaatatctataaaagctttcgagagagatcaagttgttctttcttctcttctcacaagtgaaatacaactaaatgaggagtatgctattaccaaataaatgtgcctgaacctctataaaatctcatgttctcaatttatgctttatagacatattctcattgaatctaattaattctagatctctttcaagactcagtattattgaccaaaagtgaggtcaacattttgcacttttattgagagctaaactcaagaatgcaattggattgatctcgttcaatttaaatcataaatggttgtaacaactcaaaggaatcatgctactaattctacggatcccatggtgatttatccaaatgttcaaaatcctacaaatacgagaaatcctcatgaaaatgatctaaacaacaactgtcctagaattggcgttactccaggcactcaaaatactggaactaccagtacccatggtgttggagagacaacctcgggtattggggggccaccagttgcgaacctcgggtgactatagatgatgatactgagttgcataatttaagagaagtagtatctcacatttagaatcatactaatacccttcatcatggtgaagcagatactcgagcaaccatgaatgaatcattcacactgaaaaagaggcttctctaggagtggatggatagataggctgaaagtgtaagggctcaataggaggcaattattaatcggtcacgcaaaaccacaaagttgataagataatttaatcaaaaaactggacaacagctacaagaaagtattcccctcattagagatcccaatagaggaaaagagacatatatcccacctggaaatagacatgggccaaaagttccttcaatgagttacacccaatacacccagcaagctggaccgtcaaatcctaggacacaaaatacaaacgtgggccccacggtagacatccatgtattgctagggcgtcacattaggaaaaatagtcaaaaattttgcccccatgtggaaacacccaaccagcctaatgaaaagttttgagagcctatagctatttatgatcgaaatgggcaagtttagtatttccagtatgtcccatacacagcccaacaacaagattagactacaatcgctcgtagtcaatcattcttaagtaacaatgaagatcgggcagatggtgtgacttgtgctgaaagacggcaagattgaggtacccagagggagatgccaccaaccaatgctgatgctacaagaagacccccaggttagtcaatctttgaaagaattgaaactcaactaggtgatctcaaaaacactttgaatcaacagagagagcaaagagatagagtaattcctcgctacatgtagccaattgatttggacaattatgtgttggttgaagttagaaggggacaataggtgacatagactgggcaacaaataggtcaagttgatccaagggtgcaagctcaaatagatcatcttaagagcatagtacaaagcttgattattccaaaaatcattgacctagaacttgaccgaggacaagtctcaccattcactgcttgaataaatgcacttcccctgccacacaagttcaaaatgccaacttggaaggtgtatactagtaaagaagaccctttatcccatataaagaactttgaaatgcaaatgaacttacaattggtgcacaaagatgtgtgttgtagaatttttccagctactttagcagaagctacctaacaatgctatttcaagttctcaccaggtaagtttgactcatgggataccttcacatcaaaattccatgcataattttgtcttctaggcaactccatgttctcttggaagacttgatcagagttaaacaactgtcaaatgaacccctcagagattatattggctgatttatgacacaggtaataagggtgaaggggtcgaccgaggaaggaaggctaacaaccatacttggaggaattttaccaatgggggatttatgaaagatatcaagaggttgatattgggatccatggaaatttttttggaccgagctaacagattcataaagctagaagtggaaatttgaatagctactcaaagaatagacgtttccagttagaaaaaaatggccaaattcctaatacggccactggtatgtcaatgacgcaaaccccaaaccaagctggaaacagccagagtggaaaaaacttgaatggcatgaacaatcaaggaaatggtaaaaaaggaaagtttaataacaatcccatacactaacatccttgtgagaagaccccaaagttcacagctttcactgttctcacagaagaaatagaaaccatccttacggtaataaagtcgatagtgtcgtacaaaagacctccac

SEQ ID NO: 57380 - DNA, 2020 bp, Cannabis sativa
atgaagaccaaagatagcaaccccactctaattttcaaatcagtagttatagctgcatccactttcactgtaataccgttaacgttagttaaagtagagatatcaatacttagcactgggatgagctacgtggtcgacacttgagaagtcttttgaacttgaaaactttggagaaggtcaattgccctgccctctgtaaaactgtacactcatgttatgtatgcaattgtttctcctaagccaaactatccaacaaatcacagtgcgtaaaaagctccacttccctaaaagaaagagagctaacgagctcgagaataatttcataaaaactaataacttgaggtaagccgtaaggtaaatgcaaataagattaaccccaaacacctctaagcattttgcattggattaattcatgagtcgttgattcaaactgagcaccgcaaacatgacataaaccatctagatccattcaacttttagtaggttgactttggttgagatccaatctagagaagcttgctaaaggaagagttttaccttgtgaggaatattaagctttcacaaaactttctaccactcagaatctccttaagacgtagacacttcaccaattgaacaaactctaatttcttcccaatagccactctttactgaagacctccctaattgatcatgagatcacacccttttatcttctagctgaaatatcgaacaaggaatggcgaggatgcttctagcttcttcaacactaaagttagaaaggataagagatatattcgtactattatcctcattctttaacattctaacattggcatctaaaggcaaattctttggtaaaatggttgttgtcgcttggcttggatgaagccatatatctttgaagatcttaattttttttccatttccaatgaaccagtgagaacagagctagcactttcctccataataaacttctctaaatgaaagacattttagagggagctccagcttccaagatagtcgaatttgggaagtaaaaaccttttaggaatttaagagctaataagtttgggtaatgaatgaacctccaaacttgcttaaccaacattgctttattgaaaacacttaggtctcaaaagcccaagccaccattatttttatgccaacaaattctaccccatttacactagtggattctcttcttatttcccttctcctcccactagaatctagccatcataccatgaagatcttttatagatacgaaatttgaagagattcatttagtaagatggaatagtttgtaccactgccttgatcaaagtttctttacctccttaaaaaaagaattatgttttccaatggaagaggttttgccaaactttatctctgacatgttggaagagagtcttcttggtccttcccatgaaatatgacaacccagatgtttctcatggcaggagactctcaaaatttgaagtatgctatctatctcccttatcaagtcctcggtattcccatggcttatatagaaagttgacttagcaaaattaaccacttgacttgaagctttagcataaatatatagtgtcatccaaaatgttgtccacctgacgtggcatgtccacgtaaatcaagatagattagaagtggaatacagccttgccaatagcaagacaaagtctccttacaaggtatggcaaaactatcaagtagcaagggaaaggggttaagtgagctgtcgaggagctataccaccatgtctggtcggtcaaggggagtctataggccgaccatgatgagtttatatggctggccaaggtttaagcacaagctagccagccaaaaagttatttttagaccaaggaaggatccgtttgaccaagaagcctgatctctggaaggcaaaggtgtacaaaggcgggcctccacctttaaaggttggcttctacctccgaggactggcctccatctatagaggcttgccaccactaaggttggccatcaccaaggcgagccatctcctactaaggctggc

SEQ ID NO: 57381 - DNA, 1409 bp, Cannabis sativa
gtatttttataattatcaaactttttaaaatataaaattgaaaaacaatttttttaaaaatgtttaaataacttaaagacaaaaatgtaaaaaaaaactggtaaaatgagacaccaagtgtaaaaatccccgatattaaaggatatgtctatggtaagcaccttagttttgtccgtatggtaggcatattcttatagccatagatatttaatctaatggtaataaattgatgagtgtatataaatggtcaatatgtagaatgtactagattattcataaaattatttttttaataatatttttaaattaaataataatgatttaaataaattactaatttattcttatctcctccatttaattattttttttttctttctctttctctttctttcattcaaaaacccaaactttcaaaaatacaatatttctttcccattcttccgcttgggaaccatatttattcatctacatttttacatatttttttttggttgtctacaaatatttcattaattaattaattaagatgttgtaattggtaagtactaatgatataaatcaaagttttttacttgttaaaatttatggtatctcagttccatttcatttttttttttatttttttattttgggacaagatgggttttcactaattaattgtttcaacaaaataaataatgattgtctgaattgttttgagaaatgaaaataatttaaatgaaaaaaatatatgtttagaagaagatttgtaataaaatttttaaaaaaaaattagaaaatttacatgaaataatactttaaaacacgcggaaggttattatttaatttaaataattatttttttgaatgataaagttaattttgattgattgttaatttttttttttttttttaatttggtgtcttttttttttaaaaaattaaaaaatttaataagctactaacaaatacatgttacacaatgttgacttttaaaagtcatacacatgaatggttaagaaagtgtaagtatagtattgagacaaaaacatagtcagtaaaattgttccgatattaaatagtttttatggcacctggatactttagagctcctttatttttcttttttaaagacaaaatatatagtggaaattaattaagaggcccttgaggaacgatatggagctgattacacacaggcgggcccatgaatgagcatgggtatgattcacgtgggtagggtacctgctcacgcacaagctctttccctataagctttactttagtggagattactttttctttttctgtttaaagagagcacaacattcactttaaaaaagaaaaaggaaacaagataaaacaccattcaaaatatattttattcacattttttccaacacaatattattcactttttttttttt

SEQ ID NO: 57382 - DNA, 1184 bp, Cannabis sativa
ttaacttggaatttacttgataaaattttttattctgctcctaatttgccttggttaatcatgggggattttaacagtttattatcttatgctgataaaattggtagtacttactataatcataaggacatggatgatttttccaattttttagctaagtttaatctttttcctctttcttgtgtgggtaacaaatttacttggcgtaatcgatctgtttgtgaaaggcttgattgggctgttgtttcagattcttggtgtactctttttccgaatgctgttttgcatcacctttccttttatgggtctgatcatcgagttttaaagctttttcttgatgatcaaaatcttagctcttcttgtagaaggagcagacgcttcttttttgagaacgtttggcttgaaaaccctgaatttttttctgttattaaaacttcgtgggacaatggtaatgttagccagaataattctggtccttttcaggactttctttccaaacaagatctttgcattgctgccctcaaatcttggaacaaagtagctaacttatctttgaagtctcgtatttctgatctccagaatgaaatttccagatctcagggcctttccacttataatcgggatgaccatctccgtattcagtgtcttcaatcacagttagatgctcttctctataaagaagaaatttattggagacaaagggctcgtactcattggcttaaagctggtgacaaaaacactaggttttttcaccgttttgcctctcaaagaaaaaagaataatactattaaattccttaaggatgactctaattgcgttgtttctgatcacgatggtattagtaatatggtggtttcttattttcttgatctgttctgtgctgagaggtgtgatgctgatgctacctgtcagattttggattgtcttggccctcctctagaagatgttgattatgcttatctggatgaacctttttctgttgtagaggttaggaaggccctttttagtctctctggggataaagctcctggacttgatggtcttaatgcctatttttatcagaaaaattggtccactttggggtctgatttagtccaggctgttctttcttgtctcaatgagggtgcagattttactcacattaattccactctcattgccttaattcccaaaaagcagcatgc

SEQ ID NO: 57383 - DNA, 928 bp, Cannabis sativa
  modified_base (630)..(646): a, c, t, g, unknown or other
ctatgctcagatggtggagaagtcactgcgagctgagggcgtagttgagtgcacccaggagtcccgagggactcaggttgctggtgtagcccgtactcctcctacctctggtcatggtaggggtggtagtgacttgaccaccgaccagaaacaaaaggcaccatttgcacctggtggctcaagtcagagtaagaggttctgagggaactggggtcaaggtaatcgtcagggtggttctgaaactcgatatacttacctgaaatgtcccacttgtaagaagcatcatctgggtgagtgtagagggtgaggatgtttcctgtgtgggttgtgaggacactataaaagagattgcccatagcttaagaaagaggaacaaaagacaactgcaaaactcgctccagcaggggtgtttgctttaactcaagttgatgcagaatctagcccctcagttgttacaggtcagctctcagtcaacaactcttacttctctgtattgtttgactctgggactctggggccactcactcttatgtggcagccaaaatttttaataaattggatagaccgcatgatagttatgacaaaggatttggaaccctattgcctggtggagaattagttatctccaannnnnnnnnnnnnnnnntgccgatcagaattgaggatagggagttgagttctgacttgatagaaatgggtttagcagatttcgatattatacttggaatggatttcttatctaagtactcggctagtactgactgtaaacggaagatggtgatcttccaacccaagggcgaagaaccatttgtatttgtgggatcgattcaaggatcccagattccagtgatctcagtataaacagctagaaatttgttacaagacagatgtataagatttctgacagtggcattggataccacacggc

SEQ ID NO: 57384 - DNA, 830 bp, Cannabis sativa
aggtactcaatgagtttgttcacggcaaaattgatgtcaggtcgtgtgattgtcaagtaaaggagtttccctatgagactcctatattgtgttgggttgggaagaagttcccttgaatcactactgagtttggtattgggttccaggttttgagccaaggtaacctgaatcctataagagttgtatagtgaagggtctctgtgagactgatactcctttagaacaacgagctatctcgagtccaaggaaaaaacgaagggggccaaggtcttttaatttgaatcttgtatcgagtgtggtgatgaacttttgtagttcagttgtgttgttggtggcaacaacaatgtcatcaacgtatatgagtaaagccatgaagtgcctgattgatttttgatgaacagagagtgatcatttggggattgagtgaaattttgttgtatcagtgcagaactcaatgtagcatgccattgacgtgaggattgcttgagaccataaatgcttttctgcagtttgcagacaacattgtgtggtatggggttttttggtttgtaaccttggggaagtttcatgtaaacttcttcgttcaagtccccatgcagaaatgcattatttatatccatgtgatgtaggttccagtcatgggtggcagctagagcaaagatgagttttagagtattgaatttagccactggggcataggtgtcgaaatagtcgataccaggtaattgagtgtaacttttggcgactaaacgtgctttgcaacgttggatagagccatcggggttgagtttctttttgtacacccatctattgccaatcacatgttggtt

SEQ ID NO: 57385 - DNA, 1527 bp, Cannabis sativa
caaaggcttgtaggtggagatgttatggtgtggaggcatagaagaagattccttgtccaggagagctttttaagtactgtagaattcttgtagctgccgaagatgaggttcccttggattttgtagatattgccttagtttgttgatagagaatgagatgtctggtcttgtgattgtgaggtagatgagtttcccaatcaaagtcctatattatgtgggattggtaagaagtttgcatgtttcattgttgagtttgttgttgggctccataggagtggagactggtttgatgcctacacaaccagtttcttttagtaaatgaagtgtgaatggtctctgtgaaacaaagattcctttactacatctggaaatttcaagacctaaaaagaaatgtaaggggccaaggtcattgagtttgaagtgagaatcaagagtataggtgaaatgttgtagttcatcaagactattggtggcaactactatgtcatctacatagattaataaggcaaggaagatgcctgattttgttatgatgaataaactatgatcattttttgattgtttgaaattatattgtaacaagatattgttgagtttggcataccattgtttggaagcctgtttgaggccatatagactcttttgtagttttcatactgcattttaggaatgtttccttttggggtgtacccttggggtaatttcatgtatacatcttcatgcagttcaccatgaaggaaggaattatcgatatccatgtgatggagatgctaatttttgattaaagcaagtgcaaataatagttttagggtgttgaatttggccataggggcataagtttcaaagtaatctattccttgttgttgtgtgtagcctttggctacaagtcgagctttgtatcattcaacagagccattagcttctaatgctgatgacatgttgtcctagaggtagaggaactacaatccaggtatcattagcttctaatgcatcaatttcagtatccatggcttggttccagactttatctttacaagcttaagtatattatgtgctaatggactatattgttatgtagtatgtttgctttgttgtgttacaattgaattttgacaaattagtacggtatagtcataatcgggtattttagctcaaatcgagtttgagtccaatatattgaatgtatgagattatgataatgatatgggatatatgtgtataattggaattgtatgtgagtggaatgacttttatgcccttgtatgcttattatgttgatttttagtccctaggggcaaaatggtcatttgatcaaaatttaataaaatgagatatgtttgtatttctaaaaattaaaaatcaaaatatcatttttctgatttgaacaaacccccaccgaacccctctccctccttacaaaattttgaaatcttgatcttggaggaagaaattgaagttaacttgttagatttttggtgtttgagcttgaggaagcatttgaggtagtgaattgttcattattacttt

SEQ ID NO: 57386 - DNA, 840 bp, Cannabis sativa
agaacaattttaaaattgtattagattcgctattagacacagtaatatttagcacctctagacatgtcgtcttggctagcgatatttcttataaattattatattaattataagagacccgatacttaattagactaataacaatatttacatataggagaatactaggcatcattagtatcttttagcatttatcatataataaatataagtttttgaaataatataaacattgattaaattaatgtagttgaatttgtatcttttgttttcaacctcgaagcaaagaaaaacaaaaaaaaaaatatttttctttatttttttttccctactaggattaaaaaaaaaaagaaaaaaaaattgggatttgatcaaataaatcatgctgcctatatagtttattgattattcaataaaatgggatttgatcaaataaatcatgctgctctatatagttctttttatcaaatagatcacactgccctcagagtctcttaaatattttgaagacttagttctaatttaaaaaattagacccttaacaaaaaaaaaaatacaatttattaataaacttttatatattatcatactggttgtatatcttgtacaaaacactaagggtcagtttggcacaactgtgttgtgagaaaaagcagctgtagttgtgctgtgagaaaaaacagctgtagcagaactgtagaaaaaagctgagctgagtgttttgtaattataatttttcaagtgctgcgagtcgttaaaattctattataataatgataatgttttaatctagttcattataatcacaaatatatatatatataaaaatatgttatataa

SEQ ID NO: 57387 - DNA, 1103 bp, Cannabis sativa
tatgtgcaagatcacttcaacatgaactaagagccaaagttttgaatgtagcagaacgtcctccaaagtctcaatgctacagaagtcaactgatcacctttagagaattagacttttatcatgtaagctaccctcacaacgatcctttagttttatacgttcaattagctaatatgatggtggtagggtaatgatcgacgatagagcatcatcaaacatcctattcaagcaagccctactcaaaatgggtttagcattagaagacaagaaactatacgaacagctcatgtatggtttcaacggagttgacattcctctatgtggcaagatcaagctaccacttactgtcggcactactccaatgcagaccaccatcacggtcgcgttcatagtggtggacatgaagtgtctgtacaacgtgatgctcaaaaggcttggcctctatgaccttcgagccatctccttagtataccacttgttcgtcaagttcccaatggcggctggtatcaattgtctctttggcaattaaggaactgactgcgagtgctataatgcatcatttatcacttgccaagaagacctcctctgctgctatggcttcagaggggacgaacaagacctcccttgctgctatggcaccagggggacgtgcaaggcctctcttgaaaaagccgaaaagatgacaaagacctctggaaataaaattatgaagaagacggagacggcagctaaagtcacttgaaggtgcgcctaagacggggatgacattgacccctattttggggaaatcgactcgggagttggtccaaccaaggaacttagagaacttcccctcaatacatcagactcaaccaagattgtcaagattggaacaaacctgatggaggtcttgagtgagatgctaatggcttgcctcaggagaaatcaagacaactttgcttggtcgcatgaggacatgattgggattgacccccaagtcatctgtcatgccctcaacatagacaaagttagcttcaagaatgtacaataaaaatgtaggctccttgacaaaaagcattccaattcaaagctcttagggaaaggattgaaagactacgagagaa

SEQ ID NO: 57388 - DNA, 1129 bp, Cannabis sativa
  modified_base (1100)..(1103): a, c, t, g, unknown or other
caaaggatcctattttgtgactaagcaagaaaaaatgaagttaggaaagtcatgaaggtcaacattttgttctttgaggtaatcataagtaaactatatatgattaaatttcgagctacattattatacaattatatgatgaaacaattacactttcatttttggttatttaatacatttcctaaaaagcaatgtgacagccataaagtcaatgatttatcttatcatgaatttaaagtactttctcaaagtacttattaaatacattttaaaaaaaaagtactcattaagtataatatataatgtttttagcaagaggagtacttgttgtcctattatgtttcaagatttatattaggtcaaattaacaaatagttcacattttttttacatcttaattactaaaagattggtttctctgcatattgtttaatttaaaattgattaacacaattgatttaatattttattatttgtggacattggttcaaggggagtttcttaattaaaatattttaatattttattattattttttagaagaaaatatttttcgagtgaatcacttggtccttcctataagttaattatatttaaataattttaattaagaataatagctatagcctataggtaacttcatgtacaaaaataaactagtaaactagtatgccatttttgttttacaaaaatataacacgtttataaatttgtaaacttgtctacagttttatatttgtaattttgacactgcatttttttgtccaaattgtaagtttttttttttttttgcaagttttcatatttttgtagccttttttatatgtatatttttataaatttcctaataaatctgggaagctggtatatatttatgggataattatataaaatactattttttttgtaatttttttacatttttaggtttaaagattttcttttttacattttttatagtgttctataaacgaaaacaacataaataacataaaaataaaatctaaacaacaacaaaaagtaacaaataataaaaaatcaacaacaaattaacaagaatacaacataaaaatacattaaaagaccgtattttttgtaannnnaatcataaaaattgtaaaaatattta

SEQ ID NO: 57389 - DNA, 1668 bp, Cannabis sativa
tcagcctatattgcattgctgatggcacatcgattactacaaattatgccatcaacgttcttgttgtgggattttctctgactgtcaagggcagtcaaatgcaatccaagggtgtaatgccttgtttgaagaagccatatattagttgagtgcaaggtgctaggtttgttagttggagccccatcttttcagaggttgatttgaaaaggatgttagaagaggctccattatccaccatgcacctaacaaccaacatattccttgtttgtgtagtaatgaccaaagggtcattgtgaagaaaccttaacttggtagcatctccccccaaaggagatggcaggctcttcaagtctgagttactcggactctctttcttaaatggctaggatgtcgcttttaggcttgcaacggagagtctgagcacagccctccctagtctttcttgtatctcgtgctatgtgggatctgtctattatgacacctaagtgacctgccactggttgtggcatagggtctccgttctgggcaggttgtgcctgagcttggtagttttccatgtaacgatgcaagtgagaattgtttttccttatgaggaatttaatctccctcttcaagtgttgacactcattggtaccatggccaaaatcattgtgaaattggcagaacatagacatgttcctcttgctcatcttctttttgatatgaggaggcttcttgtatgggacattggcctgagtggccatgtaaatggtctcaagttttttggttaggagagtgaagcatgtgtacttctcctccttgtctttttggttttgtggcgaaggggaagtattgtacttcaattttttgccactattccggctagaacttttgttgttgtgcttgcctcaagcattcttgttattggagggctggctttcactacttgtactagcctagatgtttggctggtcttggggctgcgcagcactgtgagactgcctaccattaacttgccctcctatcttggcttgtctgacaacttcctctaactttatgaagtcatctactcgttccaggaactcctttatattggcagttgaactcctgatatctttccagaagttagtcaatggaaggatgcctcctagtatggtcgtataacgatcttcttttgttaggcctttgaatttcgtagcctcaaccataaacctttgaatgtaatccttcaaaggtttgccttgtctttgctttacctcaataaggtcttccaactgtgatggtatctacctcgaggatgagaattacgtgtagaattcttgggaaaattcattccaagaattgaatcttcttggagccagcttgaaataccattgctaggcttaatctgacaaagtcaccgaaaaaatctgaccctgcacatcactagtatttttctggagatctatttgcatctcgaagtgcttaatctgtgcaagaggatcttctcttctcgtatacaccttccataccagcatcttgaacatgggcaagggtaaggtgtttatatatgccaagaatggagacccccttgacctatctagttcaaggtctgatggtttttggctggcgatgccctatatcatatctcttattttatctaattgtgcttacagaaaaagatctaatgttgtaggaacttggccgaat

SEQ ID NO: 57390 - DNA, 2196 bp, Cannabis sativa
  modified_base (1174)..(1176): a, c, t, g, unknown or other
  modified_base (1957)..(1964): a, c, t, g, unknown or other
gtgaccactagtaaataagtacacctatttgattaggccatctctaatagaacacttaaacaccaaatatagtatagtttcacactatatttactcactaaacctattctcataaatggctttatctacactctacagtgtcccgctaaatttagtgggacactgtagaccacactattttttttaaaattttttttttaatcattaaataataatttaaagaagaaaaagtaaataattatatatattgagtattaaaatattattattatattaataaaataataaagaatataaaatttggtgtaatttttagtgttgtggttggaattggaaaaaaatagtgttgaaatagtagctttttggtgctgatttgacactaaatttgagtttttccattggagatgcccttagagaaatgcttaaaggcaaaagtagtacctaacactctcctatgtgtcaatatcgctattggtccaactaagtatcaggtcccatataatttaatataatagcttttagggagtatcactagctaatcgcaacgtaacatatcgagaaggtactaggcattactggtgcctaatagcaatgctcatttgattaataacttaattatttaattttccaaacccctcaaatatttaattaacaagtacactatttaataccttaattaacaactacatgaactgatattttgttcaacaacaagatttgtgacttaaaaataaagaaatttcaactaaattatttcctatatatgacatcccactaaaatttataggttaaaattattagttataaaaattataatttattacaattaaatatatatttttttaaaattgatattagtaatagtttgtatatataaattgaggaattattttctatatattatttttaatttttttttaatttacagtttgggttactccagcagttttcatgtaggttgttatgtaaattttgattataatttaaattgctccattagttgatatagtttgtttttgtaaaaatgtaaaaaaaactattttaaagtgtaaaaatgaaaaaaaaacttcattttaccattgttttgacaaaaaaaaaaagaaaggaaaacattatatataatagccttgatatttttctttacaagcacatgtcaaaataataataataatannnataataataataataatgaaattaattgatttgggcaataataacactttggctttggggccatgctagcttaacacaaaccacacatatatttaaagtacgtacacaatcaaatcacctaattattacaattaaattatttcattttccaaaccccatatatatatatacccctgtataaaatattggcattgcatatcctcatcatatcataaatattataatttcatctataacatatatattttctctttttgattatatatatatataatgagtgtgttagtgatgaatattatgatgatgattttatcattatcattatcattatcaatagagaccgttggatcatcatcatcatcatcagttgattgttttttcatatttggagattcattggctgataatggaaataataacaatcttctcactttggctaaagtcaattatcaaccttatgggattgactttcataattccccaactggaagattcaccaatggaaaaaatactgttgatattattggtaattaattcttcttaattcttcttcttattattattattttcttaatttcttcaataatatatatatatatatatatgtatatatgcaggtgagcttctgggttttgatgagtacattccatcttttgcttcatcactacttaatgaaagctctaatttaatgagtggggtcaattatgcttctggggcatctggaattctctcaatttctggcaaacatatggtaattatttatacatatatatatatttannnnnnnntatatatatatatacatacatatcatatttatggttatggtccctttggtttttcaggcattaatgtcacatatattcagataattagttatggtattgtgtaattagggttgatcctgatactaattacgctttaggtagcaataaaattattgaattatttttaaaaattattaaacaaatatggtgacgtttagtaacacttttgttttctaattttttaatcataaaa

SEQ ID NO: 57391 - DNA, 862 bp, Cannabis sativa
acatggaacaataagcagaaaccagaggaacgaatcttttcaaagattgatagagcaatggtgaatacgcagtggttgaatgtctttccttgctctgaagccgtttttttgcctgaaatgacttttcatcatagtcctatcttggtatctatttatgaagataagaactatgggaaaaaaccatttaggtactacaatatgtggaagatggctcctgagtatgacaaactggttgctaaggcttgggaagaggagagtagtggcacaaaaatgtttcgaattatccataagttgaggagtttaaaagcagtattgaagcagctcaacagaacagatttttctgatattcataaggcagaaacagcagcaagaatacagttagcagagattcaaggtgatttgaaccagaaccaggggaatgagaatttgatgatgcaagaacagcgtgccagggaagagtatgcaacaatcagcaaggcttatgctagtttcatgactcaaaaagctaaactaaattgggctaagtttggagatgacaactctcacctttttcatgcttctctaaaattgaggagaatccaaaataagattttctcaattgaagatgagcatggggactggtgtgattctcctgacaaagtccaaaatgcttttcttgagtattaccaaaggcttttaggatcaacaataacaggcagaaggaaggtttatcagtccattgtggaccttggtctgaaaataaatgattgtcacagggaaattttattagcagagtacacgactaaagaagtggaatcagctatgttttctattgacaaggacccgttgttggcttcgttagcgtgatttccagccatgatga

SEQ ID NO: 57392 - DNA, 1013 bp, Cannabis sativa
  modified_base (326)..(326): a, c, t, g, unknown or other
  modified_base (948)..(963): a, c, t, g, unknown or other
acatgataaacataaaatataattagtgttgacatacacaagataaagtaaatatgaagctcaattcataaatacaatttatattgaaaatttcttaaagagaaaaatttattaaaaatataataaacataccaagattttgcatcaataataaaacacaaacacatacaaacatgataaacataaaatataattggtgttggcatacacaagataaagtaaatatgaagctcaattcataaatgctattcataatgaaaatttctttaagagaaaactttatcaaaattctcaaaatatcataatgaattgtctgcataaatatnaaatagggaataaaattccaaactaataattgaaactaaattgttcataaaataaaaacaattaattaaaaaattaaagaagatttcgagcctcatcttcacttggacaatctccacccttctgtccaacaacccgactcaaatcgctaggataacaatccaagtttaagcagctggagctaaaataagaagaaaataatcatggtattagatccagaattaataacccaatggaatattaattctctaaaacacatgagtttataacaaaaatagaaataccttgtttctttgccaaaaacttaggacatgggtttctagtggcccttttcgttgcaatagaagcactttccttttgttttgcgttaggattagcagcctttttcttattagctgtattaacaactttaagtggcttcttgctattcttccacttcatcttttggggtttcgaagaagaggcaatctttgtttcagccttagccgtatcattagcagtgccagaactaggagctttagttcctcctttctgtggtcctccaatcaaattttcaaatgtctcaaggttgttatttaactcgaggaagtaaaaagtcaacttgttcatgacataatttgatgnnnnnnnnnnnnnnnntagagtcaaactattcaagatcaaactcacttgagttgtctgatctataa

SEQ ID NO: 57393 - DNA, 875 bp, Cannabis sativa
  modified_base (53)..(75): a, c, t, g, unknown or other
aatgtatttttatttttcaaaaactaaagttttaaaaacaaaaattttacttnnnnnnnnnnnnnnnnnnnnnnnaaaataaaagtattaccaaacggcaccttatttaaatggtctttttttgttttgtagtaaaaatagggtagtatgtattttttttattgaaaaatttattgactaaaattaaaatatatatataaataggttaatactaaaaaaattatttttacttttttgaattttttatttataaaaatatcttctcagtaaaaataatatattatttttttttgctactttataatttatttataattgtattatagttattatgatgtttttttaattgtttattattttataatttatttatgattgctatgaagttgatttttttttattgagtaaaatttatttttgtaattaaaaatttgaaattgtaaaattataaataaaacataacaaaatttctgagttttttttgttcaaatagtagtaggcagtttgtattggaaagctaggtaaaatagtattaagtaaccaatgactttttttttatattttaaataaaagtttacgattttactatcaaatagaattttttataaaaatactgtcattttataaaacaactaacaattaaaataatagtggaacaactaaaaaacaaccgtaaaacaattgtgaaaacttaacacagtacataatataaaatttacccagtaaatacagtatttaaaaaaaaaaaaatcctctttataataaaaaagtaaaaattaaaaatttcaatggtgtaaaaaataatttttttttggttgtatgggaggaaaaacaaatctaaataattcacatggattaagggtagacataatgct

SEQ ID NO: 57394 - DNA, 1484 bp, Cannabis sativa
atcaggcggaacatggaggtttacgtcgatgatatgttagtaaagtcaataagaagtaggaatcataccatagacctcgcagaatgcttcaaaatattaaagaagtataacatgaagttaaacccgaaaaaatgctcctttagagtgtcctcaaggaaatttttgggattcatagtcaatgcaaggggtatcgaagcaaaccctgaaaaaatcaaggcattgatagacatgccatcaccaacaaagcctaaggaagtacaagccttgacaggaaggatggctgcactcaactggttcattttgaagtcaactgataagtgtttgccattattcaatgtattgcgaggcaacaagaaatttgagtggtcagaagagtgtgaaatggcctttcagaacataaaaaggcatctgggaatgcctctagttttggcaaaaccaataactggagaaacattgcttctctatttggctatctcagaagatgcaattagtgcagctaaagcgcgagaatagggtaagcaccataaacctatttactatttaagtaaaaggttactagtggcagattcttgatatccccctctcaaaaaactcacattgtgcctagtccacgcgtctcacaagctccgactgtactttcaggcacaccccataaaggtgttaatcgatcgatcaaccgttgattttattcaaaaaaaacaaaccaccagatgcttctagaagattgataaaatggtcaattaaactggggcagtttgacataacataccaccctcgaacatccatccaaagccgagctttggcagacttcttaatagaaggcataactccagaagaaattctgtttgttcaccgagacgtggacacttggaagttatacgtggatggtgcatccaacgaacaaggctcgggtgcaggggtaatattaatctcaccagaaggctttaagtttcattatactttgggatttcaatttgcgcatcaaacaacgaggctgagtatgaagccttgattgctggcttaaagatagccgaggcattgaaggtcaaaaatctcatctgccatagtgattcgcaactgattgtaaaccaggttctcggggaataccaggccaagggcctaaaaatggaaaagtatttggagaaggtttggaagaacttagaaagattcgattactttaaaatcgagcaaattccatgagaacaaaactctaacaccgatgccttggaaaaattggcctcacagaatgacttggatgaattgaacttggttccagtggagatgctaagcgagccaagtatatgtgaaaaggaagacgtagatagacagctctcctacatggatgacccctataatcaactatttactcaacagaaaacttccaactgacaaaaatgaggctaaaaactcttatactcagtgccttggtaaacaataattgaaggcaaaccatacagaataggtatttgatgcctctactttgc

SEQ ID NO: 57395 - DNA, 785 bp, Cannabis sativa
aactagaggcagcggaggaaagggaggcatgtggggtcattagcctccaattttttatttatataaatttttaggtattttatatttagaccttgtaaaaatatttttttttttcattattgtccttacatatttttatatttatcctcataaaatttatgtttttcacttttattcttacatatatttatttttatttttataaaatttgtatttttataaaatttgtatttttcaataaaaattatatttttgattaatgctttaaaaaaaaaaaaaaaaaaatcgcccctacaaaaatgttggcctgcctctgccactgcctataacaagtactgattaataatattactaattcattttttactctggcatattttcttacttgatataatttttaagttttttgagtttgatacacacaggcgttgctcttgtacaataaaactgagtcaatcgcttagtaaagtttgctagtttaaaaattacttttcaaacacactcgagtgttttgaaatgcattaattaattataaaatataattgcatatacatgcaaattatataaatgcagaaatttatacttaaaagataattcaacaaagtgagatgtgttcccgtatagaataggataattgtctcaaaatgcaaataaatatatctaacttattacaacgtaaattattgtctcttggagaatactgtcccacatggattaaatgtaaaagtattgagctatatatagggatgttcacaaagtatccgatccaatccaattcgcacgat

SEQ ID NO: 57396 - DNA, 1064 bp, Cannabis sativa
aatttggatcacacacaattgacacgtattaggttttatatattgcttttattgttccttttactttaccaatattatgctttatgtctgaacagccttcgaaggacacaaagaaaaattagggcaaaagtatatcaaagatgaggggttaaacaaggagaatcgactctgattttgagcagattcctaaagaaaattatgcagaaataaagcaatacacaagtgcagagattagggtgagagagatagcaaacacagagagttttacaaggttcaccccctgaaattggggctacgtccttggtgagctgcctcagagaaagatcagccacaatccactatcaagatcgatgattacatcaagtttctgagctccaagacacatgtatcgtctggtagctctcagttcttcaaaccaggtatgtacaatctctctctcaaactttttctttctttttcttctctcaggatcgaacagatcctctcacttctctcttcctctctaactctactcttttctttctgtttacacacgagagaaactctctctgtctaggtctgaagttttcatcttattttctctggagttctgagaagtattttgaagctgtaagtgtcttttattttgttcttctatttatatatgttgtagctgagaaaggttagttagaaaataactaacaactgtcttgatgtgggattgcatacggataggttagttaggattttaactaactgttttgactttaataactgttacaggttgacttatatggggaattaatccaacactgatatttgtagtagtggtataatataatatttataattaaggaaaaaataattaagcgtgacaaaataatgtgtttgtctaatagtaacatacaatatgatgttataatattgtaatacaatcataaaaaagaatttacaatttctcgagcaatgatgatcgtaaaattgtgtaattcttctatctacattatcactcttaaattagtaaaagatattattagttgtttatgagtgaataaatgatagctattgataatgtagctgttgta

SEQ ID NO: 57397 - DNA, 857 bp, Cannabis sativa
ttaataatagcagttttttctcaaaaaaaaaaaaaaaaaaaaaaaaaattgatggaaatgagtttgtgtttgtaaaaaaaaatgacgcaaaatcctggcggttaaaattgacacaaaatttgaagtgtataattgcgtcccttttggaaattaactgatgcaaaaagaccattttagagtaacgagatacggcctcagtttctgaaaggtactgcaattatttttatttatttatctttttttcattatagctgtatacaagtagcatagaatagttattcatataaatcatacattcaagttaatgaatgtatctcttttttaaacgcagtctagtgaaactaaatcacaaaactgaatatattttttagttcctacccatcatagtggagactctccctaatcagcttgtcaaaattattataagaatcacctttaatatcagtagtttcaaacgctttcttcttccaatacaaactcttttcctttattttctttcccttctctccttccatcatctccttcacaagcattgagacttcatctcttttgacatcaggactaatttccacccctatacccaatgtgttacaagcaaaatggcagttggtttgttgatcagcaaagaaaggccaacaaatcacaggaacaccagcataaatagtttctatagtagagttccaaccacaatgagttaagaaaaccccaactgaagaatgttccaaaactttcttttgtgagcaccaatttaccaataaccctctgcccttaatctcctcgaaaaattcttcagacaaaactttagccgaattagaacccattacaacatcaggcctaactatccacacaaacgagtg

SEQ ID NO: 57398 - DNA, 1118 bp, Cannabis sativa
tacttcaaaagagatgatccttttatttcaaaagaaaagatgatatttatttaggcctctttggtttggattttgaataagttagaataagctttttttttttgtaaacttttaaagatattcttacatgaactacctaaaatcataattatttatttatttttatttttagggatatatctttatatataaaatatatgtaaacgtaccctgacactcatttaatgtactctgacactcatttaatgtaccctgacatccatctaatgtaccacggaatacattctgtaaaagtacatcgcaggacaaaatcatatccctatatatatatatagtcatgtaacgttatttttagtttaatagattttgttagcttaatatgttttttatgttaaagttaaggatgttacaagtaaataaataaataataactatcaaaccaaaacttttcttttgttgaaaaaagaaattgaaacctctcttttgtcgctctttagtcttcatccaatttaataaatatatatgttgtaattttaatgaaattttatcagtcttcgaatgagaagaaagtgtatgtgagtgtattgagtcccacataggataagatcttaaattatctatacttttgtgttataagattctaaatcaacacttgagtcgtctattgagtccagactctaagattatattccatctccctttgccaatgtcttttaagcctcttaaaaaccttaatgtttgacattaaaagaaccactttgtgttcttcctcctctcctcttttcagtgtgtcactatattaaccctgaagagtcttataaacttaagcttgttgtgcaaagcatttcttttctgagtacatttcttatatgaattcataaatttagaaagaaaaagtaagtgatatgttgaaatatatatgcagtgacatgacacgttgagtatgaatttagggtctaaaataaagtgatagaatagtgagggacatgttaattaactgtgaaaaccaatcttaaaacacttttcttcaaacaatacaacaaaaccacagaaagaacaagaaataaagtcttgatattgatacctcaattctcatagatgatataacaaataaataa

SEQ ID NO: 57399 - DNA, 1280 bp, Cannabis sativa
aaaatatttaaaataaaaaaaaattagtttttaacaaataaatcaatatctatatccaggggcggagccaggattgaattgtaggggggccaatagcacaagcacgtgtacggtgataagatttaatatataatgattttaatggccgacattcttactggatggtactaactatttatgagtgatctaatataattcacttagattaatttaaaattttatttaatatttttaagcagtaaagtaaaatacattaatcaaataatccaataattaataagactcataagagattaattatcaacatgtattgactagaaaatattttatatcatttcaatatctaaaataaatgattaaattgatggtagagtatatttaaagataatcagtggttaacaatgtgaatagtgttaaacaaagaaataaaaaaaataaaactatatgaaatggttgaaagatgataatatataggtaaattaataataagaaacacctaatttatatatgtattttttttataactattttatttatttagtatgatagactcataattatatttattttctttttttatgaatatacaataatatagaataagtctatgactatagtacgctttttttatggagtgtttcagtaaattttctatctgttttggtatacaaaagaacttttcaatataatttttttttcataattatgtacgttatagttatttaagatcacttgtaatttttcataaatttctgagtagcttacaatgccgaaaataaaatttacatgcacaactgttttttcttatacgtgtggtatgtaactatttaaaccttattttcgacaaataaactattcgaaattttttaaaaacttacaagtggtcttatatattacaccgtacgcaatcataaaaataattgaactaaaatatttttttaattgtcgaaacagataaaaaaatcaaccagaacaatccttaaggtctcctacaaaaatttcatataatatttattataaaaattgattagcattaacattaactcacattttgtaaaaaaaaaaccttatttttatttttagtatttattttaaaataatatatatttcacagatacatctcattagttatccacgtatttacttgattattaagtagatataaattttggatttgacttttcaactcacttcatcttcattatatacatatacatatatataatatttttttaaatacattacagaaaccaatagccattacctatcatatatatata

SEQ ID NO: 57400 - DNA, 935 bp, Cannabis sativa
atatattgcttttactataaaaggataaaataaaagtttgttgctggaaattaatttaatttaatctaatttgtttgtttgtggtatacttgtttactacttgcccaaacttgtaataacttaattggtaaggaaacgaccttagttaataattatacttatataatatacttcatcatcatatttcaatttagatcgagttgttatatgtaccggaaccatctcaaatattaatataattaatatgtatatatataggctgcttttacaatgcaccactaaaacagattcatcgatgcacttttgttttttggtatgcagaaaatttttttagttaatatttttaaataggtatttatgttgtagttatttaagatatttaaaaaaaattagtatacaaaaataggattcaaacaatttatttcacgcgtgattctttcattttatatgcgtatgaaatagacagattgaaccttgttttcaatgtgttaattaaatttttcagaatttcttaaaattttacagaatgtgatatagttataacatagaccataaaaaaaatttgactatatttttttttttttgaatgttgaaacgaataggggtgcatcaatgcacatttttaaaaggatttatggtagaatttttcataaatatatttgaaaaaaaagtagtttatggcataaatacctaaatttaatttttggcggtaagaatacttaagttatatttctagaacttcgtaggtacctcgccgttaaatgtcaaattattatccacgtgtcattttattattggtatatttaaactaatttttcttttaaaaaaacgtggactaatccatcattgccacgtgacaatttacttaatacttaacagtcaaatacttataaaagttttcactacaagaaatatcacttttaccagcacagttc

SEQ ID NO: 57401 - DNA, 1325 bp, Cannabis sativa
  modified_base (148)..(148): a, c, t, g, unknown or other
  modified_base (290)..(295): a, c, t, g, unknown or other
tatgacaatattatatcattatacctatcaaaaatttataaataatattatatatatttaaataacttagatatttttgtaaaaacttgaaaaatgcttaatatgagatttttcgacatatagtttagaaaattattatttatttatnattttattcttaaaataataagtacctaaccatatctattttaaatttggtttattgattattttaatttcattaaattataagatcagttggaaaatatctaattggctatttcacatcatttatcttattagatatttannnnnntttgataaaataattcaaataaaaacctagatattttaaaattagtttgaatttgaaatttttaaaagatattttaggttgttttaacaaccctaaattttcaaaattagttggttatttaaatgataatttaattagataattaataaatatcttaacttcacatattattacatgcattgtttgtttaattaattgtttattcaatttttttaacacatctattatttatttgatttaaattgctatgatgaacttgttgatagatccaatgatttgattttaatcatagttcaattgctaattgattaaataaataatttataacaggtaaattttgtaatttctttcatctgtgataaacctagtaacatgatagggtccatccaaatcagtttgtatgtttgagcctatatgtttgtaattggacttagatgcatgtaagaagcctatttattttttgatatataaatagattacgttgccaagaataaaatatcacattgatatttttatttaggcccaattagtattgagcttattcaattaataataattatttaatgaaaggttaaattcctctcttttgggccttgtgtgagagtttgggggccaatagtggatacgacatactgaatccaaccccgcctcacatgaactaccccaactgtgaaagctcatttgcctcatttaaataattatattatgctaattttattagtttaacttaatgaaaattgattaacaacataattaattttgaaataaataaaattattttttcattggattattttaaaattaatttagaaaaatacatttagtttaaagaaaagattctagatagtaatttctagtaactaatttatattttctaatatctaattaagtagaaaaatatgtttaagttaaaaaataattctaaataattttataccaacttaaattagaatatttttctcataatttaaattagaaattaataattaagttgattttagtcaagatacttaattatttattttaattt

SEQ ID NO: 57402 - DNA, 779 bp, Cannabis sativa
accatctacatcgtcttcactaccagatgagtatggtattgccccatttgcatctattcccagcacttcagagcctcgggaatcagtatcctctgccatgatggcaagttggtgattgtggagagggaacaacttgctctaaagcaaggtcgggctactcttttgaaaggatagagtgagattatgggtcatttgacgaccataatgagactcctgcaagatcctggaaggccgacgccagatgcggagccacagccacaaccacaacaagagcctcagtcaccaaaaatatgaaatcattctcccaaatgattatagaccagatgatgatgatatgttttgtacacctgacaacacgaagatcgtcaacatcagggatactcaagattctgaaatacaggtctttgagatagctctagaactagtggagaaccggagacagagaaagcagcctaggtggttcgatgagtacactgaaatgaagaagaagtctaggacatcgaaggaacatgtgaatgtggacccacttagagtcgttgatcgaaagttgctctcaacttttcacagttgggttctcagccaaattgggaacaagtacctgagggagtgttactccagtagacatgattcgacttggttcctccaactacatactctaaggacatggcttggagacgatgtaagtttttaagactttttacgttttttgtttttaaagactttctataaccttttttatttaatctctgacatattttattttcatgttttagcattta

SEQ ID NO: 57403 - DNA, 1150 bp, Cannabis sativa
caataaataattatataatttaatatattatcatagtctaaatgtattttttttttaataaagtcattaattcaagaaaaactaatttaaattattgtgtggagtttatttttatgtattttcaatagacattaaaaggtaaaaattaaataatcaatttaaacttcttaaaagaaaaagctaagctagattagagcaaaaaggaagagccattagttttaaaagactatctataagtttatcaaattaaataaaattagttaaaaaaattgaaaaataaatatgatgacagaaataatgattctatctaaaaaaaaatgtaattaataaatatattaaattatattataccaaaaaatataaatgttatataaaaaaaatgagtaagtacaagttaaatgtataataatattacgacaaccaaaacataggtaaaaactaaaaacaaaataaaaagaaattatcaattaatgttattaaagattaaaaaaatcaaacaattcaaatgaaaactaatgacatttttcaatcacattaatattattaattaagaaaattacccataataaaatattaatatcattgatattaataattaatactataaaagatagttgactaaaaacaaattaaaaacaaaatattaaataaatatatataatagtttcatacataaaatgaaattaaataatattattattaaaacaaaataaaaacaaaaaaaaaaatagttaaaacttttaaataaatagctatcttttttcttgaatagaaaactttaaaaaaaaatacccaaactctttctcaatcttcgacggcaacgattgggaaaaattgaattatatataaagatattaaatacatataataatattataaaattattaaataatattatgttaaataattgggatattctgttaaccttagccaaaaaactgttatttttgaacaaaaaatcttttaaaaaaaatcaccgaataatttctcataaatcaagaattctgttatatagccacattttatatagaatagaatatcatgtcacctctcatacttctccttattatctattctaattattagattttgccacgtaaaggatcagaatccatgtagttagttgaatctaaatataattaatccacct

SEQ ID NO: 57404 - DNA, 2051 bp, Cannabis sativa
  modified_base (307)..(310): a, c, t, g, unknown or other
  modified_base (1652)..(1654): a, c, t, g, unknown or other
cttttaaatcaaaaaagctcttctcatattttatcaaacatatctaaaagtagctttgagacttcaaaagctcttctaaagccatgccaaacatgcccaaagtctgcttgatcgagcaaggcagggacagatgaaccgagcaaagagtgatacgagtcgtgcattaagacttaactacttcaggtttgatatcgtgaagctcaagcacataagcaatccgtacaatcatgggatcatattaaaggaatatggcaggctgtcccaatctcccatttgatgtattctaaatatgtaatgtatgttcttnnnnattatagatattgtaagcaaaagaaaaaccttccctcatgcatgcagtcctataaatagtgatctatcctcactgtaaaaggaagaattgctttagagagatctaagagaaaatactcaaagatttcattgtgagagctttgagaaaggaaacactgtattctttgttctcaagtcaatacaatctaagggaagtaggctattaccgaactaaaggggccgaacttttttaaaatcttgtgttctttattgcttacctatttttgctctgtcttaattatgtttcttatcgcttattaattgattaagtgtcgttggctgaaagcaaggtcaacattttggtgctttcattgagagcaaaaatccaagtttgctctttgccttaagttttagcagacacacagaatggtggtgcaaactcctagaggcgtggttgaccatatggacccactactgacagatcctgccttacaaactcctggaaatgcaagggtcccactaggaaccaatcttgagcagccaaacacgcagccacctactatgggccaaggtgtgacatcccctctggctgggatcacaccaggtgtgcatgagactgggaataccagtttgatagctgatcagagcactcccagcactggaatctcatccacaaccaatgcttagacgacaataggagatgatactgagatttagaacctttgcaatgcccttggactcatgcatggtcatactaataccttgcatcatgatcaggaagagctccgtactgcaatgaaccttgccttcgaagagcagaggcgtcagttcattgagtggagggatagggagatggaaacattgaaggctcaacaggcagccatcgatgaccgaacaaagacaggccaccatatactctgatacagaaagcctatcaagttgctaattagcaaccaactgctacgtccaatatcccactgggcggcacagaagaaattcttactgggcataccgcctaaactcataatggttagccgtccaatccctggtcacaggttccacctgtgggccaagtggtaggcgaccagaccctatccgacaattctttaggtggagttatacctaataactatccaaactgacagaattggccaataaaccggccaaaccaatcaatcattaaggcaacctagtgtttcagtattcaacaaattggctacaacccatgatctcaggaatgatttgaatagaaggagaggtttggacgaacaatacgtccaattggccactcagtcgggtatctgcatctaggatctagctctaagagatcctgacatgacacaggtcggccaagaggctgaacnnnttcacccatctgtgcaagcacagttagatgaactaaaaaatatgttccaaggcctggccggccaaaaactcactgatctcgagctggaccgagcacgcgaatcatccttcactcccaagatcaacgtcttggagctaccccttaagttcaaaatgttgacctggaagatgtacacatggaaggaggatcccttgtcacatcttaaatattttaaaatgcaaatggatttgtaaggggttcgaggtgatgtgcgatgtaaagtattccctgccaccctttcaaaggccgcatagtagtggtattttaagttaccaccaggttggtttaattcatggaaaaccttctcctcagaattccatgcgcagttctttttttctcgccaactcccattacattt

SEQ ID NO: 57405 - DNA, 1128 bp, Cannabis sativa
tggcgtcgagttcttgaatgtaactctcttgtacctgaaagaattttgacaatgctttatttttgtcaagatgtttggaaggatcttgaccatttaaggagttgttcaggtcactacacaaagccacattgtccaaattaaggtcaaggaacatatgtgttttattcacctccccaaacccaaatcagttttacttatccccgtagccatattcttacaggtattgggcccatttttgaaataatgcaaagactctccattaaaaatacacccacgacccaccatgtattatttactgtgggcattacaactctggcccaaagcatgtgatgggatcccacagtcaaatgactgcttaagaccacagcccaaagaccccaatttattataatcctggctcaaaacatccatggattcgactacattgtcagttgattttaaaaaaattaaagtcttggaccagcgtctctttatctcctccaacccggcccataggcaaatcacaactcaaatcacagccctccatatttttctcattaacaccccggcccacaatatttgtcttattagcaccccaacccacattaacaccccagcccaatgacacaaaagtgttaaaaccatagtcaaccatgtgtcagattcacaaatatcacatgtcatattttttttaccaaggtcaaagttgttgagtcctttcccaaacacacaaccgtccttggcctagttacaaagtaaattcaaatcacccctgcctttggaaaaagctcagtcctctttccattgtgttgcttcaccaaagaagagtcattaccataagtagcaccctttgacttcctattactatcacacacattataaatatgcaaatcacacctaaaataggtaaaaagagcagaccacttttctgtattcagagtttgttttgacacattcatgccagtaacaaccatctccaccactccactactccacatggcatagtccttgagttctttggaagtcacactctgccaaggctaaaatgagaccgagatgtccctttcgacccaactctgaagacaaaaactgagcacaattttcaactgcaacctcgcaagccgttgcctggattctgttcaccgtcac

SEQ ID NO: 57406 - DNA, 929 bp, Cannabis sativa
ttaaaatttttctcaatcttacatgaatcatcattcgagctaaatacctcaaaatgcaatcaaacaaataaactgaataaaaattattttcatttcattacctccaacgaaacgaacgttaccgagtaacaaaactaacaaaatggccgataacacatggaaaccaaaacaaaattcttacctcatacaagttattctttcagtatgaccattgagcatgacagtcgaaccttttgtaagaaaaggggtgttaatgtttgtgatccttagccatggaccctaataattaacaccaagcaaaaagccaaagattaaaactttaaaaccttttgtaagagtacactaaatcttgaagcaacaaccaaaacagtataagtcaatacatgagcaaaggtaatggtgttattgtcaatgatgagatgatcaacaggtttcgaggctgtgaaagtgtcgaaaccaattggatcactaaactcgaactgattaaccgacttgtgtcgagccagatatgcatctcgagctcctagtttttgagaaacagcagctgggatttctctgtgccaatgttccctacacgaaaaaaaaaaaaaaacccatttgagaagaagaaaagaaaaatgttacaaatttattaaacagagaagagaatgaaaagagagaatttgaacctgtacaaacgatgccagatggggtctgaataagcgacctttttgaataagttgcaggtcatggccatgttggagacttcttgaaggttgagaaaggtagcacactgagagagtgagtccacattcacatctgttatggtggtctcagatgaccaagctctgtttctgaccatgaaagtcgatgacttttccactgattctgccattggaatgagaaatttgtgatgttacagacactttttctctctctgtgtttttttt

SEQ ID NO: 57407 - DNA, 845 bp, Cannabis sativa
tctctctctctctctcttgtacactcctaaggggctctctcctcctctctctcacatgcgtctaaggctttacctatgtctcattagagatcttcctacttgatccatgctttgtaaccttatagagagttatatcagatcccacctatagtgatatgaatagtattatctctacgtatcaatacaactaaaagaggagtaggtcattacacgctaactaagggggttgaacctctaatccttgtcttatttactttattatccttgttgtgtaacacgtgtcaaacatcaactttacacgcccctactatcagttgatcaatttttgaggttaacagtttggtgcttttattgagagcgagttgatatcatatttgatcaaacgccatggttaacacgagaagaactccatttgcaccatctacatcttcgagtcttctcaagacccacagattgtagaacctgatgtccatgttccagccacaacttgaattcccatgaacacagcagatgtggtcaatcctgccaccatagcaagcaccatgaatctagccactacagttggccaggatggcatgaacatccaggtggatctgaacaattggccccgtcctccaatggaggaccctccacagacacctcccactaaagaaggaccctttagagaacaatccccaagaacaataaccgaatctcatccctggtattatgcaggagagataggaccaggaattggtgagtctcatgtggacttaggagaagatttcgagttagccagacttaggagaggccatctaccaagccgacctaatcgaagaaccacgtgctgctgattgcgatgtatt

SEQ ID NO: 57408 - DNA, 2346 bp, Cannabis sativa
  modified_base (2037)..(2040): a, c, t, g, unknown or other
cttctctaccacctcttccttcagagctgctactagggctgcttgctccttgtccaacagtcttcctttttgttgaactggctagaaatttggatcaatatttagaacatgtgaaattatagaaggatcaattccgaccataccctcatgcgaccaggcaaaaatgtcttggtttgctcttagaaattttattaatgctgattttactttgagtaacaaaccttttccaattttaagctttctcgtcggaatacttgggtcgatttcaatctcttctagttcctccactggtccaacattgttgcttgggtccccaagtcgaggatccacatcttcatccccgccttgggaggttccctatttagtaatgttttttcccttgtccgaattttggctagaggatacttccttcttagccttggttatggcaaggttataacattcccgagcaacttgctggtttcctcttaggcaccccaccccattctttgttgggaacttaaggcatgaatggaatattgacgtaacaacttttaagtcatataaagctggtcgacctatcatactagaaactatgccattatagttatgcacttcggagctttcccaatggtgaggggtaggcgaattccccctagaggtgtgacaccttggcctgagaaaccttacacgggctggaggcagggagttaaatctttaagctggagccccatcttttcatacgttgtcttgaataagatgttggaagaggctccattgtctatcatggttcgggccaccatcttgttggctatttagacttccacgaccaacgggtcgttgtgcgggacactgatattgatagcatcttcatcactaaatattatggtgggctcccctcctcgtggtatcttcggttttctttcttcgatggccagaactacttctttttgttcatgctgtactgttcgtgcatacctttcccgggctttgcctaaatctccagctatgtgcggccctccaataatgacttgtagatgtccatctattggtggtggtagtaaatcttggttgttatcgcccctctgattttgatcggccttgacatacttctatacgtgcaaattattttttcttatcagaaattcaatttctcgcttcagattgttgcattcattggtgtcatggccataatccccatgaaaacagcaaaacttagccatgtctctcttgcttacatattttttcatgggtgcgggcttcttgtacggagctaatgattgagtagccatgtacacactttctatatcttctgtcaggatagaaaatgcagtaaacttggtaggattctcccttggagcttgttcggttttactagcaaactttccctttttcccatttccttgcctattgttgttgttggaccatttaccacccgagctcgaattgcttgggtattgggggagctgggtggatatcccagcagagggagcttttggctggctaggtttttgctccacccctgcccgttgaatggcttcttcaagcttaataaaaccttccacgcgatcaaggaagtcactcatagaatctactggtccgttcttcctgatgtccttccaatgttctctaagaccttcaatgcccccagtatcgcggacaactttccgtcttcggttacctgtgcaaccttagttgcctccgtcataaatctgctgatgtcggctcggagaggttctcctggtctttgcttcactttgaccagatctcttaagtgcaacggaagttggcgagaagaggagaattgtgcatggaactccgaggagaaagccttccatgagttgaacttttcgggcgccaacttgaaataccattgttaggcggcctctgagaggatggcaggaaaaactctgcaacatacatctccttctgctccttacaggtccatttgcatttcgaaatacttgaggtgggataagggatcttccttcccagtgtacatcttccaggttggcatcttaaacttgtgaggaaattctaagacattaatctctgggnnnnaaaggggatccacgtgctcggtccaactcaaggttattgttcctttgatcggccaggccttggaacatattttttagttcatccaaatgtgcctgcacggctggactaacttgttcggcctcttgaccgaccagagtcgcgtcagcatctatttgagcgagattttgagcgcaggttccgggctgaatgactggcgcgtcgtgctggtcgtccaaccctctccttctgttcagatcatctctaagatcatgaactgttcccaatcgattaaatatagaaacacttggctgtctcagtgactggttg

SEQ ID NO: 57409 - DNA, 2206 bp, Cannabis sativa
  modified_base (1917)..(1931): a, c, t, g, unknown or other
tttttgaaaacatgccactaaagaggggaaaattacatagtatacttactttattttatttatattaatttttactatttttatattctttaagatatacatacttttatagatgatgtctctattataccctttaagtaaatgtaaattatgtgctagatttaagtagaaagtgagggtatattagacaacttactcataaaagtggatactttttaatgaaatgtaatataagtgtatttttttattaatggatacaaaaaaataggtattcgggttagggtggttggtgaagtgaacagttttgttgggcttttgctatgatggagtttggcccatgtggaaagcttaggcccataaggaaatctcacgttcatgacttttaattggatttggatccaatcagtgaaatattggtcaacatacttatgacatgcttatggatttgggccaagaggaaacagacttagtgctggaccatacgatatgggctcttaagtttcaaaaatatcaatttctcattgtattttccatatttacttcttttaatttatttgtgctaaaatacaacataatttgtgttataatcaatcaaaattaaaaacaaatacatttctttagttttatattaggatgcttctacaatgcattcctttaaagggatctatcgatgtatttttttatctgttttgatatttgaaaaaaaaataagtctaatttttttatggtcgtctacgttgtagttatttaagacacactgtaaaattttaagagatttgaaaaaaaattaacatgtcaaaataaagttcaaacaatctgttgtaagcgagatatatatgtgtgtgtgaaataaattgtttgaactctattatttgcgtgtcaaatttttttgaatgtttcaaaattttacaaaatatcctaaataactgcaacgtaaacgactataaaataactagactaaaaaagcctcccatatttcaaaatagatagagagtgcggaccaccttttaaagagtgcattatagaactttttttatatatatttttactcttgctaaatattttgagggaagagactccacgaggatcgagaaagtagaagaaataatatctttctaattgtatataataatggttatttaaaatatatacatatatctaatattttgtatttatctccatatattattcgactccgagtttgtaaaatttttgagctaaaagctttttttgtgggaaaagttatgctataaagatatttgataaacaacaagaaatcagtttgttaaaaaatgtatagagttattaaagttggtataactcaattttttaaatttttttatttttataaatttgatcaaaatgatataataaatttatttatactaaaatacatctacttatttattatatattgctaaaaataaaaaaatttaaaataaatgaatattataataacataaataaaaaataattctttatttattttaaaaaatattaaaattggtttgtttaacaccattcgagatagaattcaaaaataacttaataggtgatgttgccccggtttatttctaatatatgtggccgcagttatatatgacatgtggacaaaatagacacctcactcgaaaataagttaaaagttgtatggaaaaggcaacaagtatggttcatgacgttagctctcggacaagtgtaacaggcacgccttctcctctgggagttaagatataggaaggcacctccgggacgagaatgatctactttaacacttacctcgcatttaatgcagtatgggaaaagtgtctggaaatgcccataagaggatgtgtcagacatcgtaagcctgatttagtgtgattacacgataatcaaaagagttagtaacgactccattatgaagaatcacatcannnnnnnnnnnnnnnaggttaatctcacctaacctctacaatgcctactatgtatgtaatgcatgccctattttgtatcttttgtgaacttgtgctaatctatagctggttctcaaagacaagttacccattttcgactattcccacaaatctctataaataccccctgaaaaaatgagtaagtagatcggaaaaaggaagagaaaaaacacacaaagaacattctctgcaagaaatactctcattaataacagagactcgtggactacggctcattaatgtccgaacac

SEQ ID NO: 57410 - DNA, 719 bp, Cannabis sativa
  modified_base (67)..(67): a, c, t, g, unknown or other
aatttcataattttgcattttcagtgcccaacaacattggaacgcagtgtttggctattagaatcanatcttagtatttttagtatagcggcacattagtttagaaattgggaatttcgggaatagttgggattctagaatttaccaaaatacccttagtgctattttatgatttttattgtgggaggggcaaaatggtcattttgccccattagccttttctctttttgtgagtttgcctaagttaataaatctgatttttattaactaatgtaactgatatattttctaaataaaacaaaatgtatttactcatttatcttcaaaatagaaaaattgaaaaagaaagcttttctctcaactctctctctctctctctctctctctcgattttacctagaggtagctagggcttgctgaaatttgtcctccattaaagttagtttcagctggatttaagtattcttaactgctaggtaaactcttgtcgttactctcttaagtttcttaaatttttagaagtggatcatgcatgtttttgtgtttttggtggttgtttttgctgttggagtttgatatagttttcagaagttattatatgtttagaaaggttgatttaagcatgttttagtagttgttgattagtttaaccaagttttgagttttggaactcaaacttggagctttaatggcaagtcttgattctgagctttgattgt

SEQ ID NO: 57411 - DNA, 1533 bp, Cannabis sativa
  modified_base (1133)..(1143): a, c, t, g, unknown or other
ccaaccgtaaaagtccaatctaaatacaagcgaagccatattctgattaaataactgagaaataatctacaaaaaaccataaaaaacattaaatccccatgtaagaactcaaaatataaaaaaaatataaccaaaacaacctacaaagacaaactaacaagaaaaatacatttgctaatgataaaaaacctataaaaaacaacattaaatccccatagaagatctaactcaaaaaaaaaaaaaatagatattgcacaaatatatatatatttttaatttttttgagaaataatgaaggatactaatcatacttaatattatttagaatatcataattttatttacttcaaaaaaaaaaaaaaagaatatcataattttattggtatagttaaatgttaggttacacatattttaatttaaaattcattacagaaaatcgtaaattatttgtaatacagataaaagttgtgacatatttaaattaaataaaatttttgtataataatgtgcatttaagttaaattgcggcataaatacaagtttaatttccagttgtacataaatatttttagcgataataatacttaagttataattctgtaatttatgtaagttttaagtaaattgtcacgtgacaatctctaattggtctagttcattatttttatttttataaaaaaatcaatttaaatataccaataagaaaatgacacatggataatgacttgacatttaatatccaaactcttacggaattctaaaaatataacttacataagattaccgtaaaaaaattaaacttaaatatttattttcaattaaatatcaaatttaaatattataccctaattttttttttaaataataataataataagagtaatttgtggtataaatgcttaagtttgatttttagttgtaatagtaattaagttacaattctaaaacttttgtagatacttggttgttaagtattaagtaaattgttacgtggcaatctctgattggtcaaaatcattaaattttttattttttaaataaaacttagtttaaatatatcaataagaaaatgacacgtgaataatgacttaatatttaatggttaaaaatttacagagttctaaaaatataannnnnnnnnnnttactgccaaaaattaaacttaaatatttgtaaccgagaactaaacttaaatatttacgctacaaattagcctaataaaaattaattgagttaatagtgaggttgtgaaaaaagtcaacaaaatggaattgcagacctcagtcaaagtggcggcgtttaatggaattgtgtgaattgacgaattaggacaattacttgagttggggtctgagcaggtcagaggggcaaaataggaaaatagaaaaaaacatatatagcacaaagtaaagtacaagtgggcactgcggcaactcactcagccactcaaagcctaatcgtacgaattgcgtaacgaattcaaagtaccaaatgtattgaagtacctaatctaaaaatctcttcatttcaaaa

SEQ ID NO: 57412 - DNA, 1604 bp, Cannabis sativa
atatatgtaattcacttgcaaatattatgggacaaaagatagatcatgttagccaattacgtactcattcttcttacaattttcaccgtacgttcacttttctctaatagttatgaaattgaagtttgaagtaatcaatgtgatacgttgattttgataaaatataaaaaatagaaaaagatgagtatgaatgatattgtctataataagtagatcatatacattattgtacaccatatatataatgaaaatttgtatatgtttttatatttatatattattattttgcaaacgatcagatacaacatgaaaatattcccttacaatttcttaggaattaggatatatcgatattggttatttttttgcatgtactgaaataatatatgaaaagaacttgttttctattatttgttaacatcatgatgtgtgtgtgtgttatgagaaagaccattcgtaaatttgttctcaccactttcttttctgattttcatacagttaagctaaaaagagggtcttttgggaaacaatgaaagacaatataaataccaaaagaaaaaagcaaaagaagaaacaaatgttgaaaagtgagagagagtggaaaagaaaatatattgtagtgaaaattggaaacaacaagcgcaatgaatctaattccaaaacaacccattctttcctctattcacattataatcttcaagatgacattaatgactatatattatatatttttataataataattaaagaaaaaactgtgtcaaccattccaaaaccctataacaaactttattcattggattctatatcataagtgataataacaagaccacatccacaaatatgactgagcttttatattttaagaaatgaaaaattattgttaattatattattgttatacttttcccaagtaagttataacgtacacacatttaattgtcaaaacagttatatattgttttccatacatactcagattgaatggtacgtgaatctatttttcgagaaacaaatctgggtcattatatttatatttatttaaatggcacaataacacatggtgatgtaccccacattaatttttttttttcaaaaaaaaaactgtgtgtggagttagagtaagtcccacatgatcatgccttgcccataaccaacagagagtgtgtgggacccgtccattcacatgggaatgggatggatgggaataatgctttattattatatattgtaaagaaaaagaatgaagggctgtgatttgtttaggggagaagatcttgagcgttgaattgttgggcatagacatagtgttccatatgggcggctgaggttgtcccattgttgtccccccataacataggcaagtcgcctcaatgctgctgctcttgttgccgacacatcacccttaattgccctttctccataattcatgcattcaaatttaataataaaaaataacaaattatattctaattctattattatttaataaacactaccttcccccttattctatataattattaattcattatctataaaaactatatataatatacacccttgtattcccaccttccaaacattattattgttgtataaat

SEQ ID NO: 57413 - DNA, 3136 bp, Cannabis sativa
atttgcacaacattgttctttaagttggggaaatttcttagtttttagatatgaagagaactctctattccatgttatcatattcgacaaaaccactacagagatagattattctcattttgagaagcataatgttgatattgatgaagatgaggattctattgaagtcttggacaacttttctccaataccatgttccagttctaggccccacaagaaaatgaaaactagtactgattatggtaattaaaactaatgaagcaatgttttcatgttaattgttaacatttattgatttgtgtaatgtgttgaatatgttttcagtcatgaagtgggatttgtctgataaagtacgtggagaatcttccctaccaaggtggatgaaacctgaaatctttttaagtaggcagatgttggatgcaaaagacagggctgaagctgtcaagagagctaaaggttttcaatctaaagacccctttttcatggtttacatgcaaccatcctttgttggagctaagtataatatggtaattagtgattatatatatatatgcttcttacaagttcaatttaaatgtttctcatattgacttaatgtattcttcttgatcttttgttgtgaaggttataccaatgctctttgcaaaatattacctcctcagtagcagtagtaattgtcaagatgtgatccttaaggttcaggatgggagaacctggtccgctaagtactatgtcagactggatagaggatctcccaaagctagactcgagcatggttggaaggaattcgctatttataatgatttgaaagtaggtgatatttgtgcctttgttttgaggaagagtattggggtaatgttgcttgaagttgttactttttctggaaatggagtagtgaactctcctctgttaccaggtaaaaacataaatttgacttattctatcataatatttggtccttgtgttaggatcccacatcgactaagtgtgggatttgttggttgtttataactactaggaaacccaaaataatcgcttgtttttttaatgaggttgcagaacttaatgccatgacaaaaggaagtcggtcgattaaaatagaatctcataaaattatgaacactaaaaggccatcctttacagttactatgcgtgaagcctatgcaactggtcattgtaatttggtaagtttaaacatgaaaaactctcaattttctgttttactcaaaaacttagtatgcatctatttccataacatatagtgtttgactacaattttctaagtggtgtttgtttttcatttggatagttcttgccgtataagtttgtgaaggagtaccttaataggaaagaatatgaggtgagactttgggttgcggatggtagatgttggtttgtccaattgaaggtgaggcaggcaaatggattaccaagagctgaattatgccggggctggatagcatttgcccgagcaaataatctgcgaacgggtgatgtttgcaagtttgaattaagtgttaacaatggcaatgaagtttcatttctagtttccattgttaagggtgctaatgttgtggatgatgcatataacaagataggttagaaatgctgataagtgataaccaatatttataattgaaatggatttatggctttagtattaacttacttacaagtgttgttttcagctgcaattaagagaaaagcaactacaccttccaagctaaagagaaatcctcatgtgaaagttgaatcttcttttactcatcagaaactgaatataaagaaaggacatgagaaaactaaagttgaactttcaggtatatatctgatgtgtatgattcaagtattttactttcttgaccattcccaaaagactcacatttttgttattattttatttggttgcaaaacttaagccttgccaaaaggaagtggcctaaaacaaactacagttcttgaaagaggaagctcttctcaatctgaaaggccatccttcacagtcattatgcacgaaacttatgcaactggtcgttgttattttgtaagtttcttagtttagtatataaaaacttatcaatttctttgttttactcaaaaactataatatatatatttccaatgtttcacaatatagaatgttgtattcttataattcatttcatttttggacaggtcttgccatacaagtttgtggagaaatacattaagaagaaagaatgtgaggtaagactttggcttccggatggtagatgttggtttgtccaattgaaggtgaggcaggcaaatgaatattcaagagctgaattgtgccgaggctggagagaattcgcgttggataatagtctgcaagccggtgatatctgcaagtttgaattaactattgaggatggggatgaagtttcatttaaagtttccattgataaggattatgattatgatgatgcatataacaagaaaggttagaaatgctcataacaaatatttataattgaatgcatttatggtttttagtattaacttacttacaagtcttgttttcagttgcaaataagagaaaagtacaccttccaagctaaagagaaatccttatgtgaaagttgaatcttcttttgctcatcacaacatgaatataaagaaagaacaagtggaaattaaagttgaacctaatatttcaggtatatgattcattcaataataatgtcaaacaaacaaatacttaagaaaagtcagcttaaatttttgtttataataaactaaatgcagacatgtctatgaaactgaaatctgacaatcaaggcagagcttctaaggcagccagcaaattcttctcaaaaaatcctcacttccaagtcgttttgcgatcaaatcacgtgtatggatatcaattggtatgtttaaaattttgtttctataaatatatggtttagttatgaatccataccactttgtatgaaagatcaatattttatactagttatgattatttattctttcagccttttccaaggaaatttgcaaggcaatatttagagggaaaggctcaagatatgagtctatgggttggtgagaaatattgggttgtgaagttattactttatacatcaaaatgtgagtttggtgctggatgggctgc

SEQ ID NO: 57414 - DNA, 650 bp, Cannabis sativa
atctaagttttaatcaaaatttgtgattgaacctcgttaaactcttgtccatttcataatttatcatatctactattttagtttctattctcttgattaatcttgcattcttgtaggtgcatttgtgcacaataaatggtatcagagcagtaagggagatcgaagaagataatacaagaaccaagttcagaaaatcaagattctattcaagatgacatcaattagatttgaagtggacaaattctctagatcaaacgattttagtttatggagaatcaatatgaaagcctttcttattcattagagaatttcagaagcactagatgggacgcaatgaatgaaatcgataacaagaagaagaaatatgagattgaagccttggagatgaagtcttgagagaggtttcaagtgaagataatgctctatgattgtggaataagatagctgcaatctatatgaaaaggtcccttgccaacaaattgtatctcaagaataaactttatactcttcgaatggatgaatccaaagagctcaagaaatatctcgatgattataacaagattattcttgacttgaataatttgagagtaaagattgaaaaggaggacgaagccataattctgttgagctctctgcctaagatgatgaac

SEQ ID NO: 57415 - DNA, 3669 bp, Cannabis sativa
gacctgaactcggacctaggactcgggacctggacacggacccggacctaaactcggacccaaacttgggacctgaactggtacgcagacttatgacccaggatcccaaacctagaacccgggacccaaataaaattaaaaaaataataacaggtcagatcaaattcgatcctaataagtcaagttaaatctaatctaacagaacagggcacgacagatcattacatgatttggatcggttcggatcggatcatagccaaatcaaatccatttacactcctacatcagccaaagagggatcaactacctctgttgacccacttctcttcaaaaaaaaaaaacaaacaaaaagttaatacacaacataaacaatcacacaacataaacaatgcaacacaataatacacaagaataatataatgagctggttgcaattttcagttgatctaattgcatttacaaagaatgcataaccctactgtaataaattatattttgtttatgtactttccaattacattttgtataaactatatattatgtaaaggtgtaagatggagtgattttatagaaaaaaggagataaatttcaatctgtaaataatgtgggttttgtctttgtgtatcaaatattagagattaaaagctaattattattaacttaaaaaaaccttcttttttttcaaccaaaacttaaatctggtcattgttccaagtttcaaatactgcattcactcattaatatgaaacatgtttctgtattacagattacacatctatatatatatatatagatatttaaaccaagaatgaaaattaaaataagaacatagctttgaatttttgtctaatgcattgtattcgaaggcttctttgaaatcatacaagggagaacatagctttgaatttttgtgagtttcaaattagtctgaccttctaaaataatcttctaatcaaaacataaacatttgagcaagaatcctgttataacttatccaagaaaatttatttatatgaattttagactgggaaaatccaaataatggctattagaatttagaatggagtttgacacctcagcaactaactaaaatatgttagttattcaaccaaaatcagtaactatatatatagtctaagactttctttattgtaattagagagaactagagagattgagagctctaagaacaaagtgtgtaatatgttgttcactctttaagtgatttccctcgtgtgagattaatctgcacctgcggattagatcatgaaacgcattgtttcatatattgaactttgtgaaacatctattgagtgtgaattactcgaaaattttcaaaaattattttcatatggaattcaacctctggaagagggtcattagcctaagcggcattagctgcacactttctcttcatttttcttctctttgtaggcatcccctcctgctacacttcgtcttagatatgttttctttagtctttgtatcaaaagctaacaagttagtgaggaatagatgttagctctttatacataagctttaatatatccagggccgcccaaacattttgaggaacttgtgtaaaattttaaaattggacccattaaaaataataaaaaaaaaactatgtacattaaaactacaattctattactagcttttttttttaagattcgtttataaattttttatttatgtatatataatagggaaaaaaaaaagaaaaaaatagtctttttctttaaaaaaaaaaaaattagactttaaaaaaatgagggccttgtgcaatggcttaagctgcccaatgcttgggccggccctgaatatacgagaaatacaataattaatttttattattattattatcttaagcaaaatttaatctatttggtgacacactttgaggatttaaatcttgtgctctgatactatttttctatcacaacctggactctgagctatagcataaatgtaaaatccataatttaggtggtcaaagatcacactttgaccctttttgaaaaataatacttacaagcgttcctttagtttatattaaaaaattaaataaaacacatatttaaaataatagaataacttctataataaataggaaataagtgtaataaaataggatccatcaatctatatagaacaattatatctccacaattatgtaatcaccaaatgattagatttaataatttgtaaaatactaaaataatactatagatccatcatattcgttcatagctatttaaatggtacagaccatccatcaataattagattcatattcagagttttaaaaaatagttaataagataagactaagctaatcacatcgttctccatcaacaattctccttcatcaacaagtattaaattgagtttctgaaagaagaaatataggggtctcagtaagaaaacaactattatcaaaggaccagtagtttaataaaaattcctgcatggttagattttaaaacaaaacatcttgtcatcatcatcatgtataaaaaaaaaataaagagaccacaaataaccacaagagataagctactcgtgcatatcacactatccactagacccataactctcaatatcaatcacaaaaaacgacatccaaaactgggtagtcgcatctgataactaccataataccgaggctcatattcaatttacttcctgtacaaactctagctctttcacctacaggtgagtgcacacctggtctacctatgataacacggagactaggtcgtgaaataataatatgcacaaatcatgatcaacatggctctcattagtaaaaccgaaagcagacaaataagaatgacaaaagaacatatttcttttattttagaaattctgatagcataaggattgtattttgaataaacctaaaaatcataacctgcataaatatttggcactcagtgctccagaacaatccaaagaaatatgcaggttaagtttttaatttttcaaacattttagaaatcataaaaattaaaatatgtctaatgttattcaacacatataaaatcaactctctatcaagttgagtccctatctcttccaagtcgttaaacttttgttccaaatgacgatcctgagctctcaactctcaacttccaaatgggattttagctttccgaaactcttttttagacgacagctaactttttaaagacttattttgagattttttatctaaaagaactaaaccacaagtattataaaaaatatatatataataataataataataatactcatcactatgtaccattaagaatactaatcaccatatggtggaactttttgtgaatttttataaagatgtgagaagtgaaatatgtaatggtgcaaaaatttcacataggattaacgcaaaaagtcctacatgggataacaagggataggaacacttattagtaaatatatataagatgctactttctattttagatatgggtttataattaattaaataaatatcttttttttctattcatctatgatgagtatttggtcatttgtgcttccaagttctcaataattctcttggatagagttactaaaagatgaataattaattgtcagaatatttagggcttttttcataaatgtacaacaaaaacaaaataattacaaaaaatgtgc

SEQ ID NO: 57416 - DNA, 689 bp, Cannabis sativa
attcaagctcgttattctttgatgtttgtgaccgcatttgactccattccagctgcagaagtgagtggaatcattccaggatctcaacactgcataagggtcatcggagactgattctttgaatttgagcagagcaaatctatcggtttcgttccctaatgcattagtactcatagcatggcatgacatcatcaaatgcaggaacgaaaaagcatgccaaaaagcagaagtaatggggttattaagtttcatggctaatatttgtactggaataggatatgctcaaggtacgtatgagttagatatgaaaatggagattggttattaagccttaatataactatatcatttacatttttcttctctaataagtcttcatgagcacatttgattgacttgagactggatggagcacaggaaagaattgaagtaataaattcagtgggtacaaaatttctttgataaaatagacagctaactaatgaaggcccaccatgcaaatgaagtgtaaaaacgtatcacttattaagtggaagaatttcaaatgaaaacgtataatttgggaaattatagcaaatgatccctaaactatttattatttatattgttttttgttgcaaataaaaaaattattaatttttttttattttttttagaattagaaataaattatttaaaaattatggtat

SEQ ID NO: 57417 - DNA, 856 bp, Cannabis sativa
agatctattggttggttctggtttatatgatggatcatctgacaaatatttgtggagatcggagacatctgcaaagcctattggcacttcagtgtttgaagaagtagaagaatcatacaaaacatttgccaaggacaatgatatctctctaaaagatcagagagtgaggagagtggatcacaagttgttacatgatttgttaaacgaagcactctcaactgtacttgaaccacatcgtggaatctcaacagtctctaaagtcgaaagaaaatccatgaactcctcaagttttccaactttgcatggaaacaaattgttgaactgtgtttgggagattatatgtgatcatttatacccttcgacggatagatcctgttattcactagaggatatggtggcgcgagacctgagactgagtcgttggactcgagaggtggatgatgaaggtactagtttggggagagaggtggaaattctgatcctgggagatctagtagatgaaattttgaaggatatgaagctatgattgaaatcaagttacaatgacatagagtggagtggagtggggtggtgtgtatatgagaatgagaagaagtaaatacaattaatggatatggaaaactactgcagctgattaccatatatatatatatgtttaatagtttgatatatagatgagttttggaagtgagaagaggtgaggtttcatgtggtttgtttgtacatattcttaatttgtttgtgagattcataggagttgtcagattaggtaacatttggaaagaaaaaccaaaagcatgtgttttgttcttctgcattgttattctttttcttttaacacattcacatgtagtct

SEQ ID NO: 57418 - DNA, 926 bp, Cannabis sativa
tctgtgcaggaaatcaagtgaagaaggttgtggaagtgaagaaatttcaaattgggcaaagaaattaagtttggagtggaaaagttgtgcccagttgctatagcaatggttcagcaattctatttggcagcaatagtgttctgatatcagggtttagaaaaggagtattggtctaaaaaaaattggaacagagcacatgattggaagtttgttgaatgaagcaatcattgggtacaaagtttgtgttcagtccaatcatttgggttgttgtacttaagttgattatcatgtacccaaaaatgtcaacctcatataaacaaggacaatacatacaaattgagttaatatgtttatggggcttcaatttgtagtcaactgggccccattatgttgttgacttcagcccatttcctcaatgattagcccattagctttcaaccctacactactatcatcatcatcatcttcacttccctcttcccagccgactgccactcacaaagccaatatgaacccagaaatcactcctacacgaaccactgctcagtcgaccctcactcaatccaatcgcacccttcgccaggtcaacccgaagccttcttcacccaactcgcacctcaccattcacccaccaagtttgaacccacctgaacccgtagccaccacgtcgcccccagcacaactcgaatcaccatctcagcccaagctccacgaaccaaccccagcaactctccattcactaacccatcaatcatctcgtcgattgaacctccgagaacccaaaatgaaaactcagccgtctaccaccatagcctccttctagcccgaaccagccactccttcaccttcgttcaaccaaatcgcgcaccactagcttcgtccaagagcagccgcacccttgaagtcaccaacccttgcacaacccg

SEQ ID NO: 57419 - DNA, 1465 bp, Cannabis sativa
ctcaattagaatataatttgtttagtcccaagtctattcttgaatagaggttctactgtatttgtcctcgctatagacttccaagacagctctttagacttggtctcttgaaataagtttaatcatgcttatttctcttagtctttcaacatactcacaagtatgcgggtcaatgagttgcaagctctggaagaactcgttatctaccctttctagtcatgtcacaaggatttaacttgtgatcttctcatcctcgtaaatcattatattaataatactccgcgagttcatctcatcccttacttcgtagcttatttttgaggtagaatattcattcatttctcgcatttattattttattctttcttttagacttgtatgactcatgtcatgttcatatttagtgctcaaaatatgggcataacacatagtatcttagctcgtctagcattaccgttcccttaaatgagatgtttaattacttatcacggattttgagttacctaatttttttagtttgtctaagatacattacctcgggaatgtggtttcgtcctttgttagcttgtaatggaagcccacttctgatttggactttttttccttttaatttcttaggtcattttctccttttaggacttggtttttcctcccaacatatatataaaatacatatatattaatatacattactacaaaaagtaaatttcttgactgttttaaacagtcggggtaatgtattatcgttggtttatataatcatcccctatttgaccatcgtaaaattggataaaataggcatcgattaaaaataatcggcgaaaattattacagattgtttaaaacagtcgataatagtggtcactataactaacagttttaaacagtcggctatagtattattgaccattattttaaattgttggtaataatttagccgacagttttaaatcaaaaattaatttgtggtccaaaatttgtaaccaaaagttgtgaagctcttctttgtttttcctatcgaccctccattgttttcttcaatattcccactgcaaactccttcgaatccaccattccttcaattcatacagacaaaatattaatattaattatatatacatgaatataatcttttcagtaaccaaacaaattttttttattaactaatacttaatttagtttcattatctacctatgcattcatgtatatatattcaaagatttataaaaaaatatattcacaataataaactcatacacgtctcaattcaaagaataacacaataaataaatacaaatgaaagacaatagagattatctgaaaatgatattgacgaacggtggttgcgctagtagttggaggggacaccgagatgatggtgtgactggtggtggtgctgactgggaggtggaccagttggtgcgagtgatggtggctctgtatgattggtggctgctgctgtgc

SEQ ID NO: 57420 - DNA, 571 bp, Cannabis sativa
atactattatgttattacatattaacttttcttacaatatttaagcttgtgtacctgtggggaaaatcaataaccaagctaccaatgaatccagcttcaagcgcagacttaaatattaacactcgctgctctacactttcaaaatacacttgaaagactgctcttgctccccttgcgaaacatctgtatagagatttaaagaatgcactggaaaaagaattttagccaaagattacaaaaagtgaagtaatttacaaaatatcatttatgatgagaatgagtcagagagaaagaccaacatactctaatcttagttttgggttgtgtgaggatttgtcagcattgcacaaccactgtcactcaacacacaataggaaaaatattaaaattacacataaaaataagtttagaattattagtattaaatataaaactcaacctattgtcatatgagcaaacaaatttcaagcaccaaataaaatgatgctaacacattgagtttagattttgaaaggtattgatgattaaggtataaaagaagagaggggaaagaaatagtaagataatagaa

SEQ ID NO: 57421 - DNA, 6622 bp, Cannabis sativa
  modified_base (6366)..(6376): a, c, t, g, unknown or other
  modified_base (6556)..(6576): a, c, t, g, unknown or other
tctccggtggtgttcggccgtttcgtggttcgtcgtgcgtggtggatcgtcgtacgtggttcggtcgagatgggtgtagatggatgtgcgcgggtggtgatctgcgtgggtggtgaacgccgtgtgtgggttgttcaaggaggaagagagggatcggcgtggaagagagggatcgcgtgggtgatgaacgccgtgcgtgggtggttccacgaggtagagatttgggtgggtgggtggtgattcgatcggtatggtatgtgttggttttgggtttgatttgagagagaaaggaggaagagagagagatggttgagaataatgagaggggtattttagggtttagggaaaagtaatcctattttttcaatagttataagtatatatttagagaattaatttaggtataaaatatggatagaaattcaaatttcccttttcatatttgtttttttttttcttaattttacattaattaattaatacctacacttacactttattattttacaacattatttttttgacggtagaataactcataaatttacgatgcagatatttgcaatcggtgttggaattttctcaaaccaagatagctcatcgtctaactgcaaaacatgttttgccaaactatgagtcactaaattctcagagcgagccacatggataaaactgcccccagaaatttagacaataaagctataacatcttcaaacaacactcctagctcattgaaatacacctgaaaaatagcagaaaaccagaataaaacttttattaaaaaattatcaaattgatcagaatctaccaaataacaagaactaagcaaccataatcccactaaaaattactaaaactagtcaaaggttaccctttggctagtagcaactgaattatagcactctacttcataaccttcttaaagtcactatcccttaccatatcatctaaaataaattttagtatgtaatttagtaaaaaacaatgaacctaaaccctaccatatatgtataatgaaattaccactcgatccatttctattatatcaatcatagaaattaactatcttgtttgatgaagatcttccaaaaacaaccttgaaaaaatctaaactttcttgattgacattaccagcaggataaacactattatttgactctattgaagttgactgcattttaaataaattaaaatatactactagtagtattaagatagatagatgtcggaggaaaataataatgtatatcttaatactatatatagctaattatattagtatctttcaatacatatgaaaaataataaaactcatacttattaagttttattgtccattattttagcatcttatatataggattaaatcaaaaatttctatttcattattaatgtcccctatctctcattgatgacgaaatcctcacatttataattattttatatatttatttatggtaaaaatcttatttatagtcaatataaacttcttaaaattaactaatataatcacaatccaattcgacttaataatttcttatttattatttatatagatgggtttaaatatcaacatcataaccaatagtaaagttttctaattattttagccattcaatttactaaaaaaccattcatattagtatctatctgtacaacgaaaaaataataaattcaatatcattaacctttactacccatttatttcagtatccgtctatataaacactaaataagaaaatattaagtcataatacttaaattggattgtgattatattaattagttcgttttaattcaatgaaatttatagtgataataaatatgagtttcactatatataacataatattattttagtgtaaaaattataaatatagagatttcataatcaatgggaggttggaacattaatagtgttttacaacattttaaaagtaaataatttgttcatattcctaatatattaaaaaaatggggtatccaaatattaatcatccatgaatcatatatggacatatctggtttcatgagtcttaaacaataacaatactattggtgtcaattaagacgaacaattacacaccaaatttgaatccgttactaataatattaattactcagtcctattattctttgcaaaaatatcttgtgtcagaattttgagcatatatccattcaacaaatagtctgaaaagtcagaactaatggccgtccaataccagaatgctagaaaacaaaacaaagcattaatccattgaaaatgatatttcttagactttgagtcaacccctactaactaatgcaataaagtcacgagtttaaacaatcacgacatatgtaattagcaggtataataaagagtaagcataattcccagttaaacaatagaggattattctgttttcagcgtttccaataacaataaggaggcatatttcaaatatgttcttgatattgatccacatgaacgcattcatatacaaaggaaaaatataaacttcttattctatatcaagaaaaggataataagaagttttggacagtgaaatcaactagccagagctataaaaccataatcctctaataatgttgtactagctacaatagactaacaatttggtttgcttatacaaatatggacttgaaatccaccatatgggtatattgaaatccacaatgtggtttgcttatactaatctgtgaactaaatatacaccagcagaattattcaatcttataaaaaggaatctagccggctggttacagcaaaaaaaaaatgataagatacccattctatttacctccattggtctttctgttaattttatgaggaaaaaagccatcataatttgaaggaatccagtcatctccttgaatgaagctttgaactgagtatacactaacatgctcagctggaattcggctactccaggagactctctgagataaatccgaccctggtccagagttgtcgaattcaccataaaacagagttttcaaggcaaaatcctgactccatggcatccatccttgaggtgtgattagagcttctaagttacaatgtacaaaaacagttctagaatactccttccaaggccgtcccaagaagtttttgtgcactgcaggcttgctgtgatacagcttcatgtaatcctcagtaccattaattaagcaattttggaaaacaaaaccagttgtttgcgcagggtcagtcctgccatgggctgtgacagcattgttctcccctttttctggctttatttgacgagggcagactaagatttggcaatcctggaaaaatgaagcagagtttccaaatatgaagtctacattgccttggatacgacatgatttgtagaattggcgaagtgaatgtgcgtagagagtgtcctgattgcctaagaattcacaattttcaatcactgagagatcactatctgatctgaatgctacagcttggtgtgcttctggtccagccgtgttctgaaatgtcagaccattggccataaatccatccccaagaactcctgcgtataattatgcataaattattaagatacgttacaactaactaccacatcaaatctataggccaaactactcaaatctttgtttaagaaaaaaacttaacacttagcaaaacgacaacccaaaaagaaaaccagatatatataaaaccggttttaaatttaaacataacaacgacaaaaatttatcattacgtattaattccaaaagaaaaaaatcactagaaaaagctactcaattttccgttgccgttaagtttatcttccaaaaggcatgaccttaagttactcatacgtcataatatcaccttaactttaaatcattcacattattaacttacacaccaaccaatcagatttaaacacttattacttttacagctatgaaaagtaaagaactcaccaactgtagcagtgttataggtggaaattccaggttgaccaacatttaatgatccagtaataacagttttacccattccgtctcctaaaaatacaacgttcttcttctcaagtgggaccctcactgtctcttcgtaaacaccagcctttatgtggatcacgaactttttaacgccgttattgggagcagcgttaacggcctcctgcactgtcttgtaacaaccatctccaccgtctttacacaccgtcgcatccgctgttaacttcgacggaaacccaccccgagaccccatctccgacccactggaaccgcttgcccagaacccgtctcgctccgttttcggcgggccccacttggacacatcggttccgaacacgtcgtacgacgccatcatgctcaacgcgttgctggacagccccgtcaacgaatcaagaaacgacatcgtctcgttcaccaaatgggtgtcgttcgcgtacttgagggcagaccagcagtcgtattggaacaggagcgccgcgctcatccacgccctcgcgtccttcatctttccacgtggcacagcatcattggccatcgaaatgcggtagtccgagttccgcaacacctcgaggcagttcttcgcggcagtcgaccggttcacgttcgaggcggaggagtcgaggatcgactgaaccatggagtttgcgttcttgagattctcagacgagaccccgatcgccgcttgaattatctgtaccggagtcgaatccgcttcgacccggccgggctgaccgagtgaggactcgcaaggttgctggaagcgagtcgctttgcatgcctgctggatgatcagcggagcagcggagacaccggacgacttaggtgaagggggtttgaaactttgtggaggcggcttgggatgatggtgatggtggtctgcggaggcggattgggtgaaaaagaggagaagggagaggaaagagaggaggaagagggtagacatggcgagaaggaggaagaagcgagttcttttgggtttgtttttgtgaatggtcattgcgaaagaagaagagtgagtatttatattaatggtggaaaggaaaggagagagagagatggggatagagtctgtttcgtcagcagtcactcattttcttgctttggcattttgtttttgtgttgggtgattacgtgtataattgggagagagacgatgaaatggggggcattctcacggtcacgggagtagaatgtagaaaccagatctcacgggttggaattgaatttgtttgatccgtaaggatccgaaatgaccaattgtttcctttttctttttttctttttattttttttctgagtcggtaagttttgggtgggtttattctacttactgtagtgcacagtgaatgaagaacgtgcgactgcgagttggattggggaaggtaggattagattaataataataaaaatcattattgtcagaataattgagaccatactaaaaagagtatgaatagcatctccaatagaattattatttatggtgaaaagctaaaatatatttcatttaataaaaaagtatgtgtgtcaaaaatttatataaatttagcacatagtaaattttaaggttattcaaaaaaattaacaaaccgtctaatttgaacaaaccacacaaactaaactgaataaacctacaaaaaatacaacccaaataactttacgaaaaattcaaacctcccaataaatatattgggcgggttgaatattattctaacccgtccaaataacccgaataaaccaatttacatattttttactaaaattatttataacatattacataaattacgttaatagttaaactattttacattagtttgtattttatagtgtttattttgaaatttagaatttatagttgataattttgattgtatttgaatattatagctgaaatttagaatttacatacgaggatattttttttattttattttttgaaaaatagtgtttaatactttattttttattcaattcatatttatttttaaacattaatttaaactataactgtttttttgaatgaaaataatctttattagacaaaaatatctgctaatccaaagaactgaagagcaaggggaatatcactctcagaaaagagacgacctgaccaataacaagcaccacgtgccatacagtgcgcggctttgttaggagaccgtttaacatgaccaatagaaacattacttaaagaaactaaaataacttcaatctttaacatataaactaaaaatagaaggcatagataccgaactaagaatagcatgaacaactaaaatgcagtccgtctctaaaataacatttgacttgttattcctctttatccaactatgtgcttctttgacacttagaatttcggcaatttcaggtcggcaactgacagaagaaatnnnnnnnnnnncctccattactcgaccatcacagtcgcatgctacaaaccccgtacctatctcatttgtttctccaaaaaccgcttcatccacattaatttttaactgaccagcagccggtttggaccagtaatctcttgtgtccatgcgattggaagctagggataccgtgttggaaattattttaccannnnnnnnnnnnnnnnnnnnngtatgttgattaacaccctaaatgtgaactttctaaaacgatgaaa

SEQ ID NO: 57422 - DNA, 1274 bp, Cannabis sativa
ttacaccaccagcttctgttaaacacagagaagttcataaccaaactctggtaaatatcaccctctctaatctaatgatgaaaaagtgtaatttgtgaatggatttgtagttgtatgagggagacgtgaaaagagggtgttcttcattttgtgctctgaaatgaccactcggcttacctttcaagatctcttctcacaatcaaaaacgttaataatcaattaattagaaataaataattaaaaatgtgtagatcgtcatgattcaagatctaacttacttttgagttttatcaatcagattctcaaaaacatttcaaaaagttctggttagaactattacataggccttcctactcaactacattagaaccaatgatcaaacaatggaagaggaaattaatgactactggtggaggcacaaactaaaaaaaaatcagaggatataaaatggataattaaatttaagaatatagatatataagaaaataaaatttacctaactttgatattgcagaaacaatgatgcgcaggtacgaaatcgccgatggtgatgttggaacgaaggtaggaagggcgacgaaggaggaaggctgaaatcgcagggtgcaaggggctctggcgatgttgaatggaggaatgaaggtggtgagaaagatggctactgttcaggtgagaaaagttcttagataagggtatattgggaatataacaaataaaagaaggtataaatataatatatacaaaaggagggtaaaaatgaaagtagttaacccaaaatgggtataggatgcaatttcctctttctcttttgtaaacctattatccaaacccatatttcatattttcgtttcttttttttagttttattttttttttagtttattttacatttacattttagtgtttctttctatttggaaaattttcatcaaatactaacttttttttttcaaacattacatttataatttgacaaagaaatttttacatttatacttttcttaaatttttttttactgttttttacttttaaaaagttttttttatatatatatattttagtcaattttggctctcttttttctttttattttttaagtcagttgctgacttttttttttctttctttctattctctctctaattttcttttttattttttttttctaatttctctttgtgtgactctcatttttttttttctcaaactatttttttttctctttctatatataaatatatggaagaggtttcaatggttacatttttattgt

SEQ ID NO: 57423 - DNA, 1153 bp, Cannabis sativa
  modified_base (1027)..(1030): a, c, t, g, unknown or other
ccgacgctgaaagagcttaaaaaccgcctctaaagggggtttttgtagtagtgttatctgcattaacaactaatttgtaatataattatgcatattgcaacaaataattacatattttaaaacaaattaaaaaaaaaagggttagaatgaaaagaaaataatgtccatcaattttgtgtaaattcaatatttaatgctattaatagtgtgtaattaggtgcacaataatttggtgtatttttaaagtgaaataatgtgaaaattctacactaatttagtaaaatagtggaagtgcttaaaaacattataataatgtttagttaatgcaaattcacactataaacacaagaataatcctattcaacacacaaaggctctcaaatattttacatggttcagctgctttcataactcacatctacgtacaaagagaattaacagcttaacaattagtcaccttcattctgaattcttctatcaagacaatagctagcaatctcatgatcactattttcattcttaagtaatttttcagcatgtcgaagcggtgtcttaaaactttctcaagtttaattttgccttcgttttgaatggagtctgacatcaatgtgttttgtttactcatgcaagatttgattcttgtggagattaataatgcactttggctgtcactataaagaaaggaacaaacttgtgatcaatcccaaactctcttgataatctctttagccatattaatacttccttcacagcttcagtacaagcatttatatactctgcttggagtctccttttgtctaagccacttctatactctaattaatctacaaaccagagattgaactattggacctgttaatcaatccatctatctattcgagctccaagtcatcaacagccgctagagtgagtaacattattatcagatagagctgtgcttgactataggtgactataggtgaaactacttgctaccaatcttgctttttgttttccctttcagtactataaaaaatcttacttttannnncaacaaaacttgtgattaaaagtgaaaaagttgtgacttaattataaatcatcattaactcctatggtgtgactaaaaggttcgtagctaaaggtattagtcaaaaaaattacaatttgttgt

SEQ ID NO: 57424 - DNA, 1356 bp, Cannabis sativa
aaagtatgaacttattatactataataaaagtaacgtaaaagtattttaaacattaagtaatataatgttacttaaaataatattttttgtaatattactaattccgcgatgcttaagatacgattttatttctttacaattttttttaaaaaaataattatcaaaatattacacgttaaaataaacttatttagatattattggactacttttaaatatgaaataataagatatttatagaaatccaccataaaattaacaatatactaaattttgtttaagttaaaatttagttgcttatatgttaataaaatatataaaaaaaagtaaaatgttgcttttaagtatggttatttttttcataccaaaagaatatatactttccacacatcttaaaatgaccaccttaaaaagtaatacaaatataaactaattagtatctacatgtcttattttttaataacatctgttaattttttttgttaacgacatataaaataaaataaaagatcatttttgatttcaaatatatattttctaaatattaaaataatcaaacaagtaataatataattattattttttatataattatagaaaagaaaataaagatatgtaaaaataaataaataaaaagtcaaaataaaaattcctcaacatgtaaaaaaatggcactcaatttgatattagtgctggtagtaagagaaaaaaatgtatatagttgtttatatgcggtacaactacccttagctctatcatttaaatgtgtactgttatatttgttaataattttaaatttaggtatataactaaaaattccccttaagatttatggagatagactaatctagcaataaattaatgaagcatataatttacttaacttaaattctattcttcttcacaattaaaaatacctttaacaatattagaaattgcaatttatcacaaacacgtagaattctagactattaagtgaagagtaatcctaaaatgacgatagattaaagtaaaacctaatttagtgatcatctaaataagattaaaatgataatcatgatattgaacatataagaatagaaacaatttgatataatagaaactacaaattaacattcaataatgatattaaaaactcacgtctcgagttttgaaataacccttaactaaaagaaaactactccataatctcaaacataatcataaacataattataaataaaaattaaatgagtttaagaagaaaaactagatgtagatgtagattctcctcttctcttgagttacctccttcaaaatacagttcaaaagtactaaaatccgtactctagaagtcatatttataatccttaaaa

SEQ ID NO: 57425 - DNA, 857 bp, Cannabis sativa
tcttaaatagtagcatttatttgtaaagaatctacaaggagattggatttatatagaataaggtttctactttctctattttgaagccaagttaagtaaaaatgaagtttaaataattatttaccatttataaaaaaaaaaaaaaattatgtatgtaataaaatatttaaattttatttttaataatttaattttttaaaaaaatttacatgtaatactaaccttctcaattaaaatttacttatttattgtataactaaataaataacgttctagcaattatttaacaatactcatctattgtcagtcattataatataagttttgacttttttttaataatttaaactttgactttaaactaaagaactggagattaaaaaataaataaagaacctacatttatagtttggtaaattaaaaacctaacttacagcactcataacaagtagaatatatattttttgataagtagtgaggtagaatatttttttgataaattaattcatatatcatatgacattatgacctaaaatacatataccctgttgcaaagcaaaatttttaactaattgtagttaacgtataatattgtgagagaaatatttttcaaccaatttttattcatttctctctctccatatttcacattacacacataaatatgtgtaaataaatgttttatttataaaaaatattaaatatatagaaaaaaaaatagaaaaattaatttataatataatgtaaatgtaggaagtaaaataaaaaaaaaaaatagtgagatatttaaaaagatagagtagagaaacttatgaaagtgcttctattaattagaaccaccccaccaataaaaaaaa

SEQ ID NO: 57426 - DNA, 1523 bp, Cannabis sativa
  modified_base (453)..(453): a, c, t, g, unknown or other
ctctctctctctctcttcctcttatctctctctcttcttttaacttaaaaaaatattttcaggcacatcgttaagtttaagaaaagtatgatgatacatacactctttgatgtaagaattatatatgtatatataaatattatttttttggttatttttaaaatctcataaaccattgaattactataccaattatatttattactttagtttctacaaagaaactaaagtttactaaaaatatatcttaagtcatattaaaaataaaataacataatataactttaaaataccataatgtaattgatgacttagatgcgtgtacaaatttaactaaaatattatatgaattcttttactttagaggaaattatagcaaataattccaaattataaaattatattagtgaatgtctttattttacaattgagtctttttcatttttacacttnaaaacagtttttttttttttgcattttatttgcatttttacgaaattctacatagaaatccatattgcaatagcgctgcaacccaaattgcaacaaaaaatcgtatagaaaaccctattgcaattaccgctgcaaccactttaaaaaaccaaaccataaatttgaaaaaaataaaaaaagttaaaaaaaatagtatatggggtaattcccctttaaaagttatagagaaatatcttttttagattatttattatttatattattttttcccacataaaaaaatcaataattgtttttcatatttttttttaaattaaaaacaaattacttaaaatttatgatatatctattagttttgttaaaacttttttatttgaaaattaagttgatttttttaaattttttatgagttgttgtaggttgttggtatatagattttgttgtacaatgttttgttgtatggtatattgttattcttagatgatatttattttttattttactatgtataatagtagtatatagttttgttagcataatacaaatattttaatatatgtacataattaaactggcatgctacatatatttaactattatttttatatattttaattatatgatatatcatttattttaaataatatttaattattttctattttattatctacaatagtggtgtataatttaattgtcatggtatatatattttaattgtggtatataatttggttaatatagtatatacatatatatactagtaatatataatatttttattattattgttgttagtatttatatatatattttggtgaatggtatatgtattttttgttacatggtatatcatttttttaaataatatttaaaatctattttctattgtatttttgttgacatgatatataattttattagcatcttatatattttattttgatttgttgttattatatatatttctattgtaaggtatatattttttattatatggtatttaaattttattgtatagtatatcgttttatttaagatcacgcacgtttaatttttattttattttt

SEQ ID NO: 57427 - DNA, 1507 bp, Cannabis sativa
  modified_base (1204)..(1206): a, c, t, g, unknown or other
aacaacaacaacaacaataacaataataataataataatattttagtttactttcagttatgttactagctaagagaaatgacgctgagtatgtatatatacattgtctttttttttcttcatggataaaaaaatcaaggagtatatataaagaattaacggctgcctatctatatagctatacaaataattaaaaaagaaaagttattaaatcaagctatacaaactaataattttcatcaaatttattaatcatctgaatattttaataactatttttatggtagtcctgatgataatgactatgcatgcatgcattcaaacacataatatatttaatatataaacgatattctcattaatatttgaaaacgaatgaatccaaattttatctataataatcaaatagagaatcagcttgtgtagagataaaggaataataaataaaatgttaggtgttccatttgtatatagtacttcttttcaatttaattaaatgaataattaataagctaaaacgtctacatcacatataatatagtatataaacttatgagatatgagatatatacatttatatattactaatgagaaattagtttaatcattatgatattcaagccatgtgcacatgattttgttgggttaaggaccccaaaatatatattattatatttagatatatacatcaatttttttttttttttttgaataaagatatatacatcaaaattaagatataatcacttttgaaaacgaattatcaaatttatttcccacccacctacaatagaaaatctttagaaaaaaccccacttagtttttcaagccccatactttgtttcatcaaattgaaagcaaaatatactttatatacatgaaaaaaaaaattattagatagtgtttattatttttattagtattttcgatatatatatatataaaaaatattgttattgggatttttctagctagataatttaagttgttgaaattttgattaacgagtacgataaactgtttcaataataaatttgggggtaaatcctattttggatcctgtgttttgcaaaagttactaattggactctttattttgttaaatgataaaatggaccctatattttccaatatggtaaaaataggaccctgagctcaattttcaataatattatttttttatataactaactttaagacaatnnntaacacgaacagatacaaaaaaaatagaactagttttatcataacatctctagattagattattgttaagttttattttgacaaaagaacagttcagggtcctatttgtacaattttagaaaatacagtatccattttgtcatttaataaaacagagggtccaatttataatttttgcaaaaaatagggttcaaaatggtatttaccctaaagttggtatttttaattattctaaaaggtaaatattattttggaccctgagttttgcaaaagttatagattggaccctctattttgttaa

SEQ ID NO: 57428 - DNA, 974 bp, Cannabis sativa
aaggaggacctctaagatcgctcataagatctatgtttattcatgtggagatgaaaaaaaagggtcaatggagcaacaaaaaacatacaaaattaattgtatgtataaaccgactcaaaccaccattcacaagagatgatactcaccttcaaagaacacttgtgaggatctcccatagcaggctacggggttcccctggtttggattggtcggaaactcctcagccttggaatccatcatttccggttccaattgaggctcaaagttcttgggaacgaatgtaaaatggttgatgcatcctggtattatgagtttggaatggtgaacttctgaactcagaagggacattctattaagaaagagatgatcaattgtgaaaatggatctcaataaaaagccagaggtttgtgaaaaatgacaagcttgagccatccttttatacacaaagtctggtgacaagaaagttagggaaatctaacggttggaggtcaaaatatgaagggacaactcataatgatatcaaaactttacaaccaccagaatcaatggacgcattttttccaagaagggattttgacagaaatgtactctgtaattattaaaaagcacttttttctaaagaagaactttttaaggggaaattattatacttaaaattcggttgacatctcagtggaggacacgtgtcaagataaagggaatatggatctgtacaatcactttttatggaataactcattaattacgtaagtatcagagtatatttataacatggagactgtaaggtcttaggtgagaaactaatatacaaactggtacttagtatattagcgagaaactatatgtcgctgaatgcaaattgcgaggcctcaaggacagtacacattggaagacgaaaacgacatatatcaattgtgaaagtccttagtgtacaaactaagtgttacagacggatcgactcaagaccaagtaag

SEQ ID NO: 57429 - DNA, 1602 bp, Cannabis sativa
tcccaattgtcttgatagaagctacttgagaaaccatcaggaccaggggatttagtgccaggaatactaaaagcagctttcttcacttcttcatgtgtgaacttctgagttagggcatttgcaagtttcggagttagcacaggtcctctagccaaaactcttgcctcaactttcattcgattttctaacttggaacccagtaatcctttgtaaaattcaaggaaagcttctgtaatctgatccgggtcatgtactctgcttccatcttgcctttcaatagataggatacgattgtgcctcagtctctgcttaatgcaagcatgaaaaagacctgaattacaatccccttgctgaatccattctgctttagctttctgttgtaagaatgacatgtagtctccttgcaccttggtgagcttttctctaagttctctttcttgtaggtgaagcttagaatcaagaggctgtttgtgtatttgactctgaagaagatctaagttctgcttaatttgaatgacagcactttgcaaatcagaaaaaccatctttattaatctccttgagtctcactttaaattgcttcaatttagtcactacttgaaacattttggatcccctttcatgttgcttccacacatctttcaagctagtatcatacttaggatgagatttccacatcctaatgtacttaaaaggtttctttccactcaccacattaggataaattgataaaatacccggagtatgatcaaaaagacgttcattgagaaagacagcttcagcaaactcatatttgttaatccatgtttgattgcccatgatccgatctatctttgaaaaaattttgtcatgcccatgctgcttgtttgtccaagtgaagaaattcccacttgatttgacatcttccaattgacaatggttaacacattgaaggaactcagtgtcaggataagtcttggtcctaataccaatcctttcatctttagccaaaatgaaattgaagtcccccattacaacccaattaccacctgttctcaaatcacacagatctttccataaaattttccttgtagctcgatcattagcagcatataccacggtaacaaaactgtcaaacccttctacagttgtcatccttaaatgcattaattgactagtgcatttaagaatgtcaactgtaaatctccaacggttccaagctatgactatcttcccacccgcatgtcacgctatattagtagagaaacaccaatttgcaaacacatttgagtataaggttccaaattttggagccttaactcttgtttcgagaagaccaacgaaatcaacttttttgaatattgacaaattactttatcagctgttgtttatgttggctgttggtccctcgaacgttccagcaaagtaacttatccattagacagagagggtgctcccccctctcctgtcttgactatctcagtaggcatattctcctctgcattttctataatttcatcctcttcaagtccctggaatgagttcttcattatcaccccattagtttcatttgtttaagttgttccttgctcacgggtaacagtatttttcctgctatgaactt

SEQ ID NO: 57430 - DNA, 1427 bp, Cannabis sativa
  modified_base (50)..(55): a, c, t, g, unknown or other
gccagtagagatcttatttttctcatccatattttgtagtcacctgatcnnnnnnacttatcaacatcaactttaaaacgactcatattgtatttgttaaaaatcaaatttaataaaggtttagaatgttctccaaatctccaatatctaattcctcttgatttccatccttgtgttcttgaagatcaaattcttcttgttcttgattttcaatatctttcaaccttgccttttgaatgtattattttgaatctctttgcggaaataatttggctctgataccactgttggaaatttgttttgaccaacacacttaaagaagcaaaattaatactatgcaaattggtatttttcaaaatttattattttatgcgtccacaaaataattggtattattaaaaataacaattttaacctttgtttaagcccaatgttaaaagcccaacaagaacaatgtcaacaagagtcaaaagactcttctcactaaagaggttcagcccacaaaagcttcagcccaagagaagctttctctctccaatcaacactttgcaccctttgttattctatctcttcggtcagagaaagagtcaaacaatgactcttaattccctcaataagagaagcagcccacctagataaaaccctaagaaactcaatataaaaggtatcttttctaaccctaatattcactatctacggaagccacaatattccttcaccaaaaattcaaactttttcaaatatcttctctctttctctcaaacggcagcagctagggttctagggttctaaatgtttttcttttctcttcttcttcttttctttacactaacaactagggttttatgggattctaatttcttcaagcttcttcttcacagccacacctaatattaggatttctttaagctctcttattttctcttttaatggcagcaataaaattgggtgttctagggttatagatttttttacttcttttcttttctctcttctactgaatataggtcagggttcaaatgggtatttttattttctttttttcttctaaatggcagtagcaaaaatggtcttctatggttttctaggttttattttcttactcctctttagttctacccgaaacactaaacccaaaaaactctcttcaactttcggccaaatcactacacacccgaaaatagcaagaatacacaatacacacacaaatacaaatataaacaatatagggattaagatgagagatacaaaccgaaatggtaaagatgaagacaccaaatttgatctcggagttcgcccaaaacaaccgactatttctccgtcaggccctcagcttgattccattaatcatcaaataacaggttgcactcttgatttacaactgtatgtatttctctctgtttttctctctttggatactaacaaaa

SEQ ID NO: 57431 - DNA, 1723 bp, Cannabis sativa
atagatatagatatagatatagtatctgtgtactgagattattccgagatcaaattgcgaggagtacaatgcccgaccacatgccagaaagtttcatgatggcaaatgtttgggtagcaacagggaggattataattagggtctcctgaatgacattctgcaccgacttgcgaaatacattgagaaacaggagtacaagtaccactgaatccaaaacctgcacaataaagtccttcacaacaccttttgccttcaactaaagcacaatattcagtaggtatgtaacacctatttggagttggattattattattattcagcataaaaacattggctacatccattcgaccaaggcacccaacaaccatagtgatcacaagaattattataattgaaatagttgatgaggacttcatcatcatattataagaaataagagaaagaaagagataataatataatgtgtgtaagagaaagagagagtagtgtggaagtgaagagacaccacaggtcttacttttataaccctaaaattaattattcgtatatgaaaaaagagcattgttattgggtacctgtagtgcctaaaacctcttgatttgtcgccttgcgattgtctagcgatactttttaaaagttattacattaaactatatgggagacccgatatttaattggagcaatagcaatattgatacataaaatggtattaggtattattggtgactttcagtatttcacatgaaaaaaggcctacatccattcgaccaagatacccacccaacaaccatagtcactagaattattagtcaatttatttagtatgaaatgatcctatgttatctattgaggttttattatgtgtgtgaaaaagttgaactgtcccactttttctttttggtaaatttgaactacgtttgattcaactagttatatacttatggttaagtctagtttttttcttttaaggaaaaagtgttattattataaaggatattgctagtcaattataaggcagatacatctagaaagtattagacacaattagtacccaataacaatactcgtatccacgggcaagaagaattggtctagcttaggtctattaataaaatccttaaccaacgtgccctcactcgaccttagttttatgtcatgtttattaggtagtttttattaagtttttttattgtttagtgagttattatgttttgtttgtattttgtttgcatcttttagttttcaaaaaaaaaaaaaaaaaggaatgaacaaattaataatgaaaattgatggaaatgatgataaaaaaatttactttctggtgttgatttcgttaaaagatgaatcctcaattaatttaaagactgttgaatttttgggtataaaaatatgaaaattgagaaagtttttaaggtccacttgattaaggttgaaatttgtacattttaaacttttaattatatatataaaattaatataaatggaatattttatagttataatagtaaatttactttttcttataaatatttatttagtactctaattttttgttattttttttttaaaaaaaaattatctcatatacaatttttttaattgttttaatgtagattttgttgcgatttagctatgtgacttgttgatgaataccattttggactctgtgttttgtaaaagttaccaattggaacttctgttttgttaaacgacaaaatggatc

SEQ ID NO: 57432 - DNA, 1231 bp, Cannabis sativa
aaaaaaaataaaaaaattgggccttaaaaaattgggggccttgtgcaatggcccaagctgcccaatgcttgggccggccctgctcatggggatgggctccgcggggacccacccctaatggggcggtgactccccgcctaaatggggaacggggcggggacgaggattattttttgtcctcgaatgttaaacgagacgggaacggagatcacactccccgcaccgacggggacccgtttagtattttatctaatatttctaatacaattttataatttataatttatgtttgtattttgtttagtatattattatgttttttgtgaattttaagttatgttttgtataataattagtttattgaataataattaatgtgtaacattttaatttgtatgttgtttaatatttttgcatattaaattttttattataaactttatttttttattagaggattctccgccccgtctctgtccccattaagggattttccgccccatccctcatagaaaataaacgagaatggggattaaaattcttaacgggaatgaggacatgaaacactccccgtcaattccttgccccgtgtgcatccctacctcccatcaaacacatttttttaataactatagcagaacgattgaaagatttttactgctgttacccacagatttattttattattcttttaaaaaacaatggaagaaagtcacgtttaaagagagggttaaatatgttgggttatatatgttgacaaaaaaaagtgagggttatattagaagtgtaacgcataatctacagcaattgcatgcctgccatattttaattttgcaggtgtaactccattttttttttgggtcagtaatcattagattcattacttattattatcccctttcaagaaaaaaagaaatcattactaattattattattataaatatataaattggaaaaaaaatctatggtactcgtgagttgtttttttaatttaattttcttttatgattatttatatagtaattttttaagattatttttaaatttctattttttttaataatttatagtgtaaaaaataaaattgaaaaagttgcaccacatatattaaaaaaataattacacgtgtaataaaatatttaaattttaattttaatattataaattatttaaaaaataattctaaataaaataactacaatatgtataattataaaaaaaaagtaaaaa

SEQ ID NO: 57433 - DNA, 894 bp, Cannabis sativa
ttagggcataaaacctaacactgtcttacctgatgtcccaagtacgtagagattccaaatccccggatgctccctgtacaagtgtcggtaatcctagtcacaattcccatgattcacaaatagggttaattcctaaatccactttcacataatcatataattggcattcaaatacaaataaacatacagacctcggaacaagcatttcaacgatattcggaacaccccaaacggagttcagatcaaaaagttatgaacaaccaaagttcaacatgtaatctgcccaaaactacccaggcaggccgcgacactcaccaagcatgtcgcggtttctaggtagaaaaacccaaaattcacgcgagcaggccgcggtacccccttgagcgtgccgcgacacgtgggttgaaaatccagaaatgccaattcagttcatatgaatttcaaggccaaaatacagcaaactcctaccaaatcatgctcaactcaaatagatattttccaattataaccatcaataacagaggctaagaaaaatagaatcaagcttaaattaacatcaatatatgcaatttaattcaagctcctcaagcaaaaaaactagcaacaactttaaaccaaaatcaacatcatccacccactgcacaagcttcaacacaaaacttttaggcaacataaaaacccagaaaaatatcgaagtatatattcaagaactaaatcacaattttaactccaaaaaattcacccaacaagtctagatgcatatcacaaaaatccacaagcctaagcaacatggtgataactctaagatttagaattattttgatatctttaaacttgaattttaagctaaataatagagtaattagtgtctatattatgtaattgtgtttagtt

SEQ ID NO: 57434 - DNA, 1296 bp, Cannabis sativa
atgcaacataaaatgagatttttgatctttattaattagtaaatctgattatattaaaataggttttatttagggcacaaaacccaacacttacttctctagtaattccggtttagcgagattagattttattactagttgtcgtagcgtgcataattgttagggcgttacataagcaatgccataggtggacacgtgtctgtaaatgagtgcacctatggcgtcggttattcgctaataaacgacgacatagggttaaaaacaccaaacgggtattgccacaccctttaccttcccttttttttaaaaaaatgggttaagaaaacagtctctaaatgcccatattgtagtagtgatgtcacacaaacaagactaaaagactcaaaactatatcatagaaataatactaaaacattcaaaactatatcacagagacaaaactaattgcagtagcaaaaatcgaattacagtagtaaaacgcaacacgactaagttgtaccatagccctgagaaggccaacgggttggttagagaaaaaaaaataatctcggataaatgtaaaaacgagaaatctgaatctttttcctcacttattccttcagtaaaaacaggatattgtatggtagaatatctatttgttttagtttattggttacaatcatataaatggtttataaactataatataaaacagtcggatagaatattccacatatacaatatctaaagtactacttatatgttaataaattactgaagaaaaaaaagctagtggaaaatgaacatgatcacatggcagtcaaagaatggcaccctacaagataagcaatttagttattgatctaaagaaacaaatttttataaaataattaatctgaaagtataatttcccatttgtaagataaattaactagaggaaaatgctccagcaagcccctagtactaatgccaaaaaagaaaaaggtgttttatttatataataagaaaaagtagaaaaagtcactcattatagtttataatacaaaagttgggttatttttcacatccaaaatgatcatattaagggtactagagtcgcaataattaaaaatatatatatagttgcactcttaatgataaattattttgagtttttaagattaaattttcgaatttttttttatttttacattatatggattgagattggtccattaattaaaaaaaaataattaaaaaaaagtttttcggcgaaaacaataataaaaaaaaattgaatttgacttaaatatttttttatatgaacatatttttaat

SEQ ID NO: 57435 - DNA, 1187 bp, Cannabis sativa
ttaaaggttaggtttcacatgcaatttttgggtttgggtttttgtatgaactgagtattaggggttgttttcttgagttaatgtattgttgtttaagttgttatatgttggttttgatggttgtatctatgattgaccaaggtttgagctttcaaactcaaacttggtcctataatggtggatttgttattaggggcttatggttgctgtttagtgttggattatgtttcttggacccaaaatacgggtttcggagccttgtagaagatttgggatagttttggggttaaaatgggatttttggaaaatttgtagtagaaaacgatagactattttttcgtaaacgatcttccgttttctctggcagtgtcccagaaaaatagctaaccagttttaggaaaacggcctaccattttttgggatttttcccaaagccttgtttttggtgttttctcgatatttagggtattactacgctatttatcgatagagaaacttttagttttgagtataagtcccagaaaagtgatttagcaggtctcttaccaaattatgtaaattgtgatttagggcgttaaatcatcaagtagctatttccactctggttgacctgaacacttacattcaaaactgagttaagattagtataatgatatgcatgcttacatgtttagcgtacatgttttttgattgcctagtagataacatatcagtaagaggagtagtaatgtacatagagttgcagtgaataccaatgggtatatgtttgtgaaagtacgaattgatgatattacatcagtaagattagagtaccgagtataggatgatattatggtcaatcgtaatatcgtacgaacattcaaaacctagtacacattagacgtgggatagggatgcggttaggtgtatgggcgcatggtcacgatctagttatatgtttatgcttatgtttattttttcttactgagtctctcgactcacaattattgtttatatttgtaggtaaaggtaaggcaaaggttgaacagtagtgaggtcaggctagatgaagattgcatatcgaggcaattaaacctagaatgttcaaatcttcaggacaattgggctttattttgttagttgctaggtgaaaacttttgtagtgcttatatttaaaaaaaaaataaatttttaaacaagatctcgaa

SEQ ID NO: 57436 - DNA, 668 bp, Cannabis sativa
gttcaacccatacagtgtacttttaagcaagcaaagcagatctgttttaccattttccacgtaaaaactaggtcgttgctccctaaaaatctcttcatttagaaaaatatttaagaaagcagttttgacatctaacttctcaacctccaagtcattgtgtgcagcaatggctagcatcattcttatggttttgtatttcacaataggagagaaaatgtcagtgtaacctaccccctaaacctgtgtgaaccccttagctactaatctacctttgcatctaggtggctcacccgctgccattccctctttctccttgaacaaccatctgcaggagaaaattttcttgtattgaggcctgggaaccaaaatccaagttttcttctgcttcaaggattgcatctcttctcccgtagaaccaagccacttcttccttgatttagtagctatggcttcttcataggtagttggttctggatcactctcaaactgaaccacaactaaggcataagctatcaaatcagcttcagcatacctgttacggggttttatctctctcctagtcctgtctcttgccaatttgtagttggtcaaatcaggttgattatgttaaccagtttctagagtttccacttctgaagtgtctgcatcatgttcttctacagtaccct

SEQ ID NO: 57437 - DNA, 1149 bp, Cannabis sativa
agccgagatggtcattgatctttttgaggaacaaactgttgtggaccctcccatctcaaaaatgactaagtccaaggattctcgaggaggtagctctgacagaccagagcaggtgaagggcagatccgagctggtcaaaagcaggtcttaatagattgctgctccacctccaatattgcacccagtgaccaaaagaggcagagaaatgctcactcactatgtgactcggtcggtccctgaggtgaacaagcagctggctagggggggcaacgacctttctctagagctggtggtgggaggagtcctgaaaaagctttcgagggtaagtcttttctgacagtttctttttttgtccttcttcaattactttagattttaatgtttttccctgtacagaccggtttgaagatggcttatgcttattcccgagctaagtcggctgctgctaagaacgttgccatttccaacacaatgcggacggaagtggacttggccaagaaggacgccgaggaggccatggttcaacttgaggctgtccggatagctgggagaagtcaatatgaaacttcttgctgctaagaacaaggtggccgaactgaccaaggatctacaagccatgccatccaccgaacagcttgaagccgatattgcttatttatccaaggaagtgaccagccttcaagaagaaagagaggttctccgaactctttccgcaagttgaaagaaagaagaaagccaaggaggaggagcttagagccgaggttgagaagtataagtcagaggctgggaaggagaaatccaaagtggagaggctcggagggaaagtgaatgccttagagacagcgtcttgaagatttttatatgacttctagaaggccaatcccaaggaaaattgtgattacttgagtaattccaaagacatgtttctcgactactgcgctgctcaggcggcctacggggaatccaaggcgaccacttccacctctcccactgatcaaagtgttgaagtgcctcctgctcagaaaaatgatcctctagctccaactgacctagttgacccgtacaaagagcctgggactccagctatttgaatgcttcctttttctatcctttttttttatttgttcggccataaggccttttttaaga

SEQ ID NO: 57438 - DNA, 2236 bp, Cannabis sativa
tggtaataaataaaagatttggacatcgacataattattaatatttataacaagtatttagtaatataaattaaatgatcatttataattgttatcttcttataaggattaaaatttgatgaccacttaaattatgaatattatatatttgtgaaatccaagcgcatttcttcatctgagtttacttgttaaagagcaatgcccacatttattatacatcattgttatataagtgtgtgcaattatattaatctaatattcaatcacaaagacactaaagagtactcgaggtcgagcagttacattttttaccgttaaaaaagactagtttgtagtgtaagacaagaccaaataccaaggtaacttagttggcatatgggccccacttaccgcttcgccaaatcattcaaaacggctagttttccatttatcgatcctataaatacataaatactcgaatcctcaaaatgcgaaacagcattgcagaccttcaaaatcaaagcatcaatctcaatcttcactctttattgataaatttttattttttagcatttctcaatctcaatcttacatttttgtccttcaaaatcaaaatcaaatcaaacaattatggctgctgggttttcaagatcatcttcatcttcatctctgattctactcttctctcttcttttcaccatatcagaagctaaagaaatattagttggaggcaattccgattcatggtcaattccaacttccaatgaaacccaactcaatcaatgggctggtaaaaaccgtttccgcataggagacactcttggtaatttcccaattctctatctctctctctctctctgattttttcctatttcgatctcgcgtttgattaattaataattacttttttatatgtattttttcagtgtggaactatgatggtgagaaggattcagtgctggaagtgagcaaggaggattacgaggcttgtattactggaagagccattaaagagcacaaagatgggaacactaaggtgagtttggacagagcagggccattctacttcattagcggggccaaaggacattgtcagaagggacagaagctgatcgtggttgtgctgtcaccaaggcgaagcagattctttggtatttctccggctccttctccgggtgatatcgatggtccggcagttgctccgaccagcgccgccacttccagcttcagaagaagtggtcttgttgttgtggcatttggagtgttagccttgtatttattgttttgagctagctagtattaataatgttagtttttgtttcaatcattttattattatttatttgattcattgcatgctatctttggcatctaaaattctgtaatccaattaattaatattgttaaaagattacatgttattattcatttttgttgctgttaattacaattaagagaattatatgcgcttagctactttgttagttaaagggcaaaataaactaaatcaaaagttagagatcaaatcataccaataacaaatgttaggaggcaaatcaactaattattctttgttcttatttactttagcattaatttccgttggagattgattttcttgtcaaatactcttacacttacattctattcttctaaatcaaatatgaccttataaggttccaaaagaaaatcattacaccaattaccagcaatctaaaagaccacatttgagagaaaactcaaaaacaagcatgaccccaaggctatacagaaacaatcaacagatttaccacttaagctagacaattaaaatcagatacgaactaaaccaaaacaaacagataagtatcgtttatcactgttgctcctcctcattgaggaattgtggtggcattcccaaaccttgggcaagattgttcattctgtccttcgtggcctgtgagatgaaacgcaagtacaacacgtatcaatcaagaagcaaagaagaggccccaaaaagcagaatactaatctttacctgaacgctcttctggtgggcattcttgtatgcttcagtaaccaaaagagagagtttctgccatattgaaacaacacatgtaaacacaaaaatgcataatctcttcttaaacaaaaacagcaacagccttgattacacatgaagatatatatatatatatatatatatatatgtatttatggtatttatggctagaaaaagaggtcacaaagattatatatgacactaaataataaactc

SEQ ID NO: 57439 - DNA, 768 bp, Cannabis sativa
gttccaagatatagatacgctatgcattatccatcgttctaatctaaataatcaaagattctctataaatgatttacaccaagtaaggacaaatttctttattaacagaaattgtatattaaaccataaacatgaataatacatgttaacataaatgacttctaatattctattgataacaaataagattatattgaaatgaattttatttaggacataaaatcctaacaaatgatctagtattggagttcatgagaagtttgtaactggttctaatattagtattgtgttggtattagttttagtaatgcattgataattatgtttttgaacatacaaaaacaatgtaaaatttatatgagctttagtatttgtatagctcgatttttcattaaaaaatagttttgatttaatgaaatatattattttcttaatttattgcattagcaaaattatattactattattttagcttttgtaggtttttttttttaataagcttttatagttacaatgcttttgtaaatagatggttatttatatgaaaatagtagtaaatgaccatttatctcttttaactgaagcttaatgtccctttttaaaaatcatataacaaaggactttattattttttagtacctaaaatacccttagttatataagggtattattaacattatatttattctccaaataaaaatagaaactctgctccaaaatctaaatgacaaaagcctctctcgtcttattttttccagttagtttgga

SEQ ID NO: 57440 - DNA, 795 bp, Cannabis sativa
ggcttgaagcggggacgttataattttaacgcttgatttgttaatatggttactaggtgttgaactggtttaatggagaaggcggtgatggtggtttgggctatttgaggggcttagaatgatcttttatggcgccaacatgtcgttcagctgctgatgtggttctcaaggcacatattgttcttgatcaatggaaacacgctcaagctcgtaaatttgagtcacttctagttccctctagaactgttcaatgtgagaagcgatggactaaacctgctaataatatgatcaagataaatgttagtggagctatttttgcagcagaaaaagcgtttggttatggcattttggttcaagatcatcatggtggagatttagaagcttttgctatgtttttggctagttttgtgcaactagaggcagcaaagattattgggattaaagagtcgttgagttggatgaaaggaaagacttggtctaatgttgtagttgaaactaattgctttgttgttattcaagctttacaaagtgcagtttgtatgccttctacttttagtttgtttgttttagactacaaaaagttatcatcttctcttcttaatgttcatgtttgttttgctaaatgatttgcaaaaagagcagcacattgtctcgcacgtggttctcgttcttagtcagattgtccttttactgctagcagtttgcctgtgcctatgtaatcttttgttacagccaatttgattgtttaatgaaattattttaataattatgaaattaaaataggtggttaaacaa

SEQ ID NO: 57441 - DNA, 830 bp, Cannabis sativa
ttttttttttgaaagaaagggagcccgctagaaagaaagatactcaataagattacaggggtcatctccaatccaaatggctacttcatctaaccctagagctcggtgcgcaagattatcagccagggtgttagcctcgcggcggacgtgagacagccgagcagcagggaactgagacaaagtattcttgatttgacgaataaggtcaccaaacacagaaatgtcttctttatggcgagagaaagcatcagtaatggctttgcaatccgtttccacctcatggacaaaaaaatgctctgtaaggcaccaatgaagcatagagaggagggattttgcttccagggtagggaccgatcctcctccgaagtgtggatgggccagggcaacgaccaccaaaccttcgctgtttctaatgatacctccgaaacccgctttccggttgaccttggaaactgctgcatccacatttagcttgagaagacctgcagctgggggggaccaagacggttgaaccactatctgaccaaggcgggaggaaggcgcaatagtctgctgagaggattggtagtcttccaggaagctttgagccaagttgaggattgcatgatcagggtcgggagcttgacctttgagggctttgttcctattgaaccaaacaaaccaagcagtacaaagaaacaactcgacatcttttttggttagagatttatatatcatatcagcaatgtcgtggaacaaaatctcagaagaatgagtaaaaatgtaatgataaaattgcgtacctttccagactcttctaatgctccggcagtagaataatgcatgtgaga

SEQ ID NO: 57442 - DNA, 1337 bp, Cannabis sativa
  modified_base (113)..(114): a, c, t, g, unknown or other
  modified_base (1268)..(1268): a, c, t, g, unknown or other
gtcttctccgggaggcatgtcccaaatgctgccttattacataaagacttagcaaaaaattcaaatgttaagctgtttgatccacgtgtccttgtccggttggtccacgtatnntgggcaaaatcaggggcaacaaccctctttctttgcatttcttctcacaacatggaaccaactgcaagtcccgattgtaaggccacaagttttgtatcattcatcactttagtctttgctgtcgcctcgatcatatgctggataaagtttttcaagctctctcccacctgtttcttgacattagtgatggatcctatttccatgtcataatcacaggcaacaataaactatttccccagtccttaacaaatttggtaagggccagggagaagcacaaacacttggcgtcatcactgactcttgtcaccttcgtcatcttgttgtacttggctaattgagttctaggatcagtgcacccatcgtacaatagaatttggggtttcttgaagttctttgagagtgaagcttccgtgatccttcttactcagggctccgggtcctcattctcagagtcagtgagggccctactttgtttccagaccaattttgtcaacgcagcaatttggtcttctaacttttttgtgtcactgtctgggagatctcttccacgacctcgccttcttgcgttttactttcttgtacttggcatctaaacgccttctgagatccactgtggacaaactttcgttgaagtactgtccccctgtcccaccttcctcataactgaatcactagggcagtttttccttcccttgggccttggtactttcgtaccgttccttttggtgctacatggccattctaggtgaagggcgttcgagcccaaaggcgtctgtcacattttgcgcctaagaaggcatgttggtggttcgtgtttttctgaggatgtatgagagcattaaggttcttaggatcacctacctttgccttccccttgtcttacacaagagtagaggttccactgttggttgggttttccattgtattttctctgacgcattccactgagggatcattgtcagaatccccctcatctagatctttgaacatggcttgaaggcgagccatcattttctccatcctatgagaaaacttctattgggatagcttttgcttggtctcaagcaactcattagacactcaaaccattacagggtcttgtttgcaatggtagccatctttgacgtacttgttggggattattttaccagganctagatttactaccatgtatgttcactactacaaattacactatttacgtcggtcaacgctactattca

SEQ ID NO: 57443 - DNA, 1550 bp, Cannabis sativa
  modified_base (915)..(915): a, c, t, g, unknown or other
accaatggatcgatcgatatcgatgtgaggtgaggatgatacctcacgtttttctcatcttcctccgtgaatataatgggaggttcttcggtcttcaccttcttggaagtaactggggcgaatgccgactgctcgttctttatctctttcacatatcttttctgggcattattaatttcccctgccatatgtggccctttggaaataaccaggatgtcctctccttcaacaggaagaggttgtaacccttggttgtttgggttattgggcagactgggctggttgtatccatggccctgtcttttcacgtactgtttaaaatgacctctagcaatgagactttctatctcatctttcaattggcgacattcttcggtcatatgcccaatatccttatggaatttacaatacctattaggatctcttttgctcctcgcattcctcatgggctcaggcttgccgaaggcaaccttttgctcatgtgcaaggtaaatactctctcgagtttcattaagctcagtgtaaatggtatacactggcacgtacttatcatgcttcttttgtttctttttatccttcaacggttccttagtaccatcctttctcttcgaaccttaagcccttgaaatatcaattctggtggaaacagtacttgttgagacattggtggttttcttcccgagcttgttttcaacaaattcatttcctttcgggcttcttccttccgaacgaatacctgagccctttcattgaactcagtgatgcttcttactgaacgaccttgtaagtcttcccataactcgccccctacagttatggatcagtagagatccccgcttgaagggctgttagttgtgtgatgtcatctaaattcctaaccgtagccacaaccatgctaaaatgacttaagtatgncttaagtgtctcaccgggttgctgctttatattggttagcgaggccgcttcgggtcgtctatccttagcagcctggaactttttcttgaaatccctggacaactgctcccaagaagttattgaatgatgagtaaacttgttaaaccagttgctcactgctccgacaagcgaggtggggaacaagatacagcgtaaattgtttgtcacattactcactcgcattattgggttaaaattactcaaatgcgagaccgcatcagtggttttgtcatatgacgagacatgcgggtttttgaatcctgaaggaaaaggggtattcattatatctagatgatatggctcaagcttcttgtctgagtcatatccagattgtctccttagttccccgacttaatatctcctaaacttgtcctccagctcgtttatccacaattggatgggaacctcttgctttggaccaagctgttggcgaaggtcacgtttctttcaattcaagtgctcttgcagatccggttgggagaaattgcttgcagacctggtcttactcatagatcgtgtcctactcatagactttgtctttgagtgactcgcggatttactggttcccatactttctcaatcattagctcattgag

SEQ ID NO: 57444 - DNA, 1277 bp, Cannabis sativa
gtggcaaacaagattcaaaaagggaacgaaaaaaactcatacaaaagaggccctgaaaaataatcagaaatctaaataagattgactcgtagactatgcagaattttaactgcaaaacaacgtaaaaaaaccctgtgttcatacttttacttttatagctttcattttttctgcgtgaaaatgttactgtgaggctcaaatttgattaacgaaaatctgcattaacagttagaatttgttctccaattttctagggcttgtttgatgtacagttaattagtatagacaaatacatcataatgttgttgactaaataaaagagagaaattaatgttgtatttaactaagggtatcaccaataggactagtaactatatcaaggttgccttgtgaacctattattatcttagaaccaatgaaactaaagaaaaagtgaagttggcaccgttgtcactaccaagcaacgatgcttctctcttctcttacaatattttgtgccacctcacactagatcctaccatgctagtgcaaatgcaacttccattaaaatttctctaagcatcactataagtttatttttagtcataataaaacttatgactataaaagtaaaaaaattgtaactaattataaatttatcattcccacattatataaaaaaaaaatggctaaatgtagtcacaaaaatcacaacttgttgtgactaaatatgtttttagtcacaataagtattgtgactaaaactaaactagtgataacttgtatttaaatattatattttagtcacacgtaactttttgttgtagctaaaagttaaaattaattataaaaaatttatgttgttactaaaaagttatcaaggtagcttttttttagtgtatgctaatttaaaatatatacaaatttttatattatattttttgtaatttttgcaatttatttccttacaaatttattaaatagatcgacccttttaattttgtttttttcttacattttactacctcacaattattttatgatcactataaaattaatgtttactatataaattaattaggaaacaaattgcattttgcatgcagttatattttatttagtgatgattaatttataaactacatcgaattttaaattgggaaattttaaaaaatacaattttttgtgtgttatttataattttacaacctaaagtttttatttacaaatatacatttttaaaattttaaaattacaaaaatacactttgttctataaaaagtaagaaaagaactaaa

SEQ ID NO: 57445 - DNA, 1504 bp, Cannabis sativa
acatttcataagtccatgggattaagtttggaccttataaccgtcaattcactctccaactatatgttattgctgagctgattcttttttagtaaaagctttttgcaagaaaagcgttcatataaaaattaataaaagttgttagacccgcagtcattaaaaaaaaagttttcaaagacaggaaaccggaatacaactaaaattctggtgagtaaatgctcactatgagcaataaaattacagtctctactaatattattgtaaatacaactggtcaaatatgctttgctcactttgggtttctagtggcagaaaggctaacctgagttttagtaataactggtcagtaatgcttaaagcactaaagtagggctgtacatcgattttacggcgtaaaaagacttttctaagaccacgagaggagactgtattcataatttctatctcttcgagtaaagtgaaccaagatcccatacacttgtgaccattttcgaaatgaaaaaatgggtattattacacaggttccagcacctagtagtttgaaaagtgatcatcattattataaaaaaattgagttcttttattttagtataaataaaattacaatgagcttttataaaatgtaaatatatatatacatatttatatttatataaggagagtctacaacgcggtacactctttctttgcagtggttcgacacactacgaactaatgattgcacgcatctttagaaaacataaacggggcttttaactaggggtggcgattcgtgttcgcaagttgtgttcgtgtcgtgtcgagacttatgtataataggtatatactcgactcgaacacgatccatttaataatcgtatcagaaaataaaacccgaacacgacccgtttataaatgagttggcacgacatgacctgtgtaacccgtttataagcatatttagtttaaacatgttaaagcaataacacgtttatgaagtattcaacacgtttataacttatttatgacatgttaaagtattaaaataactttaaataggtcattaacgggtcaattttgtgttagtcgtgtcaacttgaagatgatccatttattaaacgggtaagacgagtcaatccaaatacgacccgaatccatttgaggcaaacccaaacctgctaactctcgtgcgggtttcaagtcatgttatcttgtctgacctgtgcctacttctctccactagattcatatttctaaattaaattatttatttttaaaaataaaattaaattaaaattgtcacatcaatatgtgagttgggttagaatgtcacatgggttggattaaatgacgttaggcgatctttctaccctcttttccatcgtgtctttttcattttctaccatctctttcatagtctcctcattgattagaagcaattttttttgctcattatattctctactattgattaaagtttcaatttaaatctataaaattaaaataggattgtttttgaaactat

SEQ ID NO: 57446 - DNA, 1044 bp, Cannabis sativa
aaactaagcggtctttacatatagtatgttgttttatactattaaatattaaatgattaaaggatactatagatatataggggacttatgaagtttctcactttcatttgaggtttcacacactttatataagataaaaatcctaaggatagtaatgtaaatggacatttttgttgagatccatgtatcaatattaagactaaattgttagaaatttattaggattacgattgtatataaaatgtgtgttgggtcatcaaataaataagtcaaatttatgttgtttattttagaataaagtttataatttaagtgcatgattgtcatgatttttaatatgttgataccataaagataatttttaatttgatgaagggctaaattggaaatagtcaaaaaggattaattactattttttcagttattaataaacaagtattagtccccatttttgcatcgcttcacatatcgtatgtttattcctgagaaaaaattttgatgtaaaaattagaagatcagaccattcaaattcaattctatagactccggtatgcttctgctaatctacaattctattgtttggttatcatgaattaagtagggttaattttagatttacagtattttaacatgtggtatcagagcattcctatattaattcttgagaaatttatgtaatagtatttgttatctttaattaaattatttttcctgcatttgctaactctcaaatatatatatattttttatttagttaaatcattcaaatatatatggttatgcgattaaaatttttgtattacgttttgcgattaaaatctgattgtaaatacatgtatataagattttgttttactatatatattcaattaagtcaacttacaattaatatatatatattcaaacttgtttcatttgtttttttttttttttaaaagagcgattgaagtttgtgaaactttatcatgtatatatataaacaatcgacatatatatgataaagtttcagtatatgtcgagcccttttttttttaaaaaaaaaat

SEQ ID NO: 57447 - DNA, 1249 bp, Cannabis sativa
tcactatttttttatatttatattgtattaaatgtggctatagttttgtctaaatcttataatttaaattaaagtcattacaaatatttatcttatccttttattttctttatttataatttaaaaaaaaaaaaatttaatgatgtattttaaaaaatagagtaataaaaatgaatctttgtagttataaatatatttattatagttatatagaatatgtacttaaaatgtacatatttttataatggcatgttttctaaaagggaatcagaatcaattgtatgtgattgattccattcatttgtttattaaattttgaaatgggagaaactagtgggacccacacaaattaaagaaaaaataaaagaaaagattcttaaggaataattttttctttccttaactcactttatattaattaaaaataaaaaagacaaatatgcccttcaaaaatatataaataaaaaaataattacatgttctaacaatggtaatttagtccaattaagtcattccgattacctttcgtgattatgtaaataaaacaaaatgattctaattttctttccggtcagtttagtaaacaacaaaaataaatattatttccaattattttatattttaacccgattcatttcctacaatgattattctgattccaattataatttagtaaacatgacataaatgtattcattataattataacacatgcaaattcttttattttttttttaaaaataatttacaaagtaaaaaacgtaagccacttagactaattcaagggtgactagtaaaagaggaataaaaagtattagaaaattctacaatgcacatcttaaaagagatacatcgacgcatttctatctgttttgatatccgaaataaaatttttagtcaatttttttatggtcatgtaagttatagctatttaagacatcctgtaaaattttaaaaaattaaaaaaaaattagcacgtaaaaaaaaaaaggttcaaatattatgttgtattcgtgattattttattttatacatgtgtaaaatatgttgtttaaacattactttcaatattgtaaattattatgaatttcttaaaattttataggatatcttaaataactataacgtacacaaatatagaaattagactaaaaaattcttttggatgccgaaactggtaaacaatctatttcatatgcatgtaaaagaaaaaagtattgcgtacaagaaactatttaaccatattttt

SEQ ID NO: 57448 - DNA, 709 bp, Cannabis sativa
aagtttactaaagcggtcattacatgtaaaaacctggctacttaaggaggttatgccacaaataactcaaaatataaacataacaaaacaagtctttgaaaccagataaagacaacaaaaactaatacattaatctttaaagtttcaacctcatcatcatttctctcaaaaaaaaaaaagaacctcatcatcattatctcacatttttttcttgaaaagcctcttcaatggatgacttggtgaaacaacaacaataaaaaaaaattaaaagataaacaactataaaacaacgtgaaatcaacataatcgttaaaatatttagataaaatctcttattcataaaaaagataaaatataaatcaacaaaagtaatatcaaaataataccacgaaaatgcttaacttaaagttgaaataaaatcacatttgaatatgccctattcctttaagctagtgaacaattctcttgggtatttcaccaaacatctagcaaatgtacttttatatgtatatatataagaaatcaacttacagaataagaacaaaattttaaaatctgtgagaaaaatagaaaaatcaataataaataagcaaataaacaacaaactcttataaaaactatcaaatctaaacttttattcttgtaattttagtaaaatgggaagtagaagaagaagatcttacaaacatcaatctatatatatatatat

SEQ ID NO: 57449 - DNA, 692 bp, Cannabis sativa
gattatacaaataattaaatactcgtaacttcaataacttttaatatcaataactaagaattctaaattttttgaataatagtatgtataatacttagatgaactgttgtaatttttaaaaaataacatagaaaataataaaaaaaattgcttgttgcttctcaagcagttgggaggcagagcgagattgtttccccgaatggttcaattggcggcaatgaccaatcaagttttaaattaatttgtttaaatcattcaataataaataataattataataaaatagtatgtgactaaaaaaattataaatgaataacaaaactccacgaagaacacaattagaattattcaatcgaatctaaatagcattaatgtgtgaatttgccattttctcttcaaccaaacttggaatgaaacctagatacaataggcatagaaacaaatgtctgacaatctttactccttgtactaagatattaatatcattatttagaaaaatgattgttggatatcattactttctaacaccttatgcctcacgattggtaagcaatattacttaaaaattattttctcaagttatgtgagatcctatacttaattacattaataacagtataacatcgtgaatattagagggtattagttgtgtttcttagtcgattatgtttgttattaggcagttagtcttg

SEQ ID NO: 57450 - DNA, 1701 bp, Cannabis sativa
taattaataaataagttaaatgataactaaatagtatttacccttattttaaagtagaccgttttataaaaggtaatcaattaatatattatcgacatcataaccaactacatcattactcagtaattttgaaaaataaacttaaaggttactcaaatgtatatgaaataataaaatttttataatataacttaaaaataactaactcattattaagatgtatataaataaattttaaaaaatatatatctcaaattatatactcattagttaccattctacaatttttattagttaacgaattaatcttatttttaaaatttagaatactcatataatatatgagtgacgaaatgtatattatatcgttttaattgaatattactatgaagtatactaaataaaattatttcatatatatatatatacttgttatattatatgaagtatattaataggtttattggcatatattattatatttgattatagtttactctgtattaaaataaatattgttccaacaaatagaaactagtaagtttattgacatatataatggtaagctatatgagatgaaatgaattattattctaatatatgaaaagaaaaatataaatttatttcaatatgccaaaataaactaataaattcattagcatatacaatagtataggctataagaaaaggctactatgtaaacaaagaataaaatttttattttaatatgctaaaataaactaatcagtttcttttacatgagtataggcataatatagccatatatgccaaataaatttatgagcaaggcattttatgtgaacaaggcatttcattatattcaaatctttgacaagtgtatatattgttatccaagtttactatgtaagacatgctacagtcatgtagtttgtatacaaccagatttgattctagacttgaaaaaaatagactaattagtttgttattttataacacatattgtttaaaataaaaaatgaattgtcgttccaatatatgaaaaatagattgataaatttattggtgtatatcattatactctatattgaaaaatatgaaatattgttctaacaaacagaaactagtaggtttattgacatacataatggtaagctatatgaaatgaaatgaattgttgttctaatatatgaaaagaaaaataaaaattttgtatcaatatgccaaataaaccaatagatttattagcatatacgatggtaagctatacgataaatataaacaaagaatgaaaatttatttcaatatgccaaaataaactaataaatttatttggcatatatgagtataagcatatttgattataggatatttagtctgatcatcattttattttaaaattgataattttatcaaaagtaatcaattggtatcttatcaaaattattttattagttatgatttaaaagttatttgtaacttcattctttatttaattaatcaaaatgcatatattaatttacatttaaaaaatataagtgacttaaacatttatgatatattttttaaaaaaaaacagatgactaaaatggtagcttattagatggcaactcattattttagaaaataaatttaaaagttactcaaatatattaatataacctaaataattaattgattattaaagtgtatacatgtaagatttagagataaccaaaatgt

SEQ ID NO: 57451 - DNA, 1318 bp, Cannabis sativa
acagtagaaaaataaaaaataccgcttaacaatatttttgtaaaaaaatgacaaaaattagtataccatgtaaattacccattatttattaggaaattactttgtatactattattttaattattttttgaaaaaattaaggttttggttgctctatagtttttatatcggtttttatgtaaattttggttgcgatttaagttgttctcttatctatctgagttgatacgtggattttcataaaaatgttaaaaaaaaaaaaaaacccttatttatttcgtgaaatttgcgaactaataacgtgaaataataaaattcgcaagataccttatttaatttactctataagatcatgatggttggttgcacaatataaatctatggtcgttttgtgaatataatgatcgttttatggtcgcacagtataatttttaattatttgtgtgactatacatagttatttcatttgtcgaactaataatatgaaatattaaaatttataaaataatttcacttaatctattctatacgatgatcatgatgattgtacagtgtaaatttataattattttgtgattataatggttgttctatggtcgcatagtataattcctgatatgcgactatatatatttgctaataaaaatttacataaatgcaatttttacaacacactttcatttttttaagaaaaataaataattgtatttttatattttaacaaagaggaaaaatgtttggtgtggggtaaaaagataatagtaatgtaatggaataagaatcgtaataataattgattataatgtttggtttattattggaatgagtactgtaatcaaaatgattgtgtttagtttagtgtgacaatgtaatagaataaaaaaatatattaaccaacatattcctattacttttattttttataattattaaatatttaaataaaaggtaaattaaattttttgagtttcttttattataatactatattaattttgtaatagattctaattgaaaattatcatactattggagtgtttttagaaataagagtaccaaaaataatgtaaaagagagataaaaataaaatattatatttttaaataatgtggagatttttagcatcttaatgaatgctactattaaagatgttataatatcgatgttagtgcaactcaatatcaagtctcacttattttgaattaatttttctaaaaaaataattttgttatttattttaaaaatattattttattttacaattgtaaagaaaattaaaaccaacgaagcaacattattatttttttcattaccatta

SEQ ID NO: 57452 - DNA, 900 bp, Cannabis sativa
  modified_base (27)..(43): a, c, t, g, unknown or other
  modified_base (841)..(849): a, c, t, g, unknown or other
taggatgttaatcaaacatacttggtnnnnnnnnnnnnnnnnngtaaaataattccaacagttgttagatcttttactgtccgagcttgaatttcttgggtactgggggcattaaacagatgtttcagctgagggagcttgtaattggctcagtttatgctcgacttctgctcgctgaatggcctcttcaagcttgatgaaaccatccgcacgatcgaggaagtcactcatagaatctactagtcaatgtttcttgatgtccatccaaagctcttcgggaaccttgatgaccctagtattacggttaatttcccttcttcggttaaccgtgccactttcatcgccttcgtaatgaatctactgatataagctcagagaggctctcctggcctttgctttagttcgaccaggtcctctaaatgcaacgggagttggcaagaagaagagaattgtgcatggaattccgaggagaaagccttccaagagttgaaccttgccggtgtcaacttgaagtaccattaatgggaggcttctaagagtgtagcaggaaaaactctgcaacacacatctcctcgtaccctttgtaagtccatttgcatttcaatctatttgagatgtgataagggatcttctttcccggtatacatcttccaggttggcatcttgaacttgtggggcagctctagagcacttatctctggagtaaacgggggatccacgtgctcggtccaactcaagattattgacctcgctattagccaacaacagtgagtcttatttagtaaacgataggtaatttataccaatcgatatatggtaaagcaatgtaaagacacaagannnnnnnnnaggttcagccccgagcagttcagtaatagcttaatccttgttatttgtatt

SEQ ID NO: 57453 - DNA, 1079 bp, Cannabis sativa
tgtaacattaggtatttttaccacaaaaaataaacattaggtatttaagtgtataaaatcgaaaacattaggtatttatgccgcaatttaccctttattttatgttcacatttttttagtaaaatttcatatatttttttatttaatttttttttgtcttaatatttaaaatattttttttttattttataggtatattttttaagaatatgagaatgaagaattttatttttttttaaaaaaaaactagtacaaataaaagatatgtatttatctaaaataaaataaaataaagtgtacttataattttatggggatgcaaataaaataagaagttatatttacaccccaaataattataagtacacctcaacaaattaaatacatttttatcctttcataaaatgactaaaatagacgattctaattttattttttttatacatgaaatcgcaacttcattaaattaatattcggaatacataagagtctgaagttcagagggaaattctaaaattaagtttcttataaaatttattcttaataaatacacccaacctactaaaattcaatattttattcaaccctaaacaaatcaccaattcaagattacaattacaaaaattttatatgaatcatgaaacattaatataattgtttcatataatgatatgtatgatttttttttgagaacaatatatatgatattaatttagttgtataagagttttgattttggggatggattccccaatgataccctggagatttatcttttctgatgtggtttatgcctgtaaacttcatttaaaaaaaaaactaattattttaattttattttactgtaactctgtagttagtttgtttttttttaagattattttcttgaaaatagttggagacttgtagattttatattcgaatgataacagatcatataaaaaaaattgatactatgtttaataaataatggtaagagagatgaagattgagaaaaaaaaaataattaatgaaagggaaaaacaaaagggaaatttacatgttatactaacttttatcatttttttacaaaaatactg

SEQ ID NO: 57454 - DNA, 3322 bp, Cannabis sativa
ttttttaattctctttgagacatcatttttttaaaaaaaaaactatatatgtaatgggtacccgatatatgggaatccttctcccaacgagtaatccccgccccgcccccactttaatttaaacgggtattggagcgggtataggggtgaatttaggtatgagggtgggggaacaatcctcgcacccatcccgccccgtttacatccctacgccttaaaatgtgtgatcacttctttttaataatttttttattttgattctataaataataaattcacgttaatattaatatataaaaacttaaatttaatatataatattgttgaaataaaattgtagttgaaaaattataataaaattcaaataatctaataattaaatataaatttaatgatccttacacccatctccacaaaagaaaaaaaaaacctcctagctaacaccagatttctttaacacactgcatcaattaaaaataaaaacacaaatttggtgcatttatctaaataaatataaaaaaaatgggaccaaaaataatccttttttgtattttaatttgtatgtagattatcgatgtcttgaaaaattggtgttgatcatgaatgcttgccatttattaaatctaaatgttaaatattcttctgtaataatacctggttttacctaactaatgtcctgacagttagaagaggcagttagttgttaattagttagcttaggtgtcttttgttcattggttagtcacggtcagtgttattgttagttataatcatttgtattgttcatgtccatatatataaaaggactcgagcctcattcttgtaattaagactgtaaccagacaccttacatattcattcgaataaaatagagcattgctcattttcttatactgtgtgtgtctaagtgctttgattgagggtgtcatcttagattcgattattgagtactgtgtgttaatggtgctgaatagacagaggacttgtgcagcaactggtatcagagcttgggagttcgaagttggatcttagattgatcatcaagaaccttgtaaactggacgagaagaaatagggggcacaaattttgatcttgagaaatttacaaggaagaacaattttggattatggcgtgttaagatgcgggcattgttggtacaataaggattacaagctgccatttcaggggagaaagaattaactgggagtttaattgagaaagagaattctgagattcttgaaaaggctcacaatgcaattattttgaaccttggagacaaggttcttagggaagtttcaaaggagacaattgcaactggtatttggctgaaattggagagtttgtatacccaagtctttggcaaatcaattgttcttaaagcagaagttgtattctttcaagatggaatcgggaaagaacattgaagatcatttagataatttcaataaggttattcttgatcttgaaaacattgacattaagatcgaggatgaggattaagcaatcatagttctgaattcacttcctagtgaaaactatgagcattttgtggatataatgatgtatgggaaatattctcttacattggaagaagtagaaaatgctttgatgtcaaaggaaatcttaacttcaagagtgctacaggagaaggattgttggttcgaggcaaatcttttaagaaagagaataaagatggaaataatctggaagtgtgttggtggagttacagagttgagacgagttaggcatgtccttgagattaagaggaatctcatctcagtagacatgcttgacaaagaaggatatttgtcaaaattgaaaagggtgtcatgaaaattgtcaaaggctcaatgattattatgaagggaatccgggaaaatggaatttacttattgcagggtcacacagagaaatcataagtgaatgcagcaattaaaacatcaaggaatcctaccttaatttggcacagaagacttgctcatatcagtaatggtggaatgcaagtgctcaagaagaaaggagtctttggaagggatcaaatccaagagatggagttctgtgagcagtgtgtccttggaaaatctacaagagtcaagtttggaaaagaagttcatgtgtcaaaggcaatattaaattacatacattcaaactaatggggctcttcaaggacagaacccagaggtggagccaggtattttctatcctttattgatgattttaccagatatgtttggattcatatcttgaagaataagaatgacttattttaggtgtccttggaaaatctacaagagtcaagtttggaaaaagagttcatgtgtcaaaggcaatattgaattacataaattcagacttatggggccctttaaggatagaatccagatgtggagccaagtattttctatcatttattgatgatttaccagatatgtttggattcatatcttgaagagaataagaatgacttatttaaggtatttttggaatggaaaactttaattgagaaccaaactggtaagaaaatcaaaaatcttagaactgataatagacttcaattttgtgtggatatgtataatcaacattgcaaacaagttgatgctgctaggcacaaaacaataccaaggacaccccaaaaaaatgacctagctgaaagaatgaatatgatcattatggaaagggtgagatgcatgttgattcactctgatttacccaagaatttatgggtagaagctgtcaccactgcatgttatctcatcaactggagtccaccatcaactattggtttcaaaacaccaatagaagctagaacagggaagaatgccagatatgatcatctaagagtttttgggtgcatgacttatgctcatgttaggcaagacaagctagaaactagagctaaaaagtgtatctttattggctatcctgaagatgtcaaaggatacaaaatgtagagtatagaaccttgaaatcatcaaaagaattttatcagtagagatgttatatttgaagagaacaaggtctacaaagatacacttagaattatgcaaactcaacaagaagatggccatactgaaacaaatgagagcacacaaatggaggtggagtttgacaagagcagcattctcacagaaccaagtttgaaaagagatgatgtggataccctaatagaacacagaactgaggaagaaaatgtaagtgaatcaaatgatgagggtcttgactaccaataagtcagagatagaaaaagaagggcagtgagagcacctgcaagatatggatatgcagatattgtaaattgtgctcttcatgtggctgagatgct

SEQ ID NO: 57455 - DNA, 1417 bp, Cannabis sativa
atttaatcaagttctccattttttaatttttataatgtaagtaaacaaatgtaaggcaataattaccttactattgattcacattactacttattagtaaacatgccaatgaattcataagaggatactcaatatagtcaatacttaatatattgatatggggcatcaaattacctaatattataattatgagtgataatctataattagctaacagtcttttataatttttatcagagtaagatagctcaatattaaattacacttataacaatattacaattcacaaaactatacaccataaatattcttttaacaattctctttagctatcaaagttttctatagtttagtaaaacaaaaaaagaatgaattatagtgacagtatgacacgagcaaattatatacattttttacacttaaaattcaattatataattgaaaactatttgtttcctacataaaattatacataattaaatcgctaattaaaatttttaccccctaaactttaacatgtaccaaatcatgtccttgaacttttctgtctgttaaaaattctccctaaactattaaaattattagatttaaggacttttatttaatttcattcaattttactttttcagtaatggtttatgtactaaaccatgctccccagaatttgatatctaccaaatcatgcccctcgaacattgacatatactaaatcatgtcccctgaacttttatcaatgttagactttttttgctaaaattagacaaaagtccttaaatccaacaatctaaatagttcaagaggcatttttaacgaccttaaaaatttagagggcataatttggtacatgtcaaaatttggagggtaaaaatcataattagcctaattaaattaagtaaaaatattattgacctcgtatttaatcaactgcgcggaatcaaataatatcataataaacatgtgtgatgaaatttaagaaagtaaataaacgacacaagaacttttatataggttcgaccttgattatatggtaattataacctactcccccttgtttaatatttcttgaagatgtatggagatcaaaagaatcagagtcaagtgagtttctttgtatatacttcaatggattccaaatgatagtttttgcatttttgcagcgtaatatctctcttgtaagtaaagaatttgatctcccaaacagtgaaagtgagcaactatttatagagttacaagtataattcaataaaagttgattagtttcttcgtcccttgattgtaggcaaccataaaggcctggtcttgagggatttaagaactaattttgtggattgcggacctgtaataagttaaacatatctagccatgcagtccacgcagtacgttgtctcgcaagaccataacgacagctttcgctagc

SEQ ID NO: 57456 - DNA, 2530 bp, Cannabis sativa
  modified_base (195)..(206): a, c, t, g, unknown or other
cacttttattgggtcaaaaatattttctattaaacacgtctttaattgttgaatctggagatgtctcgataaaaactttattgtagtgatcccaatagtgagctatgaccattcttctttccgaggtcgacaatgtatgtcttatgtcgatcgcgggtgtaaataaatcttctgacttgctagggttatgagccnnnnnnnnnnnngttggatgaagctataggaagtctcctcatagcgagatggtcatctcgcatacttgttcttcgagtcgatccgactttcacacttagtttgcttattgcaagctaaggtatatgtcacttttctccggtgcctcgctattcacctttagcgacatatggtttctttttaatacactaagtgtcagttagtacattgattccttgcctaagaccttacagtcagcgggttacaaatatactctgatacttatgtaattaatgagttattccattaaagatattgcactggttcacattccctttatcttcactgtcctctagcaattttgggtacaacaattgccccttaaaaagttcttttttaataaaaagagctttttgataattacagatggctttctcgtcaggatcttttcttggaaaaatgcgccctttaattctggcggttgtacggtttcgagagtcattatgaatcatctcttcatattttgcacaacatccagcccttatatttctcaatctttggctttcttgtcaatgaacttcgtgtataaaagggcaactcaagcttgtcatttttcataaaccatttggcttctttagttaaatccattattagaatggattatttccttcctaccaaaatgtctcttctgagttcagaagtttatccctcaatactcataatacccagatgcaccaaccaatttccatttgttcctacagacttcaagcctcaaccggagccagaaacgatagattcttgggctaaggagcttccaccaatccaaaccaggggagccccatagcttgccatgactgatcttcacaagtgatcccaaatggtataaatcttgtgagcgatctcaaaggtcctcctcaggctgatgaaggattccagaggaggactggcatggtttcagatggatctgggaaagaagttgacgtgctttctatcagaggatcaagccaatccaagaccctaacctttttccaagagatctttgcgtcagcctctctccggtgttgaaaaatttcctaaggctgagaaagagatctctgcttcaagaaatgggatctgatgatgaggagaatagggtctgtccagatatcaaggctctctacgtgcagacgatctttctggtctacgtgtagctggtctttctccaagctatgtgtagacggtctttctctctcatcctctatttaggagaatgacttaatggtttgccctttgtggcatttttgtaaagacaagtttataaccagtcttaggtttttcttatcttaaatgccttgtactgttttttttcgaacttaatacaattgtattttcttgcgttttgtttcacaaagtaaacaactatattttgatcaaatgtacagtacttttgggtttttccattgctagtaatcttcctatttaaatagttaataatctatcaaactttataatttttgagcggttgtcaattctgcctcgcaattgcagttataatttgccttaagctaacttaaatatactttaaggactttatcactttgtatatttttaatttgctggtataaatagttatattatctatgcattttctaaatttatgtactttaccaaggcatcgtgattgctcgttcagtactttcctatctcgcgagaaccgttagtattcagtttcaaacgcgagttataacttttgattttcctctctcgtcggataggttataaatcaaaaattatagttgtttgatcccttcttcatcaaaaaggtttgatcaaggtgttataatgattcaagaccctctctcgtcaaaaaggtttgttcatggagttataatgattcgactccactttcgtcaaagaggtttagtcgagaaccttcgaatttaaaaaaaaaaaattaaaatgacgggtttgcattatacaatgtatttccatatgaattctggttaatcatacataaatgtcccttaagtaatttttaaagaatgaaactttgtaatttattactataaatgattccttttattcataactaaaaattaaagtttacaccaataatgcgagttacatcatttatttattgatagtacggtcgaaatgttctacattccagtagttctttattagcaagccatcaagtcgagccaattagtagacttcgactccaactactatttcgatgacatatggaccctcccagttcgggttgaacaatcctgctaatgcatctctcgtatttgcagagactcatcttaacaccatgtctccaacattgaatagtcttttcttgacttttttgttgaagtatcttgtgactcggtgt

SEQ ID NO: 57457 - DNA, 698 bp, Cannabis sativa
tttttttttttttttggctgaaagctgataaaaaaatagttgaaaaagggaaaacataacttttttttattagctgtaatagctttttttttttattagctgtaatagctttttttttttttttaattattgttatccatgtgttttttttgtgatgatttactttaattaaaagttttagtgaagaaaaataatttatatgaaattaatgatattatatgcgtgcctaatctaatgtttttgaaaacataaactaacaaataaataaatatgtaaaaagaaaaggggttggtaaggtatggcaactagttttacatattgtctgctatgctaaccaaaccttgggttgtaatctatctaaccccacagcattagttaacatggtttttaagttacctttttattcattcaacacactacttttcctacccaaactattgactgtgttcgcagttgtttttgtttcttttttttctaatcccaactttacccttttcactttttcagttcaactttccttcttcgattacaacctgtgcaatatagtgagaaaataattaaccacataaataataacttataattacaccctcgaatttatatagggaaatttgaatttctatgcttacattaaggaataattttttccctaaacttaaaatagggaatattggtaaaatgggataacattttcttaa

SEQ ID NO: 57458 - DNA, 1115 bp, Cannabis sativa
gtgttgtcacaaagtaacactagtggtttttccatacctggaacaacaccaagctctgtgaaaaacttttttagccagaccagttccttagcagcctcaacgacgactatttattcggtctccatggtagtgtcagaaattacagattgcttgacacttctccaaacaattgttccaccccccaagagtgaaaactaatcagatgtagacttcctatcatcaagacagccctaaaaatttgagtcggcatagcctaagggattcaaagtgccacccttagactaacacatagttccttgtcctctttaagtatttcagaatattcttaaatgtcgtccaatgttcctttcataggttgggctgaaacctgctcacaattcccactgcataggaaatgtctagtctagtgcataatatagcatacatcagacttctaattattgaagcataaggaaattttctcatatcttctatctcttggggatcagtaggagattattccttagatagtctcaaaccatgtctagaaggcatactttcccctttggcattggtcattaagaaactctctaacaccttatcaatgaaagctgcttgcaagagagtaagtgatttgttctcacggtctctaataatttggatcctgagaacataattagcttcacccaagctttaattttaaactagatgcttaaccattcctttatgcatgtcatcttcttgacattgttaccaatgactaagatgtcatcaacattaaagaccaggaatactaccacttgataatccttaagttggtaaacacaaggttcatcttcattttgatgaaagtcgtaggttttgattatttgatcaaactttttgttctaagagcgagaagcctgcttaagtccataaaatggacctatttagcctgtaaattttttcttcttgtttaggaagtttgtaaccttctggttgctccatatagattgtctcgttaacaattccgttgaagaaagatgtcttgacatccatttaccaaatctcgtaatcgagagtggctgctatgaagagaaatattttgatggatttgagcatggcaactggattaaaagtatcctcatagtccacac

SEQ ID NO: 57459 - DNA, 513 bp, Cannabis sativa
  modified_base (377)..(378): a, c, t, g, unknown or other
tttaccataagtctctctttgcttatcttttttccaataatttaaaactctcgagaaagaatagaagcctcgactatccaataatatggaataaaagcaaattaaaaaagaaaaactaactttgtcataacatttctagtttagtagcaatgtttgtagcagaacttgcatactttatcaatctgaaattaaataatcatcaatacttcctatatatttttaataattccaacaaattacaaagtatgacggcgtttgataacacttttattttctttaatttttttaatcacaaaaatgaaagtagattttttgtgtttaaaaattttgtttttaaaaaacaaaaatgcgttctataactatttttattttttaannttaaaaacaaaaaacaaaaatatgttttgcaaagttcattttcattttttgattttatttaggatcgaggctgggggcaggtttaggtgcgagtttggggtctggggtccggggctgagtctgggtccggggcta

SEQ ID NO: 57460 - DNA, 772 bp, Cannabis sativa
gagtggagtagcccatgttctttatatatggctcaatacttttacatttaatccatgtgggacaatgttctccaataaatatttataagcctacttaataaattgttaaattcaatcatttttcactactacattagtgttctacagctgtataagcatgatcaatataagttattcgagatgttactcagtctatcgcttcttcttctactagtagttctacttggtggaaaatcttatggaacctaaatttacttcataaagtaaaaagttttatttagagattatcgtctaattgaattcttactattattaatcttcaaaatatggtcttctcaatgatagtttgtacccaatttgttctgttgacttggaaacaactcatcatactctttgggttgtaaaaaacttgcttcagtatgaaagctttgtgattttaaacttgatgattcgactacaattgtaagtgacatctatggatttattttcaattttcttcaacggcttcctcgttgcaaaattgaattgatccttgttacttagtggagtatttggcatcgacgaaacaaacaagttcatgaaatctctatcattctaccagagcttgttaatccttgggcaactgacttatggtcttaccagaaagaggattagagggattttcctcttactctcgagccattagcacaatgaaggaatgacactatccctcattatattcctccagctgctagtttgttcaaagcaaatacgaatgcttcttctatcgaca

SEQ ID NO: 57461 - DNA, 2607 bp, Cannabis sativa
tgtatggtgaagatcagctagacccgtgttgaactgtagaccctagccagccattcccaggtacgagagctagccttagccgaccaagcctacacctggctgttgtgattggctgcattgggcagggtctggccgctaattactcccccatggctggccagacctacaatgggcagggtttggatgcacgtgatgcttccatggtcggcctgacctgcaaagggtagggtctagctgcccgtgactccgtagtcaactgatgttggttgtgtgttgataggggtagatcacaccaattgttggagtttggtggatctagatgtctaaagtgatcggtttgacttcttgatcactgttatggatgtttccacccactctcggtccttatcggttgaagattgacctctgggcacctcgctcctcttggggaggaagtgttgtactctggccagccaagggtgctcctgctgatggcaggtcgtccgttggttgtacaatggggggtgttactaagccagagatccctgactggccccccatgccgctggttgttagcatttggctgtttttgtcgtttgacctttgaggaaaggtctgccctccctctagcaagggaagatctgtcctagttcctgatgaactgggttgatcaccatgttaatagaccctccctgatatatcaataagtcttccttgaagtggatctctgaggagatcctgacctcttttatcggttctctggttgaattgtcttatcagatcgctagcctcttggttgcagcgatctaactctgctttgtgggatcgaaggatgtaatcctggtcatccatccatctcagttgcgtctctgctgagaaaaaacatcgcaatcagcagcgcgtggttcttcggttaggcctacatggccaatagcttctctaaatctggctaactcgagatcttctcctaagtccagatagggcttgccaactcctgggcctatctctccagtgtaaaatcgaagacgaaatctagttattgttctagggggctatcgcccctaggtccttccttcagtaggaatcgccaatggtgggtcttctcttggaggcaggggcctaccacttggatctaccgggatgcctgtatcattttggccagctgtagtggccagacttgtggcgcttgttctggtgacaagattaaccacatctggagtgttcatgggaattccaattgtgactgggacctaagtttctggatctaaagtctgtgggtcttgagggagacccaaagatgcagatggtgcgacatggattcttctcgtattaaccatagtgtttgatcagatacgatatccacgctctcaataaaagcaccaaattattcacctcaaaaagtgatcaaccaacagcggggttgtatagatttgatgcttgcaacgtgttgcacaaataagaataaaaagtaataaatacataaattttttatagaggtttggtccccttgtgatagcgggtaatgacttactccccttttagttgtattaataccgagggttaatactatccagatcactatagatgagatttgttatagcatccttaggaatataatgtatgaatcaagaatggaaaaactcaagtgatagcgcttgtatgggcgtgtgagagaggaagtgaagaagagagaatttgtcagacttaggcttagagcttggaggcaagtataaggcttaactgagcttaggctttctcggttagagttaaagcctatatataggaggcctcaaccctagattacaacttgaaaccctatatatttgtatatttttctagttaattacaaaagaccaaaataccattgaatctagatattattcagctattctgttgggcttttagggcctaattcgaagcccaaaggatgttgtcctcgtcaaaaagtgcacaaaaaaccatgtagaacatgtcttggccagccaagcctttgtggaggacaaactagctcaccagctcctatgaaggagctagtctgtcacttgatgccggtttcagtgtcggggtctctgtttgcttaggtgttgacttggtcttcttattggtgagttgtactgccacgtagcactgattttgtccatgtaagcatgccacgtcaggatgacaaaaatcaggataacaggtagttagataatattaaaattattaaatctaacaatatcctaaaatatctcaattcaaaataaatatccaactaccttttaaatttctagcttatttaaataaattttaataaattaaacaaaataatacgataaaatgatataatatcttaatttgaaaattaaaatatttctaatatcacacttctaaccttataatttaataaattaaactaataaaataaactaattttttttttaaaaaaaaatagatatttatagttagaatattatcaattttaatattaaaacaataaaaataatagtatatagcacgaattttagggtttaaaaaatcctaaaatatctaaattttattatttttaaatttctacaaaaatatttaagtattttaaatgtatttataaagtttatatgtctaataagtcaaaaatgataaaatatc

SEQ ID NO: 57462 - DNA, 505 bp, Cannabis sativa
ggtgagacttgcacacaggacattgagctgaaatttgaacatgcttggagacgagattgacacaagtaggaagagttccagagattgcacgccacaagaaatttataactttgggtggaatctttaaatgccaaagaattcgccaaaaaccagagttatttgatgctggtgttgctggttttttcggctgcagcaaggaataagcaattcgaacagtaaaaaggtccttgtgctcagctgtccaagaccagaaatctgtctcaacattatttcccaatggaattccgagaatcaagttggcatcatgagtggtaaacaggtccatattcacctttgaatcccaagcacgactatcgattttcagaagagagctgaccttttgattatacaatgcaggatgggtgttggtgacatatttattatcaggatttgccagccacggagtaccaagtatgttggtatttgtcccatttccaataacacgtgaagcacctaaacgaaccac

SEQ ID NO: 57463 - DNA, 2196 bp, Cannabis sativa
catatactcagcctcagtagatgacagagctaccgccttttggagatttgatttccatcttatgcatccacctagagatgtgaaaacataacctgtgagagacctccttgtgtcagtacagccagcatagtttgaatccacaaagccttcaacttcacagtcttcttgctggctttgtagattaaaccagcgcttagggatcctttcacatatctcatcacccacttgactgcatcccaatgcttgcttccaggataagcaataaacctactgattatgctcatggcataggcaaaatctggtcttgtgcacaccatggcatacatcaggtagccaacacaactggcatatggtatgcagtccatatgcttcctctcaatttcagtctggggtgattgatcttttgagagcttaaactgttgagccataggtgtaataactggcttggcctcattcatcatgaatttcttcaacactttctacaggtatttctcttgtgacaacatgattacaccaggcctctttcttttgattccaattcccagtatcttcttggtttctcccatatctttcatctaaaattcaccttttagttgatccttcaatttgttgatcttgtgcctgtcctttcctactattagtatgtcatcaacatacaagagtagttaaaggtttccattaaaatagacacaaggatcatagcaactcatgttgaatttgatcctatccatgaattcatcaaacctaaaattccactgccttggagcttgcttcaacccatacaatggtttgtgtagcaaacacacctggtttggatccccattgtcaaacccttcaggttacttcaagtagatcttttcatcaaggtttccatggagaaaagctgttcttacatccatttgatctatttctagatcttgatctgtagccttagccataatgcttctgatggatgcttattttaccactggtgcaaatatctcattgaaatccacaccttctttttgagtgtacccctttgccactagcctggctttgtatctcacttcttcagtacctggtaagccttctttctgtctaaaaaaccatttactgtcaattaatctctgtccataaggtttagtaacaacaaaccaggtcttattctttatgatggatgccttttcttcattagtggctttcagtcatttctccttgttgttactttaaatggcttctttatattaggtgagttctgagttttctaactcatttgcagttgcaagagcaaatgcagagtagtctgtaacaccatatctgacagggggtctgatgcttcttctgcttctatctctggccaagagataatcatcaagctcttcttgagcttcttgggtgacaacattgtcatcttgagttggcatttcatctggattgctgggtggatccacctcaatgtttagtttggaggagttgatgtctgatgagtgtagggactggtaaaggtttcattgctatttcttcttctctaaatatcacatctctgctgattatgcatcttttgaaacctagttcaaggcacaatagtttgtagcctttaacaccatcagggtacccaaggaacatgcacttcaaggctttaggtttcaatttgtcttgcttcacatgtgcataggttgtacacccaaagacttttaggtgatcatagttctaagcctcacttgtccatttttcttgtggtgccaagcaacttattgctgttgatgggcacctattaatcatgtagtaggctgtctgcaaagcttctccccccaaaacttcctttctagaccagcgcctttgagcatacacctgaccctttccaagagggttctgctcatccttttagcaagtccattttgttgtggtgtgtccctaactatcaagtgctttgggatcccttccttgtcataaaatgccttgaattggttggagcaaaattccaatccattatctgctctcagctttttaatcttcttaccagtctggttttcaagtagctttttccacttgacaaaggtgttgaaagcttcatcctttgacttcagtaggtacacccaaacttttcttgaaaagtcatcagtgatactcaaaaaatagtgagcaccaccaagggttgggatcctagatggcccccacaaatctgagtgaacataggcaagttgttccttggtgttg

SEQ ID NO: 57464 - DNA, 1432 bp, Cannabis sativa
agccacctaggcccttaggcgaccagaaggctcgtctaaaggcccaccaactagacctctaagtctggaagatatatctgctacaagaaagtaacaaagtcataatgtaagttacaaatattcaatgcaagaaaaaaaatataaaagatggtgcactccactatcaaataccatcatcccccagaagaggattcatcataatcttcaacggctgccttgcccttgcctctagatgtaggcaataggcgagtaggcccagcaaaactctggcctctaggcctaatccgcagagtagtgttcctaatggtgcccctaaaagccaagcactggaggagggccctctctctcttctccgaatccctagctatccaggatagaggtacatcatcatccatgtcaggagcatgcccaccacctgggctggcctcctaagcagctagggttccacctaaacaacccgatgggccctctgcccccgtaactccagataaggggggatataggccgtatctctaaaagttggctacactttccaaccacaaaatattcctccgctctacagggagggataggatgtggttcgctctgcccctcatctagagggtaggaatggagtgcttgtagttgggcactcgcttaaaacggcggtgttgaacctgctagatgtcccaagaaataaagtactccaggcatatcccctactttcgacaaaggcgtgttgttggtgttatccaaccactaatagtcgatctgactgaagtagaagtaccccatccaattctgctttggagcagaattcaagtcatattggtatccaatctcatacggagtaggctgaggtcaacctagctctgcatagagaacaaacatcatcgaaatgtccttgataccttttagggtgatttgtgttgaacacatctcgaagtaagcagctacgtctccaaaatatgggtgcaaagacaggactacccctgctaagtatggtgctataaccacggcattcaattaagggccagcgatgcgctcgttcgtcccttggtggcacctcacattggtcacctctcaccagtccactctctcatatcctatcgagagcctcagcagtaataatagattgaggagagacacaacagtctccttgtgccctagcatcgagaatctgaggctcagaaacctgtattaaggcatggtctacaccaatcaccgaaggctgaccaagcctattcaatggatttctgtcaatatcatatgagcctagagggttgtcgaagaaaatagtacaagtcctgtacgtcattctccttgcaagtgcagcctcctccacctcggaattgttgtctggtctcaacacgctggtgggccacaggcaccttagcctcgccaacctctggatctctatcattaaatggttgtgcggcctccttcactatac

SEQ ID NO: 57465 - DNA, 2095 bp, Cannabis sativa
  modified_base (1835)..(1837): a, c, t, g, unknown or other
  modified_base (1972)..(1973): a, c, t, g, unknown or other
ttatcgagacactacctcaagaacgagttacttcaaggaaagtgtcatatcaagcctcatagtacatcaacatggatgggaaactctaccaaagaggattatcaatgtcctatttaaggtgtgtgtccagaaccaaaattaaggccatcacccaagagttctatgaaggattttgcagagaccacacttggggtgcaagcctatccaaaaagatcttaagcctacaatgaagaaggattgcattgagttcgtacaaaaatgtgaccagtgccaaaggttcaccaacactccaagccatcacattgatgactagtcatggctgttcatagtttaggggatgaaccttataggatccatcctaactggaaagggaggcatcaagtatgttgtggtcgcagtcgattacttcataaagtggatcaaggtagagccaatgaactcaatcactccaaaaatgttctagagtttgtagtcaagaacattatctatcggcatggtcttccacacaagattacatcagataacgggaagtattttgacaattcccacttcactaggtttcttgaaagtcacgagatcataaaaatcttctcaattgtagttaggcctccagaaaatggtcaagaggagcatgtaaatcagatcctgaagactacgcttaagaagaaacttcaagattgcaagaaaaactggccagaagaacaacttcaaatgctttggaccaaccgaaccacaaccaagtccactataagacattcccctttctccatatggatgtgaagtaatggttctagttgagaatactatattgtcccacctaagaacaacctatgatctagaaatcaatcagtcactctttcaggattcccttgacctagtcgaggagctctaagaggcaacaagagtgcagctagagtcttatcagaggaaattagagaagtacttcaattcaaaagtttgggagaggaatttcatggtaggagacttagtccaaagataagttttctctgcatcataagtccccaaagtgggggtgctaggtccaaactaggaaggcccgtatgagattgaaggtgaaattttctccagaatataccacctaaaatttaaaacgtaatcaaattttggagagcttggaatattgaacatcaccgtaagtactaccagtaactggaagaccagtattcgttatcatctttaaatttcatgtaaactttgggtcgcatggatcaaaacattttatctctaatgaaataatgacatcataaaaaatttcttaagtgcgcaaagaaaacttgagagaaaaataagtgattcaaaccccaaactcttaagtcacttacgggtagagagaaaactagtaaacactaaagcatcatagaaccaagtttcccacattataaaattgagtagaaaacactaggcttagtgtatatcaaaaatttacacaaagatcaaaactcaaaaatatgaaaagaaaaacctataaaagatacataataaagtatgtgtaggatgcaaataaataaaggcctcccagccgcattgtcataggtaacggcttcttgaccacattatcttaaataaagacctcccagttgcattatcttaaataaaggcctcttggccacattgtctttaatgaactaaaaatgctcggggcaaggctattagtattatccccctaaaaataaaataaaaaataaccccttggttgcaaaaaactatttttgtaacaataaaaagttagagatattattcaagttcaacaacttggagaagtcagaggaggaagcctgggaccacccatcttattgttggaatatattttaccnnnatctagatttactaacaagtatttttttaacatcctaaatatgaacttctaaaacgatacaaaataaacacataaaaggtatgaaaaaccttacaggttgcagcaaaattaaatgactccttccgctcagatctnnaacccttgtatcctttttgtagtaaagtatcacaaagatctgaagtcgaaacttcttccttgtgtttggattcttcacagtcttacacactatgattaaggaccacttgatgtgtgtgggca

SEQ ID NO: 57466 - DNA, 955 bp, Cannabis sativa
gcttaactcaagcgtgcaaatagtctatatgtgcagttgttcaactcaatgaacttaccagcactcgcactagtattcaggattaaaaactcagttacttgggataacgtcaatattttattaaactatagaaatactaactcaggtgtgcaaaattcctgaatgacacacttcaacccatggctcccgtataccggggtaacacctagctcttgtataccaaagtgtatgtgacatacatggctctcgtgtatgattttttctgaatgctcatgtaacatgcatagctcctgtatattatgtcttattttcccctgagtgatcgaagaaatgccttcattggtcactttccataccaaatcccgtaaggctttcttgatcatggatctcagggagttattacatgtgtgagcactcctccacttatccaaagcttcgtgggttggcagtgtttaactcattaaagaaataatcgtagttacctcaagatcaactctataagttttgttcagcacttgagagtgtcgtcaggtctgtgagctgcaatttattaacaccaatgaaataccaataagctttactcaatgcgtttaaattcaattacctcattgtgagttaagttgaaagaaaaaaaatcatagtagttgtaaattttcgtttttcatcaaagcttagctgaagtaatattctccactatgctaataccattcgaataatagtgtaagagccataccttaacatattatatagttatattgaacaagcatattattcatgtgaaagtaccagttgggatacacatcttatatttccacattatatatatatatataacaacgtggtttgacatatatcctagtatataagtagtggtactttcttattacaattcaagcacaaaccacacacacaacatatatacatatatataataattattcatcaacatgagcta

SEQ ID NO: 57467 - DNA, 2520 bp, Cannabis sativa
tggtttcttgttggaataaatgttagaaaagggagctcagctccttgtccccttcagcacgccacgcgggcgtggcctccactgcagcaccccaaccgtgggtgcttcccacaccccaagcccacgactgggctcctctccctccaattccttttagctcccaaaaagtcaaaattgctccttttacagccaatcaaatgatgacacatggcaccacctcacccaaagcaaccaatcagcatgtgtcacgtgtcattccggtttaaagtttgtgtaattgtattttttactccatgcaatttgtaataagtttaatttcacattagtccttttaccttcctataaatagaaacttaggattttaggattcagtacaattttagacaaaaaaattcagagaaaacactcaaagcgctcagtgttagtttactgcttttcttagttaattttcttatggatttctatgttctcttattattaaggcggacgatgaatcctagtgtatttaattaagtatttatttttattttgattctcagtgcaatatatatgcttatgattttcgcttcttaaaataatttctttcatctttaatatcacgtattttttataattagaaattattaatgattggttctacattttattaaaaataatattctttaattttttgtatttttgtatttacattaaattgtttcacatttaatgcttagaatataattttaaagcaaaagataatctattttttgttaggaaataattggtttgattaataattaaattatgagaatcaatataaacataaatatttttatatacacttaagtagattctgaacccttaataatatcctcaagtatcattgaaaatatatattactgtcatttttactgttaaaatactttattttattttgttactaagaacttcaccattttcggaactaggttagagttttaatattagattaaataagtattttttttatctcacgcaattcctatggcttcgacctcgttcttcacaatctctacactacaataaagattcatgcgcttgcaagttgatgaatataaaacgcaccattttttatcacaacatgcagtttgaattttttgttgggttattcggattgtgttttttgtcaattatttagtttggtttgggcgatttgtaaaattttttttaacacctctactactgattgataagattggtgagatgaacgatcaacttagaaggttcatctcgggaaatacaaatacacaacataatgacaatgcttagaaagtgtagataatgaattatttacagagcttgcagcttatagactcacatactcacgagtattgctaagagactaagggtcacattcctagcatgattcatcttaaaattgttatactgtgatggtgtcttgcgtttacttcgcccaatacctatgaaaggacgcgagaagtattatttaaagtatacttagacactaacaaccctcttcagaataaagtatattgagaagattatttgtattacaaatttttaaaaaaaaaacttgtctaaaagttttccaataataacaagttcaattaatttactatcataaaaatttaaaatagtttaattaattaaaattaatctcaaaattgaaaagaacattataaaaactgaatcttgtgagattctgaactaatagtagatctggattgagcatgtcatagtcggagttgtggaagacaaagaaacaactgtcccattgaatcatttactttatcaaaatatatatatactggtcaagcatatatcgatccttcaatataagcatccaacaagcttctctatcaggttgttgtctccttatcgaccagacgataactcacccttaaggaaaatacctctttgtacaatcttactgtaccaacgagatacaatcttatgataacatgtcttgctacatgttacaaatttaattacacgtcatacatgccaaaatttagtataacaattatattgtgcaattgttgatcttaaaatataagggtagcaattcgatcattcagtacgtctgaacatctcatagttatctaaattatcatatactatcaaatttgaatgagatcaatagtaatcgagatcattcagatcttttttaagtgtaaaactttttatctatttattatgcatgcttttctttgacaaagagccataacttttcatttgaatgttatttattaatacatgtgttatttttattatttactgttataattcatgcaatacaatcgtcaatatatattaacaataaaaaatataagattttccactacgataattacaacctagaaatttttatagtataattttttctaggactgagcatcggtcggtttggtcttttttttatttcaaaatccagatgttgaccgaggttttcggcaaccaataaaataatagaagattagagaactgtaagaaattaagagaaggatttttacgtggttgaggcgttaatgagcctta

SEQ ID NO: 57468 - DNA, 821 bp, Cannabis sativa
aaacagtaaaaaagttaactttaccgtgtcacagtatatttgaaagaaaaatgaaaaagttagtaaatgatgtaaatttccctataatttatagttttttttccataagagaaactatttataattataccatatcatgaacaattcaagtaaaaataaaaacaatagtaaaatcttaaaaagtggtaatcatttttaaagaaattttataataatataatttaaaaaaaactaaaaacaataataaaaatgcacataccttcaatgataaaattttttgttaggagatatttgtgttctgtgtactctttaattttcttacaatttgaaatgtggggatgagaaatgttgaaaaaaagaaaaaaaaaaagagttacacatgaaaaataaaaaataataataataataattggtgttatgactttttcgttcttacttgctgcaagtctaaaagatgatcagtcaaaaagagaaaaccttaaaaagtccgtgtctagattaaaacgttttgtttttttaatatataatgtacaaagtattaatttgaagaataataataataaaataaagtaatttggagtataaatacttaaatttaacactcagttttaaataaataactaagtttaagttttggcagtaacaatacttaagttatatttctggatacctaaccgttaaatgttaagatattatatctacgtgtcatttttttttagggatgattacaccaaaacacgttaattgtatcttatttatagatagatatatgactacttatttaatgtaagttgtaatatccgctaactccgaaagggtat

SEQ ID NO: 57469 - DNA, 1426 bp, Cannabis sativa
  modified_base (45)..(65): a, c, t, g, unknown or other
  modified_base (468)..(474): a, c, t, g, unknown or other
  modified_base (872)..(891): a, c, t, g, unknown or other
atcgttttagaaagttcttgtttaagatgttaataaacatacttnnnnnnnnnnnnnnnnnnnnngtaaaataaattccaacaatcttcccatagcaagaagggcacctcacttacttggtcttaagccaatctgactgtaactcttagtttgtacactaaaggctttcgcaattgatatatatcgcttctgtcttcctatgtgtactgtccttgatgcctcgctattcgcattcagcaacatatggtttctcgctaatgtactaagcaccagtttgtatattgattcctcgcctaagaccttacagtctgtagcttacaaatatactctgatactcacgtaattaatgcgttattccatttgaagcgattgcatcgatccatattccctttatcttgacacgtgtcctccactgagatggcagccgaatttgagttataacaattgccccttaaaaagttcttgttnnnnnnnaagtgctttttaataattacagagggcattttcaccaaaatcccttcttggaaaaaatgcgtcctttgattctggcggttgtacagtttcgagggttattatgaatcgtcccttcatattctgccctccaaccgttggatttcccaatccttagctttcttgtcactggactttgtgcaaaaaagggcggctcaagcttgtcatttttcacaaacctctggctttttagtaagatccattttcagaatggatcatctctttcttgctagaatgtcccttctgagttcaaaagttcactctcctaaactcataataccaggatgcaccaaccattttccattcgttcccaagaactttaagcctcaattggaaccgaaaacgatggattccaaggctgnnnnnnnnnnnnnnnnnnnnaaccaggggaaccccgtagcccgctatgggagatcctcacaagtgatccttgaaggtgagtatcatcccttgtgaatggtggttggagtcggtttatacatatcattaattttgtatgtttttttttgctccattgaccttttttcttcgtctccacttgaatagacatagatcttgtgagcgatcttaaaagtcctcctctagttaacaaggaatcccagaagaaggttagcacggcttcgaatgaatggagagaagctgtcgtggtttctatcagagaatccagccaacccaaggcctgcactagaggacctttgcgccagcctctttctgatatcaagaagtttcctgaggctgggaaagaggtctcggcttcaggaaattggatctaatgatgaggagaatgaggtttatgcagagattaaggctctctacgtgtagacagtctttctcgagctacacatagccggtctttctccaagctatgtgtagttggtctttctcctctcacccttaggaagatgacttaatggtt

SEQ ID NO: 57470 - DNA, 1429 bp, Cannabis sativa
caattaaaaaattaaatatctaactttaaatcttctctaatttttaaaacacatataactctaaacctataaatatattatatatatttatatattattttatatatcacacgttttttcttcttttttttttttaattttttaataaaagttgttttatgtacatctctcacactatttcttcttcttctttttcatttttatttttttattttgtttttttaatgaagattctccatctatctctaatcctattttttttttctcttttatcttttatttgctttaagtttaagtaactattatttttgatgtatgcatgacacctcgacaataacatcaataaatagcatcaagacctcgattttcaatatttctccataatttggagacatacagacttttcttctttatatcgacaactttactgtcatcgatgtcttcacattagtcatgaattactcattagtatgaattatttgatataaaaaaaggatttttttaatgataaattcattctaaaatcattccaaagctatttttctctactctccttaattctctcatttttaatattttttttgatgaatacatttttaatattttaatatagaataaatctataaattatattttactattattttaataaacaaattaaaaacttaaatatctaactttatatcttctcaaatttttaacacatataactttaaatttataaatatacattatatatatttgtgtattattctatatatctcatttttttttaattttttttaataaaggttattttatatacatctctctctctcaaaatatttcttcttcttcttttttatttttatttttttcttttattttttcatgaagattctccatctatctctaatcctatttattattttttttctcttttttcttttatttgctttaagtttaagtaactattaattttttatgtttgcatgacaccttttttctttatgtcgacaacttcaccgccattgatgtcctcacattattcatggtttactcattagtataaattatttgatgtaaaaaagtgattttttaatgataaattcatgaaaagtgatgaaaataaggctattgtaactttttcttcatcattctcatgtgatactctctattcttcattatatttctatcgctctttatatatatatgtataaatatatatatagatatgtttttttttttctaaaaaaaagataactttagttaatgattaataacccctagctaggttgatattatatttaaattatataattatatttatgatttattttaaatgtatatataattatgatttgttttaatatttattatagtaaatatctcgcgcttcgcggcggatatattaaatattttaaattatatataaaaaataaattatgta

SEQ ID NO: 57471 - DNA, 937 bp, Cannabis sativa
atatgataatggaagctgtaagtatactagtcttttggaaccataaattttttctttgttaattctggtacaaaaacaatatcatataaacactagtttatgacacataatgatactaattcattcaagcaaattgtgggattgtattactgttttggatgaaatcccttttgttgtaaattctttgctcaagatgacattaattagatcaagaatctaagggaacaattcacaaacagttaacaaactaagaggaaaaaaaaaatcaaacaataacagcataaaacatgagcaaaaacagtaaagaacagtatgcgaaattgctcctactccagctgagcaatccattatggtgatcttcattagggtagacaaaactttgtacaagaagtgattacagtcaagagcttgattggaatctcgcaagagtatccctcgaacttgatactcaaaaccccgagatcaatccctatacctctctttctctcactctactctgttctgttgtaatgaaatgaaagcctctaagtatttataggctttggctagctcgaatagttgagctggtctttgctaaagaaccgaacccaactaacttaacagaattgtttgttaagttagttaggacggttagatggagaagtaataattcccaaacctccttttcttcttatttcaaaaaaaaaaattatgaacattaacattctaactggaattggatttacagggtgatctaaataaggatggatatatggactatggagaatttgcaatcatatcattttaccttacaaagatgcacactaaggatgagttcattgacaaagctttcaaatacttcgactatttagaatgtggatctataggaatttccgagctacgaattgggttgactaatgtagttgaagaaaaaaatattgaagaagtcattgaagcc

SEQ ID NO: 57472 - DNA, 726 bp, Cannabis sativa
  modified_base (116)..(118): a, c, t, g, unknown or other
ttgcacattgaaaatagcttatatgaataaaaattaagcttatgtaattaattcaatagtcaatcttgctttgaaaatatattttaaattctaaatctaaaatctattcatcaaannnttatgtgaattttaaaaaaattatcgtaacaatatttatttcacataacaagattaataattttgttcaaaatttaattttatagaaattacacacatagggaaaatttgaggagtttttacttttttatggcatatttttttttttttaatatatttgagttatgggcttttacatatgtttacatttttatggtttaaaaaataccatatttttgtaatatgtttttatattcccatattttatcttttttgctccagttatatttctaccactcaatgtccgtatgagaagattttgaacggcgatccatcattggtgttctggatgtagttgggtcatctcgtcatcaacagtcagcggctttctccctgtcgatgcttcgatttggtggtcgcccaagcctttttttcgagattgtggggtctccgagtgcttgcctccgcctggcttctctggatccttgacgtcgcctggctcatcgccgcccaacttccccgatcacctaggacactcatcaaggataacagatccaattttgtactcttccttgtattaatactctgtagaataaggtcatgtcgggtgttctttgccgtagagtaatt

SEQ ID NO: 57473 - DNA, 5735 bp, Cannabis sativa
tcaacaaccaaggttcctttggctatctgtccaaaattgaatgatctagtaagaaagtttttgtcgaaaagcatagacttttggccttaaaaacttgggatcaaatctgtcaacctaagctttatgggggtatgggcattagaagatttgaggatttgtagaatagatgacaagccttgggtctcttgtttgttgagtaagtaatatttactttgagaacttttgctctattactatgaagagtaatgattcgtattttttgaagtgtatcttggaaaccagagaagttagtgccaaggagctatgttcccagcgctggccctggaataggcgggctaagcccgcgcttagagtccgcatttaggagtctaaatcaaaaaattgctttatagtaaaggtctaaaaaaaaaaatttatagtaaaggcttaaaatttttttttttttacctataacctatttcaactcagggccggtcatgtatgtccttagctacttaggatcctgaggatccctcaacctcataaagataaacttatttggaaaaatgaacaaaatggagagttgtccattaaagaaacttattgtgttgatgaagcttaattggagataaactaatgcatgaagccctacaaacaaagagtagggtaccttttgtgaaaggaaaagagtgtgtgttgtgtgactcgaaagaggaaagttgtctacatcttatcgattgcattaatgccaggtaattcaatgattgaattctttaagcaaatcatcatcaccttggtaagaaagagttattcgcatacatagtataggttgtaatactttttttaatatgagacttagaaaatgtataattaactacaattaagatggatgacattatgtgcaaatgaataccccaaaattattaaaattattatttcttttaatttcaacctgaaagtgatttttttaattatcattttaaaagaactagttactgagttaaatgtttaatgaaaataatattatatttaaataatagaataaagctaatgatgtttttggcatcatgattaaaaatttttttatttcattttttcagtaattgtagtgtataattactaccctaacaatcacataattacttccaaactcaccttttttgaagtagcaaatattttttcaaaaaagaaaaaaatgttgggtattagaggaggactaaattgaaaatatttcaagataataaagggatttgtgtaaatagtaagaaatttcgaatttcgtgcaaatagtaaattagctataatttacaattaacccacttcttcttcttcattcaaaaccctccaaatctctgccctaatcttcattctccgccgatcaaatctttcgccgtggttaggccgtttctcatcgcggttcgagctcaccacagtacgttcgttatcctgtttctctaaaaaataatataatctattataatacaactattatatagtgctttttgcatgtaattactaaagaatgggtcttttgattttttcttgccatagaatttgattattatacatgttttagtccactttcctagattgattaggtattttgatattgttttggaagttaatgatgtttgtagctttcttttatatttttctgtctctttcccacaggtctaatgattttatattactttgatttgtttgggtgaatttaactgtgtaatttggatttttttttatattttggttgcaatgatttgtggtcccatcctatgtttaattttgactttttgttcaattaatttaatgccttttgaatgaagatgtttgagcacttccaatggcatcttagcaagactcactttttttctgctttacagtctaacttttaatctctaaggtggagtttttggttggagataatgaaatagaatggaatagaattagttgcattttaaagtattggaatgtcgtttccaataccatcatttcggtggaatgactatttccattctcattcctattactatgttttcattcctagttggagtgcctttctaatctatttcatgtctgcataacaaaatgactaatttctggtaatgggtattagttattttagctgacctagttcttgtttttatgcatatactacttccattgaacagggcaagtttgttagattttgtatattggtgtatgactctttatgataatgtagtttttctttttgtgttgatgtgttaggtaggtagatatggataatgaaggcaagttgattaaaattgttggattattgaatgaaactaaggttgcagctgttgaagcgaaacgccagattagttcaatgagagatcggttggccgagtttcgtgagcaacagcagaggacgtatgaacggttgtctgcttctttacatgcacttagggatcttgtgaatgataatctaagggcaaatgttaatgttcgagttgtgaataatgttgttggtggtgaaatagaagatgactgtgagtctgtgatcactgttgaaaatgatctgatggaagaagaagaagaagaagaggctgatgaggtggagagtgatgaagtgcataagctatgatgatgagttggtttggttatgaatggtggatcagtcagtgtaagtatgtttatgtttatgtttatcttcttaattacctaatttagtcaacatatttaagtgaagaaattcctagtctagagacatggacagacatgttctatatagtatatatacttgaagaagaagaagaaagaaaatacttcttttattttggaaatttcaggtgtttgttaatgttatttttttgttggggtttgactttgaatattgttgacttgttttgatgatgatgatgatgatgatgataatgatggtgatgatgatgatgatacctaaatcgtaaacttttggacatttttgttcagcttatagtcatttttttatgcattttcaaccaaaggtaaaattcttaaatagaacaacaagaataagcttacaagcattatctcaagtgttttttttatactatttcactacaacatcatttgtaaacaagtaaaagaaaaatttagatcttaccattcctaggatagtaatagtatgttgattgttggagaacttgacttgatgaaggctaggaaggaagaggtgtcacaccacagaagcttcacatctagatggtgttaggcattactatgtccaatagcaatgtctttttttttacacattaatttaacacggagcattgctatggacaccagtggtgctcaacaccttttataagtagcgtttaatgttctctaaaaattattttcttaagttatatgagacccgatacttaattacaagattattaaatactagtagtgccttttagcaattttcttaacacactctgatcctaaatcctcccaaattttcaggacacctaataattaaaacaaacaattacgagactactagatactagtagtgccttttagcaattctcttaacacaccttgatcttaacttctcccaaatttttagaatacctaacaattaaaacaaacactcttttagtttaaagttcacttaactcgtttatcttttaaggggtgtttgttatggtgacatgtttaagagttttattttggagtttttcttttgtaaaatattaaaattaagaccataagattttttttaatatggtaaaaatacccttaattataaaagagctataccattcttaacttaaattaaggatactcacactatttttttaaaaggtaaaattcattcatggctcattaagggataaaactctacaagtcaagcagaaataaagtaacacaaatcttacttaaatataagttaattgttagccaaccacgtcgagaatcaaaggaaaaaaaaaagctcatagctcatgcaagaattgctaaaggggagctcaatacaccaagttatgcccgaaagtttgccaaggggagctccatacaccaaggagagctctatacaccaaggggagctcccttgcgcgcctgcacgtatgcccgcgcccgcgctccgcacgtcagcccccgctcgctccccgtgcccgacctcatacactctcgtcaatcttcttttccctcttgacacaaacggtctaagcaaggaagtatcagacgagacaacgatagcataatgaatatggataatagagatagagttcatttcatccgaggtacaaatgaaaggagcatttttagtgtaacttagaatgctaggtacatcaaaccacttaggatacaacgttatcaagtgtgaaagtggcttcacattttatggatttgagatttggtgtgaaggtgtatagtttcaagggctcactataaataaggcccttgaattcattgtaaatgtgacttttttgaaaaataaaataataagattttcggagatcaaagattgtgagatttttattttaagtatttttctatcaagatctttcaatactattttaagtttttgttatttcgagttcttaccattaataatattttttaagaatatgaattagaagaaaaaattaaataaaactaatatagtcaaagatatatatatttattagttttcaagttacaaatataaaactatcttcaaaattcaaattagtttgtttacttgaagttgaaagggactaaattgaaaatttcttaaaataataaaggggttttgagcaaatagtaaattttctagaatttattactgaaacagtcaaacaaagagaatcactttctctctcttacttcttcctccttcaacccaaaccctaccatttcagtcagacaccgccgccggagacaccaccttctccgccgacgcatcaactcaaaaattctctcctcgccgagatccgcccatcaaatctctcgccgttcgagctctagccctgtacgtaaccttaacccctaaacttgaaagtaatataatctttttttttttgaagcaagtaatgtgatctattattataataaaaatatttacattattagttgcatctaaaatttttattgtgtgtgattttagaaattttcttaaaaataatacgatctgtttttttcttttgttcattgaaaacccaatttcataaactcagagaaaaatttgtattatgctgttgctttctttgataattttttttctttaaactcagagaatgatgtgttttgattttggtttattcgattgaatctaacaaagatgaattctttgtttaatgggttttaattattttattgtatttggtgttcatgattaggtagctattatggatgaagataaattaattgaaattgctggattagtacatgagcaagtggataatgttggtagaattaaaagtaggctggactcgatggatcataagttagatatggttcttgagcatttgaacaggagttatgaggaggaaaaggcttcttatgtcttaattgggaatgcatcgagggtgttgtccaattcaatttcaagcttaaattgtaatgctccagttgtgaataataatggtgctgaaatagaagagtgtgaatctgggatcacagttgaaaatgatctcatggaagaagaagaggttgataaggaggaggaggagagtgatgaagtgcagatggaaaaagaatgagctatgatgatcagttggtttttggtcatgaatggtctgtgtaagtatgtttatgtttatgatcttaattaatgtagtgaa

SEQ ID NO: 57474 - DNA, 1058 bp, Cannabis sativa
tatacatttaaaagctgtcattcataggaagattaaacatcatccttactggattccacatatgtaaaactctgtatgttgctttcacacattataatttttttgatctgaaatatttgtaagagtccaacattcttaagtatatcaatgatgaattggtcttttaaaggaacatgtaatgcatcatttataaatcaagttggttttttacacttggttcagattccatcatatctttatttttttttacttagtacttatttttctaagagcttaattataattaatactatctttgttggtaacttggtaggcaatcaacatgttaatcttactgaagaaggtatggttggatgtggaagagtgagtctgcaaccacaacagatagaattctcaaacaagaaaagaagaaaaagaattaatagagtattcaaagtaacaatatacttaactgaaatagagtatcatgcaacaaaactatattggttccaacattcatattgggcagtgaattaatcaaaatgtcaatgccagttactattacgttgcagttgacaagtacttagatttgtgaataaattagtttcgaaaacggtctatcactataatttcaccaaatgagatttatgacttgtgaaattgatagaactaagtatggtattcaaagactgattcatcaattatcaatcaatcttttatttctatttgattaaataatattttcaaaatttttgaacaaagaaaatcaaaataacttgatattagcaagaataatctgacaggtattattagcaaacttcttaggctgaaacatgctctaaagaagttctctagagctgaaatggggaatattattaacatctatcacacagctaaggaggagttcaatttagctcaagacaagctagctaatgacccttcaaatactcaattgcaggaagatgaatcgaaaaagcatgctgagtttgtgatagcccagcaaaactactcaagctttattcaaaagttgagtaaaataacttggcttcagtttgaggatgataactctcaatattttt

SEQ ID NO: 57475 - DNA, 839 bp, Cannabis sativa
aaaatctggttaatattttgtctatgcctagcgtgagtattaacactgtagaaaatagaggacttattcaaattcaccttttgtcacgaggccaattcaaatttgtagagcaactcttgaatctttaacagttcagcagcagtcgctttgcagtaaaggtagctatcatccgcaaaaagcatatgagagatccttggagcaccattagcaaccttgcaggcatgtaaccaaccctttgcctcatattttcaaattaaagcataaagtccttccgcacaaaggataaagatgtacggtgaaagcgggtccccctgtctaatccccctactcggtaagattagacctaattcgcgacccccatgagtaactttataccgagctgaagtgacacagtttacaatcaagttcacccaccgctgactaaaaccaagctttgtaagaattgatctaagaaagccccactcaatcctgtcatacgctttacttatatccaacttcagtgccatatagccatctttgcctttccttttccgcttcaaatagtgtaacacctcaaaagagaccattatgttatctgagatgagccttcctgggataaaagcactttgagtatccgctacaatctcgtccatgaatggtttcattctattcgccatgacctttgttatcaccttataaaggacattacacaacgcaataggtcgtaggtcagtcatttttcaggtatttttgtcttcgggataaggacaatattggcttcaaaaaaacctggagaaaattcccctttatcaagataacgttggacagggtttaccacatctttgctcacaatatcccaa

SEQ ID NO: 57476 - DNA, 1792 bp, Cannabis sativa
tgagttggtatttacatattacaaaatcagacaaaataataaaatactcattgtaatttttgaggagctcacatggtagaactagtttaaaaatctaatgacaataatgtagagtatgttttcaatcacttctctaatacgaatagagatttattttaaaattggcaaaaatatataatgcactagtaaaaaatgaatctaccacaaacataaaataatatgtgcaataaattatatttttctccttcatgatatacattagcatgcacatacaagtgatgtaccacaatttcaaaccaaaatactatgccatatttttggtgtcaagttttactggatatcgggtttcgagtatcatatttggaacaatataccacacttaaacgaacacagaacaataatataccataaatttaaactaatataccactcatttaagtgttttttttcccttaatataccatatagcacatagaaaaagataatcatagtgcaaaataaatataataaaaacttaaactaatattctatttttagtatttttttttatttccttcatgatatacaatatattatatcacatataaatgatatacatagagcaatatgaatataccacaagtttaaactaatttactattaaattattattcttttctttccatgatatataatagcatacaaaaatcatatgtcataagcctaaacagatatatcatagtgaaaaaaaaaaaaaaaacttaaagttaatattccacaagtttttttttatttctttcatgatgcaccatagcacataagaacaatacagtactccaataaaatgtatctatatcacaaacttaaactattattctacaagttttttttatttatttcattcattatataccatagcacataagaataatataccatagtgaaatacaactataccacaaatatgctaatattaacaagttttattcctatttcgttcattgtataccataacaaataaaactaatatactacactattaaattaatatactacttttaaagtttttttcttaatatattataacctccaaaaaaaatatccataatacaaagtaactataccacacacttaaattaatattccattcttttaattttttttttcttttcttcatcatataccatattacagacaaacttaagctaatattctatcaaaagtttttattttttttttcacaatatataccataggaaataaaattcatataccacaaacctaaataaatatatcatagtaaaaaattaaagtaccacaaatttaccatatttaaaaataaatatactaaaaacttaataaatttacgatatacctcttttaagtatttttttttttcttaatatatcataacacataataaagatttattataatgcaaattaaatgtaccaaaaacttaaattaatatttcattcttgaaatttttttttcttactttcatattcaagatataccacatcacatacaattaatatagagtaatatgaatataccatatcacagtaaagattattttttctggtaagtaaattttctcttgctctttctctatacatttctcagttcactatgttagatcggtagcctcaagcacacataaaaaattgaacatggaacataatgattcaaccatcttaccaacatgtaataataatttttactgtgatatttcaaatcttgattgaaagaaagaaaaaaaaaatcaactcagttgtccagaggagctacggtgtaaagaccgcttagttta

SEQ ID NO: 57477 - DNA, 1345 bp, Cannabis sativa
tgttgcttgacagatatcaatatgttaagaatccaggctacacgtgtattcgttgtagaacacagtgacctcaagtatgtcacaacgtaccttcttcctccccctcaatctctatttgcaattcagatcctagtaagttacgtaaaacacatcggtgccagaattttttaccatgaactcaaaatttattttcaatacaaaccttcccactacattttttttaattcagtcttatttgtgtacaacttaccaatgtgtattttccctgaagttgtaccactaagagaagttgtataaatattatttttctctatgtcttcccttatccacatgagaggtttgaattttgtacaaacttcaaaatttgatgatacagtactacgaggaggaccttgccgactgttactagtgtttggtgatttttactacgaggagattttctttctcgctctgcactctggttccttagaggtagttccaacctcaaagtaggtacctctatagattcatcaacttgtaacttgatatcaccatcctcgtttaaatccactatatgatcattattgtaaaagatagcatcaaactaatcaaatgcattagcagctatgtgctcatctacattagtaggggcctggttattcaaaccaatcacatgatctatttttgggacaaaactcccaacaacacttcttggggggacagttggcggagtaggccccaaatttgcatgccttttaaccttagtcacaaacagtggcagcaagttctccacactcattttttccttcatgcttaagaacaatcttacttgaccatctttcactaaaacctccggtggtatcatattacctttcatgtatatgtaacacacctctaattttagttcatacataaaaaggtcgacttctaactcttcatacaaaattttcatgtatcttctgtaaaattgtgtcaatctcaaacatcaatattttactttttgggttattgaatatccagttaaaacttttaactacccaaaccccatcatacaatacaatcacaaacatagttgaatctgataacaaaaatggacaaacaatgaattcaaatgtcaaaaatgtcgagaaatgcattgttatcaaaagttatcgcaaataatcgcaaacatcaaaagctatcgcaaaaaatcaaaaaatacaaccccttatggcgacatgtttaatattcaaaacaaaaaatcactaactatgtcgcaacatatcatgagacattgttaatgtcgatagctccactatatgtcagcaacaacatcttaagacatcgagatatatcgtaagatgatacccctaacctctaacccaca

SEQ ID NO: 57478 - DNA, 681 bp, Cannabis sativa
  modified_base (445)..(457): a, c, t, g, unknown or other
gtggaagatggagatctcatttttattttttagtatttacagtataaaagaaaaaaaaaattggccaagacagtataaaagtaatttctgccgtgtggtagtatttttataaaaattgggtcgaaaatcagtatttttgtaaatttccctttattaatttattggattttgaagatttgattcctcttgtgtatgtcattttttttatatataaaatatacactattgtcatctgcttttgcataattgtgtgttcagtttcatgtttgcattccatacaagataatttagtacaaaattatcaaccctaataatgtgtatcattaattttcttttttttttttttcaattggaaaaattataggaactatttcacaaatacataaaaacaaccaaaaaattacaaaaatacggttttatggaattttaaacatttttatgattnnnnnnnnnnnnnatttatagaaaatacagtctttttatgttgtactcttgataacttgttgttgattgtttattgttgttttgatattattttcatgttacttttatgtaatttttttgttgttttcgggttgtatttataaaaaactgtaaaaatataaaaaataaattcttaaaacgtgaaaatataattttttttttacactctatacctattttttattttttattttaatt

SEQ ID NO: 57479 - DNA, 575 bp, Cannabis sativa
tgttttttcttaggaataagcacaatgttggtatgatttaactctcttggaaaagaaccaaccacgaaaaaattcttaacaagattgataatatcattacctacagtgctccaacatttttgataaaaacccggtgtcatcccatcaagacctggcgatttttccggatgcatttggaaaagagcacgacgaacctcatcatccgaaaccggctccaacaactgattgttgtgttctctggtgacagccgtaggaacacactgaataacctcttgatcagacacggctgaagctgtaaacaaagctgaaaaatactccaccatgaccgaaggaagcctgcctttccaatcaacccaaacaccagcagaatcttttagcttttggatcgaatttcagcgtctcctagtagtagccgaagcatgaaaatatttagaattactatccccttcacgcaaccaaagttgcttgcttcgctgcttccaaaaaatctcatgctgtagcaacactctattcaaattagcagaagtatttttatagttctcaattgacttcccatcacggcccctcttccattt

SEQ ID NO: 57480 - DNA, 1051 bp, Cannabis sativa
tgcccacaaagagttaccatgtccttcaacaaacggatcgaggaaagagattcttcataagaggctagatccctgaagaatatctcttgacaacaaagatcctacaacaaacatgttcagactaaaccgaaaaggtctacaccatgttacaatgtaacaatgaaggtgcatacaagtctggcgagtacaacaaaaacttagtgttggtacttctacccaaacattaaaataggaaacatctcagtaagtactctctgtagccaacttgtcaattagttcctctaacgtttcaccgtgcaaggacctgtaaaagatctagtttccattgcttttcaggatggcctcccatcactcttcagtgatggccgttgcgcggtaagtcgtgcaggggtagtcactacgtgatttcaaaagtggacactaagctgtaagcttttgttacacgtaagactaactgtgtctaaaccacttgctaacaaagataacttcttaaagttattctttgccagttccacatgcgtacaccaagcagcaccctaagaaaattactaggcaaggtctataaaacttggtaaattgcaagtgaccaagagatcgtaagtttgcgcgttcacttggggagcaccctacaccgtacaatgcattgaactagcacatagaacttatgtagagaaatttcaacgcttagaataagctactaaaactacctttaagtcaagtacaaccatactttggcttaacataaagaaaagtaaatctagatacttacatgtcaaggccctaagaagatagccaggacgatcatatgtccatgataaaagactttaaggctaaatgatagtagtgttcaaaaatagagggcctataggccaaaagcaagaacatgaaaggcataatgctgaatatgaatacaaaatcagttcacatgcataaggctaaggccctgtaagaaccgtatagccagaaaagaaccggacagagtttctataagggctacggctaaggcagagttccttacaggttccaagccatagacaaaactctagacaac

SEQ ID NO: 57481 - DNA, 2296 bp, Cannabis sativa
  modified_base (1387)..(1389): a, c, t, g, unknown or other
  modified_base (1617)..(1618): a, c, t, g, unknown or other
cactctcgattttattttttcaactacactttcatattttaataataatcatataaattattaagtactaatgatgttttaaattataataacgctttaataaattcataggtcatattagagttatattgtattcaaataataaagaacatcttgtttggataaaacttttatattgtataaattatcataactgtaaattttaatataatgtgaatcatattatttaatacatgacaaataatccgtattagtttgtattataatatttagactcgaactttggctacatgacaaataattcgtattagtttgtattataatatttagacccggactttggcgctagactccaaacttgaatctgaacccggacttcacctggacacatccctagaatcggaccctgtactcagacctagaacctagacccgaactcagaccccgactttagaaccaaccctttacccaaaaccagacccaaacctaaccctagacttggctctaaatcccgacccaaacccgaccttagactgggactcgaccccggacccgaacgtaatcccacttggacccgaactcagagtctgcgtcccgactttagacctagctcatattagggttcgagtctgaggttaggatctactctaaggatggggtccgggccaaggttgctgactcagagccagagatgggactgggtttcagggccgaagttgaggttgaggtcccgtttatgataaatagaatataattttatacaatttattaatacaagtcaatacaaaacataatattgtattaaataataccaatacaatctaacacaatactatacaatacaatacaatataacacggtatattaaataagccctctaacattttattatcagtacccaatttgaacctattcgagccagactcaaacatgttgagcaaacattccattctaattattttttaaatctgtgaattagttcttcaataataattaatttgtagaaattaattaagaaacgcatctacaaagatcaaagacatacacatgactatatcatctttgtgtgaaaaaaccctaagaaattaaaatttatccctaccatctttgtgtgaaaactgtatttatggctgtaatgttttagttaagcattacatatagacattgggtgaacttgccaacacaaaaaatatgtcttttttaagtcacaacaacattttaatttacattacaactaaaagtgaaaattctgttaaatcatttttgtattgttattaattatttgagcatagaattattataatttacacaatgtaataaaaatcagatttttttattatttttatttatgtataaatagttttagagagttttttttttttttttnnntaggattctcatttagaggtttttaatttttgtttttttagaaaatatattatttttcactttgctactatgaaacaaaaacaaaaagttaacactatgttttcgtaaaaaaaatcaaaaagttaaaatttgtaataaaaaaaagtaaaaaaatagcgacatttattaccgtgtaaatttagtgtatgtattatatttttagggacacaattttgtcccgtgatgtannttcacggaatgtattccgtgatacattatatgggtctcaggttacattagaaaagtgtcagtgtacgttactattttttaaccctaattacccctagattaatctcagccctcagatcaaataactccctcatctaacggctgttgtacatcactgaatacattccgtgaaagtacaatcacgggacaaaatcatgtccctatatttttaatatggttttctaaaattttgttagatttggctacttttatggcatattttagtttttaaattattttattgtatatttttatgtcatatatgtgtaaacttaatttttaaagcccacatttgatgtttagatgaattattttttaaaaaaatctcaaagctatttattttcctctatttaggtatcctacatacctcaactcttgacagtccacctaccgacctccatttaccagcgctgggaactggctacccacacatccgacgactcaaacagaccctgaatatgagatctctactaccaaaacctcataggatcgaacaaattttgccacagttggagatctagaaaccaatttcttaaactgaaaaattggttttataataaacaaatcttatatgaattttcggtatttgtaattggttgctccattaagaaactactttgattacatagaagtaattggt

SEQ ID NO: 57482 - DNA, 1025 bp, Cannabis sativa
tggcagaaagcatgattttaactttgtgaagtcgccgcggcaaggccattggtggtcgcggcgacgaagtccgtatgactcgaggggcaattttgtatttttgatatttttagtttaaattggttctattaaaggagactttgaatttggaatgacggacactcagaaatacaactctaaaagcagagaagatgacagctagaacgagtgtggcagcccagatccattttaccataagtttctttcttcttctttttattttttttatgttaatttctgtttttagtttaattgtggatttgaacatggaaaatatgaactaattttccaacttagggatatgatgaatgttagttgatattttcctaatttagttaatgtgattgttattttttattttggattattgtgatttgttcttatttgttttaatatatattttagattaacaatcttgaatatgatttatgatcctgatataaaatcagagaagtgaatattaggaatattttaatagaacaaacatagatttaatgtaaaacgagagtatttacataacctgtgtgacaattagattatgtacttaatgcagattatatgttaatttattttagaaatgtaaatagataatatatgattaaggaccttaatgatctgagaagagttagggttatttctataatctgtcatcacttaaagaaaaaaactgataaattgcattgacaattgggtaaatgaaacaacttcatccatagtcaaacacattaaaattgtttcttttattttcctgacacttatttttattttttcccaacaaaatctcgaattaaccaaatagaaacataagtctaatcaagtagtagtcaattcaattttatgtggttcgacctcacctgtgtgagtaaatacttgcaatagtttcatacacttgcgtagattataattttgagcaacaccctatatataatgggcacatccttgaaggacgcaaagaagatatgactcagactttagcaaggtgaatt

SEQ ID NO: 57483 - DNA, 1049 bp, Cannabis sativa
ctagccaactaagcacctacagatagtaggctggccagtccagccttgtgttgtccagaggctggtcggccaggggtggctggctagcttctgtgaggaagctgctctgtcatttaatacccttttgagtgtcgaggtccccatttgctgagtactgatttggccttcttgttggtgaattgtactgccacatggcactaattttgtccatataagcactgccacgtcaggtgggcaaaaattggtataacactgtgcaacaaaaaaatattcttagaactactaaaacacaacataaaaataacaaaacatgtatacaataaaaaaatttatctcgaataaactaaaaatatacagtataacatatgcataaactaaaaaacaacaaagagctataccataaaaaacacataaaaacaacaatataaaaataaatataaaaacaaaaaaagatagttataaataaaaataaaaaatataacatgacatctacctcgttgcaatgcgcaaatcattcataaaccaactccgaataaactacaaaacataaaaaaaatactaattttattaatcatgtaagagagaaaaagatataggagtgctcttgatttttttgaaagagagagaaaaaacgttaaaaaatgatgaaaaaaagtgtgtaaataaaataatcttattttagtaaaggttaaaagaaattaattatgattcttttatgaaatgtgattaattaaagaaaaatagtataatataaattgagtgtgagtagtaacaaaatgtaatagagaaaaaaaaaatatatagcataaatgttttttttttaaaaaaaagtgatgtaaaaaagtacattataatagattaatgttacgtgcacgtatacttagttgtatctttattttattttttgagtagatgatgtgttattttttaattgttataaaataaatatttaatataattatgaaatgaaaatataaaagtaaaatgaagaatatagtcaaatgttttaaaaacaaaatactgttataaatattaataattatgtggat

SEQ ID NO: 57484 - DNA, 1754 bp, Cannabis sativa
atcaaaaagatactcataacatatgtaggcaaagattgagcaacaatcttcaacaagatttccttccctagacgagataataatcgaccatcccaggtatcaattcgattcttaatcttgttcttcaaaaagcccaaaatggtcgacttattcttatcaataatattgggcaaccctaaataatgacttccttcagtagcctcagacatccccaaagaactaaaaaatttagaacgaacatcatgatttatgttaggattaaaaaagatagatgaattattcagattcaccttttgacccaaagccttctcaaaagaagaaagcaagctactaatactaccagcaaagcccaacgtagtgacaaaaaaggtaactatcatcagtgaaaaacatgtggaacaccaccggggctccctgagcaactctacaaccccggataagatgagaaacttcgaatctcttaatgaaagtagagagacctctatcataaataataaaaagataaggagacaaaagatctccctgccttataccacgggtaggaaacataggttccataacatgaccatcatgcaccataaaatatcagaccaatcaaggatacacgagccaaaactagattgatccaacgagtagcaaaacccatacgagtcataatggctctcaactaagatcattcataggcctttctcatatccaactttagagccataaatcccacctttcccctattcttcatcttcatgtaatgcaccccttcaaaagctactatgacattatctgaaataagtttaccaaggatgaatgtactttgagtatcagaaaccacgttatatagtacaaatttcattcaattcgccaaaactttagaagcaattttttatacaccacgctacacaaggcaattggtctcacattacccatattaataggattcttctttttggaataagaactaaattagtatcattcaaactcactggaaaagagccattcacaaagaaatctttcactaccctcaaaccatctccaccaacaatgtcccaatacttttgataaaattccggtcccattccgtctggacctggagacttatgtggatgcatctaaaacaaagcccccttaatttcctcataaaaaataggacgcaatatctcatcattttaattagtatcaatagaagggaaattccattaacaatgtgatcccacccatcttgtccaacatgaaacaaatcttgaaaataggaagtaataaccccttccaaaccactggaccagtctactcacctcctgttagaatcttgcaacttctgaatactattatcacgtttctaagagctatccatggtatgaaaatatttggtatttttatcaccatcctgaagccaaaataccttagcttgttgatgccaaaaagactcttgttgagccaaaacttcaaaacattatcctgctctttctaaaaattttgaactgaaaaagcatccattcgaccctttaaagagctcagtctctttttacatccaacaattcttttcttaaaatcctcagttatctccttatgccaagtcgataactacacactacacaatttaattttctcttataatggtaattaagaatttccttcccaaaatgttttaataatttgagcacacataggctctctagaccaggcattctcatatctgaaacaaggagcgacatgtgtactttgaaccatgaaaagttcaagaagaataggggcatcat

SEQ ID NO: 57485 - DNA, 1355 bp, Cannabis sativa
  modified_base (26)..(37): a, c, t, g, unknown or other
  modified_base (121)..(129): a, c, t, g, unknown or other
ttagtcacaataaattgtaatttttnnnnnnnnnnnntttagccacggaccttttaagtcaacacataaaattaataatttataattagtcacaagtttttcacttttagtcacaagtttnnnnnnnnntaaaagtaaaattttttgtagtaggttagtaacttcataattgcgattaaattaagtgtgagagatgacttaatagaacattgaaatagcttcaatacgcaagttgaatcgcgttaggttaatattgagtgagttatggctgttttattgaaggcaactcacaacccaacgctcaggttgacatttagcgcccaagttgacattccagcgcctaggttgatatatgacgtcaacttggatgttgggtaagtaaaaaaaacatccaatggatgtactttatgatgcctaagtgatattctaatatcatttagtctgtttttatgttctggcaaagttggtcaccaattctcagagatgttgttgttctgcgaaaatgagagactcaaaaactctttatttttgagtgagtttcccatgttcaaaatgagagatgcgaagttgtgaatttgacttatctaacttcatggatcttagttattgtaaaaaactagacgggcagtcaaaatagatcattagaatcaaataagtagaacctagtgcaccaggcagccatttgtcaacctgtgcgctgggcacttcatttccgagcttctgagttgtcgttttgatacttctaaggttcttgaacttggggacaaagtgtcctatcccatttttgaccattacttattgaatggtcgaattagatttgacatttgaatgatcgaaacaagggcgtcaggttgattgtcaacctgggtgctgagcctagtgtcacgggctcacctttttaggtagcgaaacacccgtgcagcaccttgacttctctaagctaaggtcaaccttctaactattcgagtaataattgacttattttttgcgtgactgtgtgcctcgtgcacacttctttctctcgaacaactcccaccgagtcatgctcgcaagcttccatgagtgcatccatgcatcaaggctctctagccaagatactcatactgtctataggttcacactatgataaggtaaatctcaacaccgtcgctcacctagtcactcgtgaccaaggtagcatgtgtggcaagatgccaacaccaagttaacgtatcaaccttccaatcatgccccattcgatattgttcgaactatcttcctcatcgctcaaggaatcacatacatccatggtccaatcctcaaggcactatgcctccacgcatgttggcaggccctcgagacaagctaccaaacta

SEQ ID NO: 57486 - DNA, 1162 bp, Cannabis sativa
agaggaggaaattagtgcagaaatagttcaatatttttctggtttattctcttcaaatggggttgataatgaggctttgaaccatgtaatttccactgttgatacagccataacccctgatcaaaaccagcagctgttgctgccgtttacagctactgaagtagacaatgcactcaaatctatggctcccgataaagcacctggtatagatggaatgtcagcaatgtttttccaacattattgggatatagttgggcctcttgttactcaaaatgtgctgaaaattctgaatgaaggtgaagatatggattccatcaattcgactttaatcactcttattccaaaggttgatcatcctaaacttgtgagtgaatatagacccatcagtttatgcacagtcatttacaagttagtgtccaaagttattgcagccagatttaaagatgctttgccccatgtgatatctcaaatcaaagcgcatttctaccaaatcggttgattacagataatgtacttcttgcttttaaattggtacattgtcttgagaacaaaaaaacaggtagaatgggttatgcagctttaaagctagatatgagtaaagctttcgaccgagttgaatggtcttttctgaaggaagtcatgatcaagatgggtttccatattaactgggtgactttggttctgaagtgtgtatcttctgcgcaactttcttttaatctcaatggctccatcaaaggcttggttgttccaaagcgtggtcttcgtcaagggattccgttatcaccatatttatttcttatttgctcagaagggctctcagctctattaaagaatgaagaaatgttaggaaatttgaagggtttgactatagctaggggtgctccagctgtttctcaccttctgttcgcggatgatagtttgctattttgtcaagcaactaaggattcttgtcaagttgttaatagagctcttgattattaccatcgtgcttcaagacaacttcttaatacagataaaacggttatgtccttctcgccaaatacatcttctgcagttaaagatcggtttcataatgtccttggtatgcctatttgttctctccatgaaaaatatcttggtcttccctcttatgcgggcaaagacaaaaaagagcttttcagta

SEQ ID NO: 57487 - DNA, 1059 bp, Cannabis sativa
  modified_base (533)..(533): a, c, t, g, unknown or other
aaccatgcaacataaaatcgatttctgatatgatattaattagtaaatcttattatattgaaatgggtttattttgggcacaaaacccaacaataatttgggtcatttcttgttagttgtagaaccctttggtacccatttagtctttcctagatatgcatattttttcacatgacaataaaaaatagtatgaccatcttagttacaatattaatatgtgcatgtaaagtgaggtagactagatgattttaccaaaaaagtttctcaaaaacttttgttttctactaggatcatagccaatgccacttttctaaaatcatatgattgacttcctagcatgagatcataaccttctttacctctagtaaaagtatatatgtcattctttaggctttttacatgagcatttaaatcaataatttctttcttatatgaagaacatgtagcacattgagacttaactaaaagttctttttcatttaatttttaaaatctcaatttcttctagaagcatgttgatcttctctctaagngtttggtttttagcaagcaatttaccaaaatcatcaaatagttccttaaatgaattagacaactaatcttatgtcatatctaaattatcatcattctcactatcacaatcattttggctagaaatccttatcccatcatcaagcgctatcatgcacatatttgctacttcattcttttcttcattttaggagtcttcttcatcactattgagccaatctgccaacattacccttcctttgtatttgttcttcttcttcattggacaatccattttcatttgtccgggattctttcattcaaagaaaattggtggatcatctttgatctttctctcttttaactcactcgctctttgtggcttattcccaaagttctttttgaatttcattaaccttttgtatttcttggagaagactgtcaagtcattcatgtcactacacaagctatcctcatcttcttcactaatggcatgggaggaggaagacttgaatgcaatagtcttctttttcttctcaacttcctctt

SEQ ID NO: 57488 - DNA, 1926 bp, Cannabis sativa
  modified_base (406)..(406): a, c, t, g, unknown or other
  modified_base (1882)..(1893): a, c, t, g, unknown or other
gctactatcagccctacaactgaagaggggcctgaagaagaagaggccaacatttgtcattgctcccgtcgtgtacaatgcaaaagtggaggagtcaactccacctgtaattgagtaggtgttagatgaatttagagctggtgcctggtgcaaaggccccaactagagcaacataccgattgtctcccccagaacttaaggagttgaagaggtagctaacagtgatgttagaggcaggattcatcaaaccatcaaaggcaccttttggtgcccccgtgttgttctagaagaagaaggatgggaccttgagactgtgcataaactaccgtgccctcaacaaggtgactgtgcgcaatagatacccgattcccttgatcgctgatctatttgaccagctaagtggagnaaatacttcacgaagttggacttgagattaggctactatcaggttcagatcgcagaaggggatgaaccaaagattacttgtgttactctgtatgcggaatttgagttttgcgtcatgccatttgggttgacaaatgtgccagccacattctgtacactcatgaatgaagtcttccatgaggacttagacaagtttgtggtggtgtacctagatgatatcgtggtctacaacgccactttagaagagcatcgggaacactttgctacggtgtttcagaagatgaggaaagagtagctatatgcgaaacgagagaagtgctcgtttgctcaagaaagtatcaagttcttgggtcaagtcgtggaacacgggaagatccgtatggatttagaaaaggtgcgagcaatccaagagtggacgaccgcagccaatgtgaaacaactacgctcgtttctcagtttcgccaattactatagaagatttatggaggactattcgagaagagcggcacccttgacagagttgttgaagaagggtgttatatggacgtggtctgagaagtgcaaagaagctttcgaagtctaaaaggagccatgatcgaagatcctgtgttagccatgtcagatgtatgcaaaccctctgaagtacagacagatgcatcagattatgctttccgaagcagaaaggcggtatactgcgcaagagaaagagctcctgcaagttattcattgtttacaaacgtggaggcattacttgttagggtcgaagtttgtggtgaagacggacaatactgctgttagtcatttcctcacgcagccaaaactgacttctaagcaggcccgatggcaggaattctcggcaaaattcgacttctactttgagcacaaggccagatgtctcaatcaggcagctgatgcccttagtcgtaaagcagagttggcggcactaaaggtgttagcgggtatgtcaactagccaagtgggtacacaaatcacgaagcgcataaaggagaacctggagaaggacctagttgcaaagaatatcatggctcttgcaagaaaaggaaagacaactcagttttgggtagaggatgacctcttgtggaccaaaggtgggcgtttgtatgttccaaaggcaggaaatcttaggaggatgctggtgagtgagtgtcatgacacgttgtgggtgggtcatcaagggtggcataggacacatgcccttttgaagcatggatactattggccacagatgcggaaggatgtggtggactacacaaggacctgtctcgtctgccaacaagacaaagtgaagaggcataagacgccagggttattagaacctttcactacaagaaatgtcacatttaccagcatagttcgctactgcactggtaaaagtaacttttaccagcacattttgtaaacttcgctggcaaagaggtcaaagttttaccggcatacatttgcagtggctaaaatnnnnnnnnnnnnagcgcatttacgcgttaggaaaagtcatttttg

SEQ ID NO: 57489 - DNA, 862 bp, Cannabis sativa
tgggggtttaatgaaactaaaacgaaagtattgagagttttgccgccatttacctaaaataaattgctactctcttttattattattatttttatatatataagtacaactcttttaaataactagtcatctctttttttattattattaaaaattaattaagtaactctaacaattataaattaagttaataattaaatttacttcaatttcaatctcaaacaattttaacactattattgataaattgtgcagttaagacaagtaatgataaacttgggagaaagattaacagacgaagaagctgaacaaatgataagagaggctgatattgatggcgatggtcaagtgaattatgatgaatttgcaagaattatgatgcttaactgataaattactgcaaataataactaatttaaactatttcccacctttgcacatgctttattatataaacattttgaatggaataaaatatagagctaactttctatttttatttttttcaaactgaatgttggaattctatttttttatttttgaagtgctggctatggataataaaaaaaatagttaattaagatttttactctttgaactttgacatgtattaattcatgtctttaaattttttaggtcgtcaaaaattctcctagaattattgagattgttaaatattagaatttttgtctaattttatttaattttactaatatgacgattggccatatactaaatcgtgctccctgaacttcaatatttgaaaaagtatgccctttaaactttaacatgtactgaattgtgccccataaatttttatccacgtcaaattttctttaataaaattagataaaaatcctta

SEQ ID NO: 57490 - DNA, 940 bp, Cannabis sativa
  modified_base (913)..(914): a, c, t, g, unknown or other
ccttgattatcgtgtaattgccctaaatcaggtttatgatgtctgacacgtcctcttatgggctttcccaaacattttctaaatgcgaagtgactgttcaactctagccttactggcccagagaaacccatccgtgctttgactcccggagaagaagatgggccttttttctcatgtccgggagctagccctttgaatcgtacttattgtttcttaaggtggttttgttaaatctgcaactcatctccaggtgacgtgcccatgtcagccacatgtcatactaaacagctgccatgtatattgggagaaaagcggagtaacatttaccctccaagtctcatttagtcgtacgtgaatgagacttgtaactcgtctccggtgtcaatacaatgacacgtgcccttggcacgtgggcagtatttatgatcgccatcattggcctttgtttcttttacaagcaacgattcatttcctgcctattgacaatcctttctattaatgtcggtgtcaaaaaggtattcaagcatctcaaccgccctttctcttcatcatacccgttcatctcatccgttgaatcaaggaatctgaatcgttgtgaacccccaccgttcgatggtgttcgattgacactgtcttgcaccccaaatgagctataaaagccaacacttcccccaactgggtcatttatactgcatttcaatttacaaattttcaaacacacttgacaaaattccagacgcccttgatttccttccgctcttcctccgccgttgtcaggcaaagtattaccaccacaagacgtctttggccccagccttggtgtctttgtgtaagttttctctgcttatatatttctttcatctgttaaggcaagtagtgacaataatgcgtctatgttgggttttatgccctnnataaaactctttacaatctgattagt

SEQ ID NO: 57491 - DNA, 2402 bp, Cannabis sativa
  modified_base (69)..(75): a, c, t, g, unknown or other
  modified_base (223)..(223): a, c, t, g, unknown or other
atatattttataaaattatttatgtagaattagtaattttattcaaaattgtaatacatgtataaatannnnnnntactcaaaaataattctattatgatataacattaatgattatttaatgtcattgttgttacattgatatttttttatattttgaattttttttttagtgtaaccctatttagttataacctctcaattagaatataatttgcttagtnccagtgtattcttggatagaggttctactgtatttgtttttagtgagtggtttttttttattagaatgcacgaattttccttttccaactttacattttaattaagtaaaatcttagaatagatacacacaggatgacttctgagggtaggcgagttaggcgtgcctcgggtccctgaccgttcatggtctcgaaattattggaaaaaggaaatataacaaaattggtttggtgtattgataaaccacccttgtccttgtattttttttattatttaaattgaattgtgtaacacagaaatatttattacttcacaaaagaaaggtgccatcttccttaacaagtttcatttcactaatatctacccatgactaacgtggtgccgtgctactaaacaccttaactcaccattttctaacagttagaatagtcgaccaggtttgagtatgaagagttaatgtcttgccattggtctcacccatttccaaactcgcacggttcttcagctaagtgaaacgattcgacatacgatttcagtggagggattaacgtagcaggttcttgaacatgtagttccccactttcattgcatttgagtatacaaagctatctttgaaacatataattttatctggaattgttttgcttcaaaatatgtggtcattggagtgctatatttattgtttgaagtttcttgtatctagctacttacttaacttattctattcgttgatgattcacttaataaattagttcaatattctatttgtcaagttttttttttaaaatgtattatatttgtgaagttaaaatataaatttaattttgtgagcagaatgtgatcaggggcaattttaatagtacttttcctctattggagatctaagaattgtaagatttgggttcttttgtctaatatagtgcttatttatttggaaatttaaaaatctaatacagataatataatgctataatttataaaaacgccatgtgtgtaattttataaagtaatttagtattaatagattgactaatcattaaaatctgtaataatattaaaaacttcactaaaataaaatcctaaaaacagacattataacgatcctaaaattttgttaaagggattcctgttataaaaattttacaaaagaactatatacaataacacgtcaaaatacgaaatcaaaatacacagtaaatatagcccaaaacaacttctggaaactcggcacacaaacttgtttataaacagaaatatctttacagacttttcagaacataaagcctaacaccaagtttccaatatgtaagtatgagcttgtcttatgggtaagctggtaacgaaaaaattaaaaaactctaataatacaattttaaagcttaatcatctcaggattcagatcagttgatctatgatcaagtaactaatattgcactagaaaaatataaccataaatttatgatatctttttccctgacagatatcggcccagtccaatgtaaactctatacatctgatccttgtttactttagtactaataccttgaaaaagacatttcacttagtcaagtataaataactatattgttgattatcacatcagtgtaaatccagtgcacaaatcctgaaactcaaatactattttacactatggtgacaatattataattgtgaatatctatatgatcaagatttaacagaatttatatattaaacaattaatcatgaaataaacatgtgaatcaagaaatatacaatagtcaaaaatgatctctaatcttttattgatagataaataagattacattgaaataaaattttatttagggcataaaacttaacacatatatcttcagttccttaaaatctgaagacataggtcttcaattttagggtctttgataggcttgcgtgtagggcctaagtcttcgacacattactgacaccaaagagatataggttatcttcgaccctcttagcttcaattttttttttaaaaacgaagatatacccaaaattttaattggcgtcaggctaaaagcaatgatatgagtcttaaaaaaaaattatcttcgagtttttaatttttaaaagaaaaaaccaaagataaatagtatatttgtgctagatattttattaaaatggaagaaaattaatatattacaactctattgtaaa

SEQ ID NO: 57492 - DNA, 654 bp, Cannabis sativa
ccaaggtcatagtggtgggcttgcgttattttggaaagaacaaaagatggcaatgttgaaaggttattctaataaccatattgatgttattatcaatgttaatgaccgagtgcaatggcgtttgactggagtttatggtgaacccaatagagctttaaggagaaatacctggaatctttttcgatccttgcatttagaatctcaacttccttggtgtttgatcggcgacatgaataatttgggaggacaagatgagaagagagggggtcggagctaccctacttggctagtggaaggatttcgggctgctcttgatcattgcggtttaattgacttgagtttggaagggtacccattcacatgggagaaaggaaaaggttcaagtaactgggtggaggagaggctagataaagcgttagtttcttctgcttggcttcagatgtttcctttggcaaaattgtataatgtggaactctctacttcggaccactgtcccatcatcctagttccggaagcttactcttcaggtttgcatactcgctcttttcgctttgaaaatgcttggttacgtgagcctatgtgtagagaggttgttaggagtaattgggaagctttgaatgggagggatttaatggataaaattaagagttgtgg

SEQ ID NO: 57493 - DNA, 1299 bp, Cannabis sativa
tatccttgtgaagactataatagtgtccatcatagaaaccaaacttcttttctttttgtcaattacgttttgttttatccattttatagatttgaagtttctaaatttatatatcgttgaatatctttcttcaagaaaataagtcaaatgttgtagtgtaattttacaaaatataagatctatctttatttgtaaaaaaaaaaagtgtttggaaaaatatatgttttctagttgttatttatttaaatttagaaaattctaaaatacatcgaatgcactaatgtactcctatttattttaacattcgaaataattttttagtctattttttttaataatcatgtacgttatagttatttaagatatcctgcaaaattttaagaaagttgaaaaaatttaacacaccgaaaatagagttcaaaaaattttatacctgtgtgaaataaattgtttgaacactactttttatattataaattattctaaacttttcaaagttttgtaagatatcttaaataactataacgtaaacgaatataaaaaaagattaaatatttttttttttgaatgtcgaaatatataagagtgtatcaatacaccccttttaatggtgtggaatatattttattgttcttttttataagaaattaaaattttaaaaattgattgagcattgttattcttttttaatgagtgattccgaatggttagcattttttttggtagtaattgttaaattataatatatttgacacaatattattaaaattattattattttaacaataaacaaacttttattaaaaaaaattaactttgagtacataataagaagagatgaaaaaattccatccaaactaaacatgcaacacaaagtcaatacaccccttttaaagaatctaatgatggaccataacccatactacacatgcaacacaaagtcaattagtcaacttttcattgggtagagctagtagttagcacgtaaaaatgtcaaacactatatactcttagttattgattttctatattaaacttaatattaaaatacatcaattgtaattttgtcaatttgaattaacgttgtttgtttgtttggtgtttggttcttttcagatagtattattgatgttatattattttatataatatttatattaaataattaagttgtacattattaagtatgacagagtagtaattttgtcaaattgtaatatacattttggagttacaaaatgtgtagaatgatcacaaaatagaaattgcaaatcctttaaattgatgatcacttgaata

SEQ ID NO: 57494 - DNA, 1448 bp, Cannabis sativa
cagctggggctctattcacgctaattaatgggccttgggcccccataacaccagaggcaggaggatacaggtcatacctctgaaagttggccgcactggccaattgaattatgttcatcttatccgtaaggagggacaggatgtgatttgccctatctctcatatgcaatgtagggatgaagcacttataaaatggtactcactggaaatggtggtgttggatctcacagatgtcccaagcaatgaagtagttttgggcatacccactaactttggacataaggggtagactttagatcgaagtaatatctaatctcatatgaagtaggccgaggccagcctagctctgcatacaaaacaaacatcgttgaaagatactttatacttgatttgtgttggacacataccgaagtaagcaatgatgtctctgaagtatgggtgtagtggcaacactgcccctattgtatatgatgctccaaccatgccatctaactgacagcaagtcggtgtgctctctgatctctagtgggtatctcacactagacacccctcataatatcactagtcaatatcttgtcaaaagtcttaacgagaatgacgaatgcgggagagacccacctgtctccctacgacctagcatccaaaacctgaggctctgaagactaaattaagacatggtccagacccatcactgaaggatgaccaagcttgttcaatgactccctatcagcatcatatccaccaagagggctgttagcgaggacagaacaagttctgtaagtccttctcctaactggcgcaacctcttccacctcagattcggagttagactatcgaccccctagtcaaccacaagtacctctgcttgatcgacctctgggtctacatcctcacgaggttgtgtggcctcctctataactctaactttggccatagttgccacccctagcaacatgggggtcatatggtagtgcactatgatatgatcatttcgttctgggcatgattatcgatctgagatcacacaaaaggagtaaggggacagactaaatgctctatcttaaaagcgaggctgacaggacctatgacacaacaactgtcacctcccaaaatcacctacatagaagagacaagggaaggtgagcaacctgataaagctacagacaaagttctagtcaattgtacctaagggtaccttccaagtaaatcacattgtacaaggctgagtatcagcgaagtaccgacttaagtacatttacttagacaaatagtgagttctaagttgtgcgcttgactataatgaactcactaccaagtctcataaagagtttccaagaggactgcacatgagattacatttgtatatgcctccaaggtcgtcacgagaccctagccgaggtcaacaaaggaaaaaaaattagccacccgcttggaaccttggccttggc

SEQ ID NO: 57495 - DNA, 805 bp, Cannabis sativa
attgtcctattcttctcattccctacaataccgaaattgttactgctaagaagattttcaggttcgaaaatgcctggttgagagaaccaatgtgcactcaaattgtgaaggatggctgggacttaactcatggctgcaatattactgacaagatttcttattgcagcacccttttggccgattggggcaaaagctatactggagatttcaaagacagaataaagaaacttaaagaagatgtaagaaagttcagaaaaggcagagatgctatctcgattgatcagtttaaagaggcggagaaacaactctttgaagtttatacacaaaagaagttttttggagacaaaggtctaagcagctttggcttagagaaggagatcataatagtaagtattttcacaactctgcatctgctcgtagaaggcataattcaatctctaaacttaaagatgagaacggcacctggaaagattggcaaaatggtctctctgatgttatcaatgggtattttgatgcgttattttgctcctcacagactaatactatccctgtgacaagccttataccgtctacaattactccctcccaaaatgaagctttaatcgctccagtttctgctgaagaagttcgtagagccttattccagatgcaccccgataaatcccctggccctgacggaatgacaccagccttctatcaacgttgttggggaattgtcagctcggatgttatacaactcgtaagaaacttcatgactacaggtaacttaccttgtggcctcaatgatacaaacattgttctcata

SEQ ID NO: 57496 - DNA, 1863 bp, Cannabis sativa
  modified_base (1773)..(1788): a, c, t, g, unknown or other
ttttttttcctttttactttttttaattttaaaaaataaaaaaattaattttttttttactttttttattcttctttattctttcttcttcttttttaattataaatataaaagcattttgctgcaaacaatccttttgtaaaaacttaactcgtaaaattgtaaataaaacataatgaaaaaagtatttttgaaaaaacccaaatcttttttctttattaataagaaaaatatgattaaagtatctgaccgctttatggttgctaaatccaattagtgcatcttaatataaatagctcactttttttgaaatataaatagctcacttaagagataatttgatgcatattaatcgatataaaggaatatgcatcatttgtaatttttatggactacaagtgctaataacacatgggcttgctcgtaaagtgaagcccaaacctaagtggtctgacgttaatatgcaaaaaaaaaaaaaaaaaaaaacaaacaaacaggatttacaaaaatattggattttgggaaaaaatttacgattttactattatacagaatttttacaaaaatattgtctaacaactgtaaaataataaaagagaacaattaaaacaacagtagaacaactaaaaaacaactgtagaaaaacagtaaaaacttaacacaatacactacagtataaaatatacacagtatttttttaaaaaattctgcctcagtaaaaaagaaaaatgtaagaaattttagtatgtgtaaaactctccaaaaaaaaaaaataataaaaaagactttacaataatatacatttttttcatctaatttataataatgacgttactattattattgacgtgccatgtcaactaaataatttaatgtttctgatatttttttgacatttttcagttttttttttttgttattttcatgctttttcaaaagtaactttttgaaaataatagtgttgataagaaacaaattagttatttatataaaaatattatttttatatcatataatgagatacattttagttactctctaaaaacttatttatatacattttagtaactaattagttatttttaagttaaattatagtatattataatttaaaatacatttagataaccttaaaaaaattcgaaactaatgaattgtcatataatataataagctactatttttatatactaattattttatatatctttttattattttaaaaactaattagttatcatataatataataataaaaatcgaatcgaaatagcaaaacacaaccctaatcacactgcacctatacccaagaaggcaggcgggcctcgctgaagaaaaaaaaaactcttgtagttataaatttaggaactaaattagatataacattagttactttatagctactataagggttcgtattaatttcaaaataaacaaaaaaatacataaataaataagagtaaatactattttggatcttgtgttttgcaaacgttatcgactgaattttctgttttgttaaatgacaaaattgatcttatattttctaaaatagtaaaaatagaaccctgagctcaattttcaaaaaaaatattttttaatataatcaactttaaaataatttctaacacgaacaaatacagaaaatgtaatcagttttgtcataacatctctagatcagattattattaagttttattttgacaaaaagtcaaaaaatcagttcagggtcctatttttacaatttcagaaaatacaaggtctattttgtcnnnnnnnnnnnnnnnnggtccaattgataacttttataaaatacaaggtctaaaatagtatctatccaataaataaataaggaggaccatg

SEQ ID NO: 57497 - DNA, 1318 bp, Cannabis sativa
  modified_base (395)..(399): a, c, t, g, unknown or other
  modified_base (1204)..(1242): a, c, t, g, unknown or other
cgatggtcctcataattttattttttattgtttattgtcattggaaaactcattccaatatataggaatagtaattcagtaaactaggaaattacttttcttattcttaaataaaatgacttgaaaagccattccatactaaataaaaattacttttccttatctagccttctcaataataaatgattaaaattataattatatgagtaacattttttattttaaaacatatatctacaacatttaatattacaataatatgtttactatatatttcttttgtatagaattataggaaaacaatattattattataattatatggatagacaatatgtgatgattaaattatatgaataatatttatgttgatacttaaatatttaatataaaannnnntattaaattaaatatttatttatattttattatttgataattagatctaaaaagtataatttgagagtgataaataattaaatatatattatttttctatttgtaccatatataatggtaattttataaaacaaaaattattttaaaagagtaaagaatattttggtcaaaataataaaaattcaatttgaatccacactataccaaacaccacaattcttatttaattattgatttcatagtgttaaccaaacaaaagaataaaaattctattttattctattcttattcctattactatttctattctcatttttattgtatttttattttataaataaacaccactttacatatttttactttattatatataagtattaaattaaatgtaataaattaggaaactatctaataaattttgccacaattatcctatgatatatatagaattataggctatatataaatgcttatatatgaaaacaagtacattttaaaaaaattatcaaacaaaaaatatattttaagccaaaaaagtaaaatgtaatatatatatacaaaagtaaatatatctatttaagtaaacgcgtttaagtttaaattaggtattagtaatttttagattatattgcccaccaaatgaaatccctaggattttttgcttttacttaatccaagatccaatccaacaataaaagtagttattcaagataaaaaataaaaaaaaacttttcaagatttgtttcaattaatttagttactatttaacaatgttaaacttttcaaaataataataataatnnnnnnnnnnnnnnnnnnnnnnnnnnnnnnnnnnnnnnnaataataataataaatactatttaaggaatgattatagttgagaaaattattaaaagaaatggattttgttccata

SEQ ID NO: 57498 - DNA, 1028 bp, Cannabis sativa
aaaaaaaactcacaaataagacaagaacgacttgttatattgttagtttagtttcattccgaagacccaatatcgacccattaacgagccttaaggctcttctctttgcaattgggccaacagtcttcaatattagcccattagttgacttcaatcatattcattccaggattacttcacaattattagggaaaacaaatattgggatctttatttcttttttttttaaacaaatgattaattaactatatttcttaattttattcatagaaattcgttaaataataattttacgaatcaaataatcagtcgtctaatttataaattatttgataaaaaaattaaaaataaaatcagatgaaaattattataacatcacagttaactttaaaagcatctatattcagtttcatttttcgcctagaagacataacaatagaaactagcaggttcattcaacctcgtagcttgagcactaaactattgtgcaaggtgttagactttttatttggacttacattgacttttattagttttattaaaacttgggttgattggataattttttactatgttagcccatattgttagttatcagtagttaattggctaagcatttgtgtgtctaaagtctaaatgaactgttaaagaaaaagtgtgagcttttctagggaaacttataaaaataatagaatttaagttaacttttacaaaaatactaccacatggaatttttttcaaaaatactgtgtttttataaaacaacagtgaaacacaaaacaaaacaaaacaactaaaaataacagtggaacaactaaaaaataatcgtagaacaacaatgaaaacttaatacagtacacagtataaaacttacacagtatttttgaaaaaaactctgtcccacaataaaaaagtaaaaaaaaattaaaatttcactatgtggtgtaaataattccttttctactaactgaagcctttcatgagtaggcccagtccaactagggttatatagctaagtcccctcccta

SEQ ID NO: 57499 - DNA, 789 bp, Cannabis sativa
gttttttgatttaatggcctctaagcctactgaagtggttcgggaagcagctatgattagctggaaaatatgggcggtccgtaatgatcttgtgtggaatgacaagacttgttcagcgtatgaagtggttcgatcggctagagtcgtccttgaccaatggttaaatgctcaatcacaaaaacatggggcattattaatagatgatattaataatgttaatgagcactggaagaaaccaatgttaaatacggttaaggttaatgttgatggtgccatttttcaagcggagaacaagttcggttttggttgtatagcaagagatcacaatggacagcttattgaagctatctcagggagccgaattggtttggttcagcctgaaattgctgaagtaattggggtcaaagaggcattaagttggataaaaagaaagaagtgggcaagtgtggtgatcgagaccgatgctttaatggttgttcaagcaattcaaagttctatatgcatgccatcacagtttggtctaattgttcgagattttcgagagcttctttctaatttaaatgatgtttctttaagatttgttaaacgatctgcaaataaggctgctcattgcatagcaagagggtctagtttaaagtcagattgtattttcagtgggactaatgctccttttcaattaaggtctattgtaactactgaaagttattgaataaattccatcctttattcaaaaaaaaaaaagaaaaaaaaaaattaactcgtgtagtcccttcctaataatataaataa

SEQ ID NO: 57500 - DNA, 749 bp, Cannabis sativa
atttttgtaaaagttaacctaaattccagtatttttctaagtttccctaataatatcagtttatacctaaaagtaccactgaccacaatgtcactcttaaccagcactatactcgtactgtcgactcggtactatactttgtactgctacaagagcgccaattttaatactttatgaaattaaatatttgtcaaaactagcactatactcgcatggctgaatcgacactatagtttgcgttgccatgatgctaattcattcattctaaccactaccagtactatagttgtgatgcgaacccgacactataatttgcgccactatgatatcaatgcatttattctaataacataatcatgtatatcacatgcacacatagatatacacattatatattattcttacctcgtttccagattcaagggtgccaatcaccctgaatagaaatttcactcccatgccacatttacgtaaaatgggtaaacaaccaattattatgccacaacattaacgttgactgcataagagagatatacactcagaatactaaacattaagactttaatatgagaaaagataccccttatcattttagtacattgtgaacgactttaaagccaacataaaagagaacgaatataaaaagattcccatgattggtagtagggtcggccattaacccgtgcaaagagtgctaatgcacagggcccacaaattaaaaaagtccaatatgactttttaggattttt

SEQ ID NO: 57501 - DNA, 689 bp, Cannabis sativa
  modified_base (628)..(630): a, c, t, g, unknown or other
ttcctaacccctcttgatgatatataattgcttatttaaacaaataaatatatattttataccataaattctggacgattttttatcatttgttttggacagatctaagtgcgtggatctgtccaaaccaaaaacataaactataattaattgatcatatatatatatttagtttactacattaaacatacaagttaagacaaagatgtagttttttatattaattaatgtataataattaacaagttcaaacttcaaatagaattgtgtatatgtgcattaagtcatatgggctaaattttcaatggttttctgaggtgtactacttttgttgtttaatttggtcaatcccaataagcacctaattaattatataattaaccttaaccttattaattattagtatagtatttactatttttaatgatcatttttcttctaatatactctttttgcaccatttggagagttctcaactactagaataagttggactacttagacttcatattttagaacaaagggcaaaaatagtaattacatattattattattattaagaaaattttatttacaccccaaaaacgtttaataaagatactctattataataatttttattttatannnaatttatatctttaattgtattaagtttttttaagttttttcttccaattcatattctt

SEQ ID NO: 57502 - DNA, 888 bp, Cannabis sativa
gtttgaataattttaaagttcaaagcctaatgcaaatttctagccgtgagtgggacttggaggttgtctcggatctttttgataccagggatcaggccctcattttgagtgtccctcttagtaataatgctgaggaggatacgtggtattggaaaaagaatgccactggtttctatactgttaaaagtgcataccagtatctacaggaagttaaaggtgcgtggggattggaagctgaggatttagcttggaagactctttggaaaatcaaagttccacctaaggttcttcaccttatttggaaggctctctctgggtgcttaccaactaaagcacaattacaatcaaaacatgttttagtggggctggagtgtccattttgcaataatgcagcagagaccattgagcatgtgctcttgttctgcaatttcagcacttcttgttggattcgatctgggtggggaagcgcaccagctcaacacgtcagttttgtggactggtttaatgctctaatcagtcggcaaacaccagaaatcattgaagagggagtaatgatgtgttggtctatttggaagtcccgcaacgatgtcgtttggaaccaaaaaaattgttctgcagctgatgtagtatgtaccgcgaagttaattcttgctcaatggaagtacgctcaatcaaggaagtttgatccccttcatgtgccggctggtacttttgaaggaagcgagcgttggtcgaaaccggataccaaatatgactaagattaacgtcgacggggctgtgtttgctgctgaaaatgcttatggttcagggatggttgttcgtgatgatggtggacggttgattgaggctactgctagcttcgtgattgggggtactcaaccggaattg

SEQ ID NO: 57503 - DNA, 1432 bp, Cannabis sativa
gccaaaaatggaattaacacatattaattaatgtgtatatttttattattattattatgatactatagtgttcacaatttcatatcgctatgctccaaaattattacattctactgaatatttttggtttgtgattttgacttaatatttttggtaaataacaggttgttgatggcaatatgaagtttatttatgcttatgagcgcttttattaattttgaaaaatttaatctaaatctgccaataaattttgatctgctaagaagttatcgagattggcagttatgctctcgagctcattgttcattaattctgttgacgcattatttggtggttcttgctctactacgatattcttctcgtcattcatgtatacttcagtcgactcttgctctgctaccataatattttcttgtactaatttttgtctttttatgtttggttcttcattctcattatttgtaaacgtcttctttagctttgatttcattttataaatcttgcataacatccaagtatattgctgcaaaagaataaattaaaattaagtaattagactttattattaggtagatatgcatgcaataaatattataaaagtgaatactaattatatatgatcattaataagggtatttgttactacctgtgtgtcattggattgaagcaaatgatactcggtcatttttcataaagttagttttttgtctggctcgataaaatctagagtccttttaaaacctatctggatcttgtgttgattgaagattgacttctttgttgcattgccatgccaagttttattttttgcttttcgattgaatattctcttattattctttgacgttgtggaaaatgaatcttttttataatagaaataccactcattttcagtcatcagcgagtatcgatctataaaattattgataatatacaaacataatgtgagtaataaaattaaagaaaaaggaatcaataaaagaaaagaattaaatatattgttgtattgaattcttacgagtgagttcttgaggatgaaagtcataaatattgacatcgggaatgtgattgggttgaagtagatgagtgttgaagtttttgttatatacataaaatccaactatttcttcattactagggagaaatctaatcccggccggtaaaagattattaaacaccatagttaattattgaaatacgtctaagtagcttataaatcagctgagactacaaaaacatatataatacctacgtataattaaaccatatacatatattgtagccgccttaaaaaaaatatgttatttgggatatttaaatttaaatatctatctttattttatggttccagtccagatatttccgattcttgatttttgtctttgatttctaaaagcattcagttaattggtttctaaagtaaattctaagc

SEQ ID NO: 57504 - DNA, 897 bp, Cannabis sativa
tgaaatcaccccaaataattttttctattctctccttaattctctcatttttataattttaaattttattttattatttttcctaatattttatttataaaacttgaactatgcctactaagtttatttttcttaataaaaaaaattgcatatatagtttattatttaattattttcataatttttattatattaaatttgtataattattttcttaatcacacatctgttgaaaagggaggatgctacagaaagcgcattggacgacaatctccaaacaaaaagtttaacttttaggggagtggtagatgtccatattttagaccaaaactttgttgaggcagagaaggaagatgaagagggaagatcttgttgtgaaatggccaaatggtaagcagatttagcagtgaaagtaccagaacttttcctttcccaaatcatatcatcacggccgtaacacctaaaaacaggaacctcaagaatgtcattaaccatagaatcatcaaaataggatcttaatttagctacatcccaagctcctgagtcattaataaagtaggacaacaagcaagaggagagagagtcattgctattaaaaaacctatttttgtggttgggaatccaatgatcatccagagttctaatacaacttccattgcctactttccaaatgagccccgaagccattaaatctctaccccataaaatacttttctccatgtataagaaggatttatgtgacaccagggacagcctcaagaatagaagagtggggaaagttaacgagccttaagaaccaaactaaggagggaagtgcgatttttaaggattcgccaagcctgcttaggaagcatagcctgattgaaatgaacaagtgatcgaaaacccaggccacct

SEQ ID NO: 57505 - DNA, 2821 bp, Cannabis sativa
ctaaagactaagcatataatagcatcaagtatcactttattaaagatttttgaactttgaagcaaataaaaaatgtaactcaagtattacattgaagagcagttaatagacatactcacaaaaacattatcaagaaacaaatttaaactattacgagatatgatgggaattacaaaaatatgtaccaaaaaaaagtattaaaatttgtacacatttaaatatttcttggaaatatgttgaatagtaatagaatttctagaactttttcattgtaggaacttctagttgtatatattaaaaatgttgattagaatgatctacaaaaaatgtaatatctactactagtgtaatgtcggtttggtatataccacctattctagctatcacataataagtagctctcaatgtatccaaaatgatatgtaacgaggaatcaatcacttcaaacaataactaaaagccaagccttcactacctcttactactattccataatatactaatctaaccttccaataccttaatacaaaaaaaaaaaaaaaaaaaagcccaacataactcttctaacttgtctcatcaaactatcaacttaacagtattaattaacatcatcacacctacttattttctatcataactatattaactaaattaaaccaaatgcaaaacataacatttttactctatccaattaataaactatcaagttaaagccgactattagctaaaagtatttattagcataaatatacatagctgtagcgaatttaggaagtaataacacaaacatgaattaaaggagtttagactacaactgagggtgatctattccctctttggttttgaaactttcaaaactaaaacaaagagacattatgtttaatttaggaagtctgttttaaatataaaggggtgctcggtttgtccaaaaatatatgagaagtgttatgtcgtgtttatattttgagagtaaaaccccgcttaacccataagcctgaattattcatgtcattgctctgtccaaatgtaagttaaaatgcgagtaattttttatactgaatttctttcttcaataaatttataaacttaaataagaataaatattttagtttttttcttttttgaataaatagtatttttttcaaacataaatatattaaaattaatcttttttttttgaaagaaaattaataattttttacaacattgaattaacacaatatatatattttagaatagtatattataaattttttaattatataaataattaaaataaaaaatactatatttatagatgtaatttgtgttttcctgttatgtttttgtatttgttgtgttgtacttaataaatttatatttttccgtgtcatgtgtaagtccatatccttttgagtcatatcatattgggcttgagtctaatatttttttgaatcgtaccagttttgtgttccgaaaatacaacttattagagaacattattctacatagattaaatataaaagtattgaaccatatataaaaatatgaattactctatatattcatcatcaatttaatttgagatagaacccaacaatttttatcacaacttattaaccaaggtgagactaaatacgctgaagtgtgaactctgattctaaaagtgaccaactctagtagtcactggtagtcatatataacatgtatgtgtatctgatgaagactgttgtagcgagagagctatcaaaatgtcaactatcatttcatgcctatatattattcagtaaatagaactatagataaagacttattaataatatcagaacattgtcatgactctaataagctgtgatattaattattacaataaaatatctacatcatgtaatatgattgtatttatttatttggtgataaatttgagcgtagagagagttatttgatggaggaggaagagaacaacttttctttctggccacaacaaattttgaaagtagcataataaaaggaaagaaaatcctaaccactacatattttgaaggatatagagagagagatattgttaaactgtcatgtaacaaaatggaacccacatccacgtgctgttaattatctacgcataatgctaatgtatatatatatagcccaatagaaaagattagagaagctccagtactacatctacagggcacatgaaataaagcaaattaataagcctaatgtgttgctcttgattttaggtccatggctatatatagcaggctttcatgactcttgcaatactaatactattgcctataagacttagattcattttgaagatccaattaagtatattcttaacccctaatttggatatgattattcattatgaattgagaaagttcaatcttaaatccctgttgcttttttcttttattcaacctttaattggtacatgcaaagaaattttaatgagcaaataaatccaaaaagtagctaggtacaaacgtatttatttacagttcagggaaatgttatacgtattaattattgctgcttcgcagtgctgtgctggagcacaagttcaaatttttaaacatgaatttttattgagcttgaatgtaaaactctactcttgtcttgtactaggttcgaattcgagttgcagtatgaattttgtacctgttaaaaggtcaaagatgaaaatgtaggatggcaataaatgagagtgaatatatgcatatatatatacactctacagaattagagaatgtgtggaatgtagtgagtaaattgtggaggaattttaccaaaaaaaaaaaatatttcttgtgaaaaataagtatatatatatata

SEQ ID NO: 57506 - DNA, 632 bp, Cannabis sativa
tataacgacttgcaacttcatcctagttctaatcaaacggtctctaattttggcatcgtttatctccaatttggaccgaggttggaaatttcttggtttgaatgggagggctaagtgtttaggatattttgtttctaacgactctatagaataaacttctgaatcagattgggacatttctacaaaaaaagaacaatcccaattcctcgatgaaatttattaaaccagagccttaagaatttgataagcctaaattatatcatgcctaaaccctaaaaattacccagaaaacttaaatcagaatcgctaaaagcaaatgaaatggcaatatggaaataataaaataaatgatcataacccagaaaaataataaaaaaaaaaccaggaaaataaggggattaatacttactgattaaagaagtgtgcctgtgtagtggagaattctgtatttggattcgagacaaacgattgtgcaagttctggggacgaccgagattggggatcgagtttgaggaaattcgcaaaaagtatgtcgaagacaaggagggcatgcaaagtttcaagaaattaggatgggaatttctcagaaaagcttgaatttttgaaaaggcaaaatttgtgaaaaaattgat

SEQ ID NO: 57507 - DNA, 1409 bp, Cannabis sativa
agtttcaagtgtaagtccccgaaagtgatatagtggatcacttaccagttttacggaaattgtgacttagggccttaaatcgtcgagcagcagtttccactaagagttgtaggcacgcttacattcagaattaagacaagattagcataatagtatcatatatgtttacatgtttaacgtgcatgttttatgaatgcctgttagatagcatatctgtaatggcggtattggtgtacatagagttgcaccaaatagcaatggatatatgtttgataaagtacagattagtgctatcacatcagtacgactagagtaccgagtatatgctgatattatggctaataatactgtcatacgaacgttctagacttagtatgcgtgggacgcgggataagattgttatgttatgattatgcttttcttactgagtctgtcaactcacaattattacgtgtatgtgcaggtaaaagttagcactgaactgggatgagtctaaagttaagggtgaagattgtacatattttgtacgagtgtaaatattgtttttaatattttaaattattcaaaaaattaaaaaaaatggtaaatatcttttataactataatatataacatgatatagaaaaaataatataatttctttaggtgccaaaaaaattattaaaatattgtatcttagtaaattcaaatatatttttttaggaaagttctataatgcattccaataaaatgtgtaccgaaaataaagttagtttgttgcaagcgtgctactttttttaatactcatataaaatagaatgtttgagccacactgtctatattgtaaaatattctattttttttttaaaaaaaattgcacgatgtgttaaataagtatgatctatgttgttatataataaagttgagattataactatttggatataaaaaatacaaagatggtgcgccatagaaacactattttttatcataaaaaagggactttttttttagttttaaacaaaaaagtagtaatattacaaaaaactttcagctgtccaaataaacaaatatacaatccaacaaagaaaaattacacaaatacatcttacacacactttcaacccacatgatccacacttcctgggattgaaccttcgtgcgatgcaatgaggttagcaatgatgaaaaaactccaacaggcaagaaagcaccattaaatttgacgagtcacctgagaagaagaacaaacttacgcacacaaccttcgatcgaccaatccagcaacccaacacaaccgaaacaaaaccaaaccagaaagagaaccaccattaattccgacgactttacctgagaagaagatcgtaatcaatcaaaataggggctatttcgaattcatgaaaaaaaaaatgcagaaaaactactacgaa

SEQ ID NO: 57508 - DNA, 970 bp, Cannabis sativa
tatatatacacgtataatcaactcttatatatatatagacatatatatactagttaatcaacacgtgtgtatcatatatttgtaactgtagaacaaattattttcaataataccagataaaattaagaagtactacatattattgctgaagttctcaaaacatatatgttttagcatcatacctagtgcatatgttttttttttttggtataaggaatgatttatagaaatgtttatactcaatcattttctaattatgttaaaatggtttaattttgtttaattataaaaaatatttttagttaatcatgttttagtatgttataattcatcaaatttacatagaaagtcttaaaaataatgatttcacacaagttactaataatattttgtaatagaataaagggactgctattgtcactgatatatttaactagaaacattagtacaaaataaattatttaccaaaaaaaaaaaaaactattattgaaaaaaaaattataaaataaaagcattattgaaagttgttcatatatattaaatcagtgtatgggagagcattatgtatagagataaatatgtgatatagcttaattacccaaaggactcccaaaagggcaaagatgattgcagacttcatatcttgaattggccaaagatggtttcaaaaaatcttattaattttttgtgtttgttatttttgtggtgatgaaaggttatgaaacctcttaacaatatttataggaaaggaagtgcatgaagtattatatattttaatatgaatttagtacaattagttgaatttggcccaattatagtattatatattttattgtcatgacttttagtctattagtagttaattatttatattaaaaaaaattataagataaaagcattattgaaagttgattaaatctgtatacccaaaggactcccaaaaggacaaagatgattgcagacttcatat

SEQ ID NO: 57509 - DNA, 831 bp, Cannabis sativa
ccatggcgctggcgtttgtcatgagcactgtcttgtggctcttcatgccggatcttatcagattagaagtcgatgtaaaggcccatagagagatgatagggtttcttgatacaatcaaaattaagaagtactgtttattatttattaaattaaaatattagggactccatattatattaaataggatcaatataacagtgtatcactgtgcttgacagcgacttagcatttctcaaaattaagaattcctctataaagaactatataatctttaagtgttgaagagaaaaaaatgttatagttatatgcatgtacgtatgatatgtattttaatttaagaatcattaatcgtttgttcttccaagatgcatattataagtacttattctcatttaaaatattcaaattattttttatttaaatgttgagatttatatgtattatatgtagttaaaaatatagaagagatgtacgtacatataacaaataaaaaggctaatatatatttttcaaaaataatataaaatgtagaaagtagaatttacttgacctactccaactaaaaacagaacattaatgtctccaggtcaagttaatgtctatcaagcttggcctcgatgtcccatttaaaacagaaaaaaaaaaagcttgacctttcctagttcctagttttctttcctgccaccctccgtgatactcgtgtcggtatcgttataggttcaattaagtatcaggtcctacatagtttaatataatagattttagagagtatcactagccaatcgcaacgtgacatgtcgagaaggtgctaggcaccactgatacctaata

SEQ ID NO: 57510 - DNA, 1063 bp, Cannabis sativa
gattttattggaacatgtgggtatgttacaaaatcaaccattttttagtagaattaactaaccctaggagtcgtacatgtgttgaggtaagttctccatctatttctccttgaattttaaagttttaagttgagtttgtataggtttttgtatgaattcgagtctgtggagttaattgagttcagagcatgtttctaggtttaatttaagtttgtttaagtgtggatttgatgattctttgtaggtttgatttgggtgaattgagttcaagaactcaaatttcactcaactatggtgattttgtcattttaaggtattatcgagttttaaatacttgaatatgttgtttttatgttattggtatgttctggagagttttattaggtttggaggtgatggttgggttttgatgcaaaaattgaagtttttcatttctgccagtaggaactattcgaccggttccataggttactaagaaactggccgaccggttggccagtaggggaaactctagttttttttttcaaaactggctttttgctcgaggtgtttttcaaaacctagtgtagagtgttttatcgatgtttaggttgtttcttaaaccgtattgattagggtttgtccggttgtgaatttagggcttatttcaggattggttaagttatttatcaagttttgttgtcgtgacttaggacccaggatcgtcaagccactcaggtcggcctgcacacctgaatattagactgaggtaagaaaagccaattacactgcttagcatgtcaaataagattcgattattatcgtttgtgattgattataatcgaggtaaagatacgataattaccgttgttagaaatgagttatcactgacttttggaaaccgttgataggttccttacttattagttgcttcattaagcaacgatagtgacatatgaagctcgttggtaacgagtggtaatgatgctttataaagtatccaagtcggtttgtcttataagacaactaattgattatctttactgcatatgcttgaatgaccgtttagtctatatgatgcatt

SEQ ID NO: 57511 - DNA, 665 bp, Cannabis sativa
  modified_base (620)..(623): a, c, t, g, unknown or other
aaaaaacatatgttctttgaataagaggccaataattaaattttttcttatggcccaaaaaatctagggtcggcgaccttgtgtatctataccgctagaaaaattattatatttatgtcaattaaaatatcaaaactttaaatacttataccgtaattataaaaaacttacacttttaaaaataagtattttgaacaataataaaaataatagtaaaccttataataatgtttattgttaaaaaagagaaaaatatatatgtatattaatcaatgtctcgatagattctccattatataaatatatgagaaatgttaataaataatattggtgcctaatcgctattaatgtaataaagtatgtattgagttctatataacttaagaaaatagattttaaagaatatcgcaaaccaatcgtcgaatgttatctataaaaggtgctggatagtggatattattagtgtccaataacaatactacaaatatatatatatatatatgtgcattcttaatgggtattacccatgaatgggtaaaattaaaaaattttgagcttttaagcttaatttttctttctaattaaaaaaatctcatatttttatatcatatgggctgagnnnnttccatcggtaaaaaaaaattttaaaaaaaaagttttttagc

SEQ ID NO: 57512 - DNA, 1509 bp, Cannabis sativa
gattcggtcacgcttatattaaagagagtaacatgttactctcataaccattcattattatataattatattcaatagctaaaaatatttataggaaaaatgattatttttaaaagaagaaaatgtgacatggatgacaattgagactaccaataagggtattgtatttcctacttttattacccaagaggtatttatattaggggaaaaataaagttagtttatataaatatagtaagaaattagcaaaaaaaaaaaaaatataaatatagtaagaaaatttaataagaaaaaatatggcatttaaaataaacatttaacatatatgggatatgctactttaaattatcataaaaaatattaaaattctttctatgttttattttttaaaaattaaacaaataaaactacagtgatcgccggagttgtcactgggccggaaagtcgctggagtttactgtcggtgccgaaaagttatcggagtagctgtcggtgtcagaaaattcaccggagtagctgccggtgtcggaaaattcactggagttactgttggtgccgaaaaatttattgggattggtattgtcgtcgaaaaaattactggaaaaatcactaagaaattggcattgacgccaacaaatcattgggaaaatcacaaaaccacccatttttcaccatcaatggcaccacctagaaacgagaaattccattgcacacttgaaatcaatcaaaccccctaccgacaacacccacactatttcatgtgcctccaattaatcgatcaaacccaatatacatagtaacttctatgaaattagttatcattttcttctaaactatcaatacacaacaattcgaagaaaaaaaaaacgaaacaaaaaaagtactctactttttcaatctaatatatgtgaatcatcttcctatttcttcaaaattatcaccggttctatcatcacatagcattaagcacccattctaacaatcatagctaggaaatcaaatatgttcgcaacaaagaaaagggtgctctctcatttcggtagtactacttcttcttccaaacgaaccgtagaagggagctcggtaacgttccaatgttgcatgggatttctccgatgggttggttacagctcaggtcgagagttctgagattgcagaggtgaccaagtgtcgctagtattttgtcagagaagaagttttgcctgatggctaggaagctgagatttttcaattgagataggtggattgcagcaacagattgtaaaatcgactcggaacaattgagaactcaactaatgcagagagcttcctattgtcgttgacccgacctgtgagatctgaagagacagctctaggattgccgtgattgatggaaataaccttatcggcggcaaggggtttgatttctagttttgggtctggatttcagtgtactactaggagagatttcttgtttatgagtggaacgatggcgtagaagaatcgatgttttgagatttcacatttagg

SEQ ID NO: 57513 - DNA, 516 bp, Cannabis sativa
aggagcaaagtaagatcatagatattataaatgaggctactgacgtctttgcttgatgccatggggatatgactggaataagccctcacgtaatcacccatgtcttgaacgtcaacccagatatgcccccgatataataaaaaagatgctcgctagacccggtaaaggctgatgccttggagaaggaagtgaataagttgttgtccaacaactttatgcaggacgtgtactacccagagttgttggccaatccagttctagtacctaaatcaaatggaacatggtgggtctgcatagatttcaccaatctcaataaagcttgcccgaaggattatttctcgctaccccggatcgatcaaatggtggatgccacctcaagattcaagttactatcctttatggatgcctatttggggtacaatcaaataaaaatgcatgtcgcaaatcaagagtgtactagcttcaggaccgacaaggggtgtactactacatggtcatgcccttcggattaaagaa

SEQ ID NO: 57514 - DNA, 761 bp, Cannabis sativa
aaatgcaaacaaattagaaacacaggaatcacatacaaattgtaagattccagaaaatataatggcctaatgtgtggcacccacctaataccctccaactagtagggaaccttttagctccatgtgtgaacattccttctccatggaagaaacaataaaattctttccaattccagtctgtggattttggttttcaaataaaaaactagtcctcatctcgacttacaaaactatacctccccttttctttatcatgttcttttacggtctaaagagcacgaaattctactaagtcaacacttatctcaaataactcaaagaacctctcaatacttaaaagcaatctccaagaaataggcatcagttgtctaggagcgatttgataccaattcaagatcgataaaacaaaaggtggaaaaagaaacctgaagcctcgaaaaaaggtatgcgaatacatgccacaccaatcaggaacatcccagtctattctttcctccctcctaggtagcctcattttcatattatggggaatgccataagccaatctcatttgagctaggagtggaaccgtcaatttagagccaagattaatgcgcaaaatactctgtgatttacctaggaaactcggtccatcatcctcattcactaattgggctaaggcataacctattactaggacttcctctttgtccaccgctaacccaattgcatcatggtcatctacatcctgaccataatactcttctgcgacggtgacagga

SEQ ID NO: 57515 - DNA, 886 bp, Cannabis sativa
taaaccttacacctggatgttatacagttcatacatatatatatatatttcaatcaatgtcaaatgtcaagaattagtacttgctttatgtcagcttattttctcggtaatgacttcaattttatttttctgttacagagcagctatagggagtacctgaaacttaaatctagatttgagtacctacaacgaactcaaaggtacttacattgcatatacatatatatatatataatcattctaattaagctaggtagtcatgagtctactttagttaataatgagtcttttttcatttagaaaccttcttggggaagacttaggcccgctaaacacaaaagagcttgagcagattgagcgccaacttgagtcttcactcaagcaagttaggtccactaaggtaccctatttgcctttattattacctctaatctaatcgaatttttgtttgtattaatatttcttgcatatacatattttaactatatgtgtaattcatacatttctttttgttcttgaaatatttgcagactcaatatatgcttgaccagctttctgatctacaaagcagggtaagcactaagaacacttatatatataccgatagccagctgtttttactattgtatattattttatctaattggtattaacatttcaggaacacaacttaatagaagctaacagagctttgacagttaaggtattaatatacatcacagttttcccactaaaaaaatgtgtaatatataatggggtagctttgcattgttctcttcatgcatgaccgtttgatattcaaataatcatgttatattatgactaattttggcagctggatgagattagctcaaggaataactttcgtcaatcatgggatattagt

SEQ ID NO: 57516 - DNA, 912 bp, Cannabis sativa
caaaaaggaatataaaccctatgaaaaatatattagtgctccgaatcttgaaatcctttcttatatttcagccacgtgcaaatcaaatcactttgtgatgatccaaaatcttgatgatgatgatgatgtatggtggtatagggaaatgttgaaaagataattataatggtggtagtggaggtgatgatagcttggtatatcttggctaagagaaaagaaaaaaacatgatcgaggggatgatgttaattttagcttagaagctcaatggtcttggagaccacaagaactttgtatttgatgagatagagaaataatttggaatgaaggattatagcttcagggataaagtttatacgataagaatggattttggaataatagttttggtctaaaggggatgcaaatgaagagaaagattgaaagtgtgaccagtgacgactttgattagtagtatttatagactaagaactaatccttaaccaagtcctacctaaccgtatgtctccatttaatagcatgaaaatatttctagatcattcctaagctatattcagttgaggattccttccaatttgacaacataagctcctatcattttaaaatttgaatcatacctccacctatgtagaaaccacctgatcttactctatctcaattttttttaaaatatagtcaaactctccactcctattacttagatgccagacgtcaaaaggttcatttttccctaacaaatttcctatatatcgtgccatatagctttcattgaagagtcttaataactagtaccaatatctatgacgtgagcacaactttgactaaaactgttcttaaatttcgaaactaattaattatatatacacgtgtatatatcatgtactcaatacgaacctgactaataatttaataaa

SEQ ID NO: 57517 - DNA, 912 bp, Cannabis sativa
ctttttaatatataacggggaggaacctgtctaagacaagaggatctcttctctttttcaaaaaaatctagccactacattgaagctatctcaatgtcaaaagggaaatctttggaggaactaacatctttctttatctatccaaaattgtgatagttttttttatctttctcaaatggtggacttattgctcacaagctgagtaagttggagattagtaaagagctttgctattgggcaccagcggtgcctagcacccttaagacgtatcgctttgtgattggcttgcgatactctttaaaaactattatatttaacgatattgacaggtaggagggtgcttggcactactggtgccttttagcatttcttattagtaaatctcctaaattgaagtggttgccagagaagatgacttctctctcagccttgaaagggttgacagtcaaaccttgtcagttgataaagaatttcccagttagtttgcttagacttattatgatgtatttttgaggatgaaatgaaattggcaaacattaccccattttacctatcttcaaatattttttattttgctctgtttttccaaataattttgattgatttatatatcagaacatggaaacaaacatactactgtacgatatatatggatttcttaaatggattatatatctaaagcttttatgtatatctagtttaaggtcaagtcttgctttgctcaaatcaatacacttggaattctaaagtttatgacaatttcaatataatattccaaccattacatataagatatataaattctgatagtggcctaatattatactatagatatatggtcttctggttttgaggccatatacggtggtttgtttagtttatgtgtccgttggagcttgttttgtaccatgt

SEQ ID NO: 57518 - DNA, 1031 bp, Cannabis sativa
  modified_base (970)..(970): a, c, t, g, unknown or other
taaatcataaaaataaaagaaagttgtaaacttgatctagtaagtataactaaaaaaatactttgctaaatactatataatagtacaatataaatatatatatatgagtgactactcaatgattacatttttattaaccatgatggttacatttatgttgacctgtaatagtagattaccaatatgtaaaaattcttttctagaattaaattaactataattaactacttcttaaaataattaattttaatttaaatatttaaagcaattaatattaataattttatttttatatttaagtctctattataattcttttaacagttaagacatttaactctaatatttacaataaaattttattattttataaaatttgaactttcactatttctaaaatatatttttgaataattaatcactaagtctgagaatagtgagaaatactagaatatgagaattaataatttatacatcaaatctaaacccctatttcatctttgtatcttcaagttacatgttttagacataacttgaaaacaaaccaacaacttcatatatgcatatttttatcagtaacacatattcgagatcaataaccagtaaatgatgtactaactttgttgacgatacatagtcaaaatcaatgattaataataatcaataatatcggttgctaagtttatcaagaatacatgttcaagatccacaaccaatgacaattataataactttttaatattcattaatacatattcaagatcaataaccaataacaattaataactttcaaactttttcaataacacgtattcaagatcaataacagataacagttagtaactttcaaacctttcaataatatattcaagatcaaaaaccaataacgatcaataatttttaaacttctgcaactttttctctttttatgatttcacttcgattaattgtgtaacgccctaaataattnggcacgctacccaataaacttatgaaaccctaatcccctaatcgagattactagtaaaata

SEQ ID NO: 57519 - DNA, 907 bp, Cannabis sativa
  modified_base (614)..(624): a, c, t, g, unknown or other
cactaaaagcagtagttttttgtagtgggaagaagacttaaaccatctttcttgttgagaaatcttcaaacttgatcatcactacaacaaaaatgactttttatttcaattttatagtacacatgaacaatttgtatcgattggagtaactgatgcaataaccttatatgtaaatagtcatatttttttatttttgtttagaactaacataaaatgttttatgcttcggacatgaatcgaagcaaaaaaaatataattttttctttggttcataactaaagcaaatagtagtgcaccaatgctaattattttttattcttcggttatgaagcgaagaaaaataatattaagtaaaataaaagaaaatctgaaccatcgcaccaccaccacactgctatacatctcacaccaccacatatacatagatttgaaccaacagtggtgacccaaaatacacagatttaaattactgaacccccaacaccacaacgccaccagcgcaccaccacccatggccatcgcaccactacaaccctaaagaaagctaagatcaaatgaaaaagagatcagagatggataacgagagagggggacagagagagagagagagagannnnnnnnnnnagagtgagagagagagagagatattacccttatggggatggttgcgcagggtccgtccgagcttgtggtgcgagcagcgacctccattgtttggcctcctttgtcaacggtccaacatatagagggagagagagaaaattgcagacgactattatgttaggttatgtattagtaaggttagttaaaataggtctaccccaattctgtgatattttttaagtaaattagcattagctgtacactgaacaaaatttgtgtcgatgcataactaacgcaaaaacca

SEQ ID NO: 57520 - DNA, 789 bp, Cannabis sativa
gttgcgaaattcagtcgacaacagtttatttccttctgaattgcttgctgaaatcaactgaagttcactccttatatagctattgagagactaaaaagataaaagaacgcacaagctgaaaatcctattcagctttgaattaggaagccaccaagcctccgttgagaaaagataggattttactgctggataggggcgggccgcggcgccctccttgttgggtcgcgggccgtgtgtggctttcatgtgtggactttgatttttaaataggcgggtcgtggcacacccattcctgggccacggcctgtgtgctccaatgcccacgtttttcaacgggaataatcttttttttctattcagaactctgatatttcacattgatatttttctacgatcttttattttttattctcatctttttcgatgatatttttcaaatcttccgctattttaaatcttcaaaaataaaagatagatataaataaagaattaggcgtgtgaagctccctgtttcctctcatggcgaagaagaaacgggtggtttcgaagcccaccaagatcgcagctacggtagcagagaatgagttgcctgagatgatggagagaatagaacctgaactcccttcgatccaagccaaagaggatattcctgaggtttttcttgatacctgcgaaaacctggaaactaattttgtcgaagagagtccgattgcgaagacgaatgtgccgaagccagtgagctgggccgatgaagctgagagagaagattttaatgccaaagccagggat

SEQ ID NO: 57521 - DNA, 1957 bp, Cannabis sativa
  modified_base (527)..(531): a, c, t, g, unknown or other
  modified_base (1154)..(1154): a, c, t, g, unknown or other
gcattggagatgtcaggatggaacaaatccatcttagaagcaagggtggaaacattatcggaagcaagaacaggggagaaagaaccagggaagaaggaggttagattttgaatatggcagggcgggagtagttatagaccaaaagaggaagttatgatcagaataagggaacgaaattagagagaaaacatttgaaaaagaaataacaaaaacacaactgccacaaagcaaattttaagggcagacaacgctcatattctcatcgatgttgagggagttcctatttgtaccccataaaatgataaatgcactctattattaaaaaaatataaacttaaatcatttttaaaaattattcttaatattttcttaaaattttttcctcacattattttatattaatttcaataattattttgattttattttcataattttttctaagtcatgtatatatttttttcttttttttttttgaaaaaaaaattcatataattttttattttaatttttttgttataatattnnnnntataatttatttttgtttgataggcaaatttcttaagaatatgaattggaagaaaaaaatttaaaaaattttagtacaattaatgatataaattttatataaaataaaaattattaaaattgggtgtctttaaaaatttttgaggtgtaaataaaatttctctaaattaaaggagaaagtattccctataaaaatgaggagagaacattattctttattttctctctaatttgtgtgagccccactactttctctctttccacaatttaataaattattatatggaaattaatatcatactattgattcttattccctctaagtaaacatatcatttatataattgtgtctctctaatataagcgttgtcaaaaatatcccctttaaccttactagttagtaaaattaagacttttgttaagattaagaaactattttgcacttatacgattatgtcaatcagaaaattttatttatactctaaaaatttataaagacaccctattttaataatttttattttatataaaattatatttttaattgtgctaaatttttttaatttttttcttccagttcatattcttaaacaatatacctattaaacaaaaataaattatatnttaaatattatgacaaaaaaattaaaataaaaaattatatgagatttttttagaaaaaaaaataaaaaaatatatacatgagttagaaaaaaaagatgaaaatgaaatcaaaataagtattgaaattaacataaaataatataaggaaagaattttaaaaaaatatcaagagtaatttttttaaaaaaatttaagtatatattttttttaataatagagtgtatttattattttatgggttgcaaatagagctaccattacgttaatattaacgttgtcaaaatacttcttaattttattaattagtaaaaattaaaatttctgttaaatttttcacttgtgcaaatatcaatttatagggctaaaaaataaaaaaagtgattaaattttttaaaaaaataatgaaaaatatgatgaagctaatttatagtgaaaatcaaatacattctcttgaatttaattttatttcgatttgcttaggtaagaactaaattagacaatactatttcatatttgtaagataactacgaaaattgacaaaatattacataatactaactttccataattgtctaaaatttaaaatgtatatttaacatccatataaatagaggaggcatgatattttagtgacaaagtttaaggagattttttttacaagttaactccatatttttagaatgaacatatattatatttgttaacacagattttcattgacgaataaggagccttttttcgtaataaattaaacacagatatattagaaaactgaaaagaattaataataataatagtaataa

SEQ ID NO: 57522 - DNA, 1853 bp, Cannabis sativa
  modified_base (62)..(65): a, c, t, g, unknown or other
tttcatttttttagaattcatattaggttgttaatccaacatacatgatagtaaatagatcnnnntaaaataatttccaacagattagacgtatgttccacaacaataagcttgtcaggatgagagtcgaccacaaatttatgccaaggatttagttatcctcaacgagtcacctcttttataaaatttcggtgaatagagggcctttgatcagctagtatatctttgctctgataatatcgacaacattgtggcctgagcatatttgtacgaacatgagggtccaatcaaaagttcactacaaagactgtgatgattcacttgcccaggttctggtttcaaaaatgctgcaagaggatgctgaaatcctaatctcaattgacaggtagagatatgttaaggaagtagcaaacatattccttcttgggcctaaatacctaattggaacactcaaggtaacttttgttataaattaattattaatgattagtggagtttgaatatcttaaatattcaaccatagtgaagtagattctacggatatatgtgctacggtgggatggatgaataaacgactgttatatctgtgttatttgttattatataggcatgtttaaaatttttggggcaattcaattacaactgttatactgccaaaacttttgtagaattaggatcaaatttgatatattatggtatgttttgtataaggtctactcgctcaaccaccatcaagacgtgatatgtcgaaggagaaaggtcccatgccttctcgacaaggcggtgctgataaagacgataaattattctcaccaaaggtgatggctttaatccctaagtcactaaaattgatgattggtgaatttctaagaatcaaagataaacgtgatataatcacaattcgggtggcccaaggattcataacaccgcgtacccagatcacgttatctcgagaggattgtagcaagtggcatagtgtgacatcatcgacaacaagggaatgctgtttggaatgatgtatactcttctttaatctaattaacctcatatattaaattctagtaaaaatattataagacactaatacttaacaaattaatgcaagcacatctcggagagcataaacgatttgagaaaatttttcaagttttacgaccctgagcttctcccagtgaatggtatcaacgatgaagagaagagttagtcttttgagaatgtggcaaaatgattggctgcttggttatcatcgatgaataacaaccaccaaatattctctattccttggaatatcgggtaaacactatttaattttttagtgctaattgtttatttctatattataacatgaaattatttttatactatcttacttatatcccaatataattttttagtgcacattggatgctaggggtcggtgcgttaggaaaaattatccatttagatcctatatgtggcaacaaagttccctaataaattacttaaatgttagaaaggcaataatttaatgactatttatgtaataaattatttaattaactaatgaattgaaatgttaatataatttttcaaacagagcattctattatataggggcatcaaatatgtatcttgggccgtggccaggaatttcactagcacttgtccaagacaacctaaaaactaagaatgtaatttttatattttgaaatagatgtgcaaaccccatccgttatatgcacgatcaaaaagctataagttttaattataacaaataataataatatatataaactaatataaatttttactttttcttacagtttggagaaaaacagagataaaaactaaattattatcattacagtgacagt

SEQ ID NO: 57523 - DNA, 759 bp, Cannabis sativa
ttttttattattttgagcaacttacagcatatattaataaaatcacaaaaaaaaaaaaatactcttgtaaaaatatagtgctcaaataaaaaaatcttattattttggattcttttttaagtcttgttttgccagatattttttttaattgtaatagtttccaaaatatttattttttacattgctctagacaaaataatattttggcccatactttaactaaatatgtttaatttaatattattagtattgtggggtggtgatgcatatcgtttaccacaataaatttattaaattttatttctatattactagttactttagtataatggtaattacaggtcgatctcacgaggactattatcaatttattattaaaatatcagtggcaagaattaaaaaaaaaaaaaagagttttaattattaagattaaataatataaattaaaaagcaaatagaatgagatactacgatattcaagaaatagttaaaggttaatccccaaacttaacaattatcattaattcttaataatgaatgttatttcagatttccaatcgaactattaatcccgcatataacactgaagcaatcaattattccaatcttcttattgcatgtaatcaaggagaagcactcaataattaactctttttacctaagcagcaactcttttaaataaagctttaagttcaatagagatagattaatctaggcaataaattaatgaagcatataattcatttagcctaggttcta

SEQ ID NO: 57524 - DNA, 877 bp, Cannabis sativa
  modified_base (60)..(60): a, c, t, g, unknown or other
tcaggaatgataacatcgagcttcttcaaatgagcagtgatgtccctcattttagaaatntgttctcgaactcctttaacaccggtgagttttgtggacgagaactctgggatgggattgttgaataaagatttatctgaaatgtcaaactgctcatccatcactttgataaaatctttagccttttaggtggctccaccgacccacgcattcccaaaggaattttggacatgatgtagagaagattggattgctcccacttttcacgcaatgcaatctcaacagcaatgctagtttcagtgacagcagttggttcgtctttccttattgcatagccatgttagtgcaagcaagatggagaagaactcgttccttccagattttgaaattgtcactcctaagatcaaggacttcactagtgatttcagcatatttagaggtggatgaaatagctgcaagaatatgattacaaattcagacgttaaaaaaatattgaggctttaatgaattcatgttttactaatgtataaacatgatgaagataaaaattttactaaatctaaaattgcttgtgggctaaattttaaatctaataaaattatatgaactttatgatagatttaataaaaaaaaatttaatttaggaaaaagaggaataaaatctatctttatcaaattttgtggtaatactattaaattaaatctttataattccttgtggggtaaattaagagaatttaatttaatatattatcctaattaattatataaatacaataaaattcctgtggggtaaaattattatacctatataattacaagttatgttcattaaggtaaatttaattaatatgtagttttatataattaaagatgt

SEQ ID NO: 57525 - DNA, 1264 bp, Cannabis sativa
ctgtaaaatttaagaatatttcaaataatttatagagctaaaaaataatactcaaatattttattacaagtgtgaatattttttcttatacgcgtggtaaataattgtttgaactttattttcaacattataaagaatttaaaattttctaaaaatttaaaggtagtcctaaacaattaagacataaattatcatataaaaaatattaagctaaaaactaatctaaatagtaaaatagataggattctaccgaactacctcaataagaaatcatacttaaaacttttcaacaactacaatacaaaagattgcgctcaacccatagttttttcactttctttttttttttccactcccttatgcaattattttactagctgaatatacaatttgcttcgtctttgaaagctagaaatcatgttgatgacaattcagatttttgcaagaaattatagcaacttaaggttctcccgaagatgaaagatcttatttgacgagcaacttcacaatatttacttactaagatgaattttcgtggtaagaaaattcatattaacaccacttctccattttgtggtgtttacaataaacaacgtttcattgtttggtgtcttgtgaggttttatggagttattagatcagaatggggttggatgtggtaggtcatgagtttcattctttctttgtttggctaggtgcggtgatgagtgaggcagacaataagctgtggagagttgcgatgctttgttgggccatttggaaatctcgtaatgagacagtgtggaataaaaaaagatggcgagaggaggatgtggtgtcttcattaattcttgaccaatggagtggtgctcaaggtgtagaaaatatccattcacttaacatgttactagctacgatggggcagagagttggactaaacatgtgatgaatacaattaagattaatgtagacgtgtctatttttgaggaagatagatgatttggctctgcttttgtggtttagaatttgagggggaaatgtttggcaagggggtgtctccttctttagcagaatgggaattaatgaggttcttaattggttgaaatctcaaagatattctagagtggagattgaattatatagtcttgttattattcaagctattcgtagttttttagaatgttttttgattttggtttagtggttgatgttagacttttatttgggcttacattaaattttattggttttattaaaacttgggttgattggatagttctttgct

SEQ ID NO: 57526 - DNA, 1567 bp, Cannabis sativa
  modified_base (1121)..(1122): a, c, t, g, unknown or other
tcatacttctacttttatatcttttattttttctgtgtgaaatcgttactgtgaggctcaaatttggttaacaaaaatctgcattaacatctggtaatatacattgtagtagttgcatggaatagcctctttgataaagattaccatctataatttcgtacctgaaaactgcacatgatttttttggcctcatttttatcagaagggagttgtctaattaatagatagttgactattgttgtcatccaagttggatttgtatcaatcatttctatattctggtcatcaatctcgcaaatacttggctattcgagtttttcaatgaaaacgaagttgaggttatcattctcaaacagtgacacttgctttactaatgcaatgccattggagttttgttctcttggaacttgttcaattttgtaataatcaaaactttccaagttgtttcataattgctccaaatacttagccattttgatctagtgtgttacttaatattagtcgagagttgttgaaacaatggattgctttaggttttaagacttcaacaattcttagtcctgccagtaacacttcattctcgacctcgttgttagaagttagaaattgaaatctcaatggatagtgaaatctaagcatttcgaaagaaatcaaaatgattcctaccctcaagccgctatcatttgacgagtcttctataaaaagtttctagatttaaaagtaaaatgcatttcgaaattagtgcgaaatgattaataaaatataataaatatattttgaaaattattcaaatttaaattgttctgaaatctaaaatttccatcttaaatataattttttatctaattaaattttctattaataactaatatttaagtgtctagaataaaatcaacttaaatatttaattttctatttaattaaatatattaaataaaagaaataaaaaaattaagtatcttgaataaaatcaacttaattattaattctaatttaatatcaaaaaaatattttaatttaagttggtccaaaattaaattaaattaattttcaacttaataaatatttataattaattaaatattagaaaatatgattagttactagaaataactatctannatatatctcattaaactaagtgtttttttttaaattaattttaaaataatctaatgaaaaattaattttatttattttaaaattagttatgttgctaattcaattttaaataggctaaactaatataattaccctaatataattatttaaataaggtaaatgagccttcacaattggggtggttcaagtgagggagggttaggttcagtatgttgtacccactactatggccccctaactctcacagaaggcccaaaggagagagatttaaccattaattaaataattgttattcattaaataagcgcaatgcttattgggcctaaataaagctatcaatgtgatattttattttagcaatctagtctatttaattaattaaacttaaatgggctttctatatgcatctaagtccaaaagcaaactgtaatatcccgataagcct

SEQ ID NO: 57527 - DNA, 1194 bp, Cannabis sativa
gatatttaacgacatattagcgatattatatcgacatgacactaaacaattagaaacttgatctgtttcgatattaaacggcattttagcgacaattatcgacataaaattgtacagatttaaaaacaactatgtaactatatctatacaattgtaattaaggagttctaaaaatacaaaaaaaaaagacaaccctctataatttttaccacgtcaagttttggtaaaacaagtctacacaccaccgatctttgaacatgctcatgttatcatcattaatcttctccaatgatcgattcatcatgaggtgttcgatgtactcaatggcatataccccgcaatcaccactgaaaaatataaaacaaatacatttagagactaatatacatttagagactaatggcaacggaaatattaatatactatattaataaaattaccttgatttactttggggaatcacctcacttggcatgcgtttagcatgcattgatctgagttggctactctcccctaactccacattgagaatgtaactgttgacatcgtaatagccagttgacctcagcagatgtggaaacagctgagtccaaggtagcataatggcttcaaaatcttcattgttggtgcacgacatatcattatcgtacacccgaatctgccaattatcaatgtctacctcaacaacaacccaatatttttgtctttcgaagtgcacgacgaagtataagtagccttgatccttccaacatggctagggatgtaaacgaggcggggcgggggcggggatcgctcccccacccccatacccgctttctaaatttacccccatacccgccccaatacccgtttaaattaaaacgaggacgggggcgggaattacccggcgggagaaagattccaatcgggtacccatagagacgtaaatggggcatggcggggccggggattgctcacccaccccatgcccgtatcctaaattcgccctctacccatttaaccatcataaaaagtcattcaaataataaccataataactctattacatgaaatataaaaatccaccaatagccttaaaaaaactaacctagtctattgctaaaaaaaaaagaacgatagtctaaaaagttcttcaacatcaatctaaacatcctaaaagtccataaataaaagataaatatatcttctatggca

SEQ ID NO: 57528 - DNA, 1150 bp, Cannabis sativa
actatatcaaaaatatgtttacatgaaaaaaaaaatatttaagtcaaattcaacttttttatcacttttttgtcgaaaaacattttttttcattatttttttttagctgattgaccaatctcagtccatataatgtaaaaatgaaaaaaatttctaattaaatagaaaaattaatcataaaaactcaaaattttttaatgttatccattcatgagtaatacccattaagagtgcatccatatttgtatatgtaaaactttttaataaaattaattttatctaatatttttttagattgatgtaatatatttttgtctaaaaatattttgtagaaaaagtaacatttgtgacacaacataaaaaaaggagcaaaataaagaagaaaataaaatatttttcttaaaagtataatatattcattcaaaataaattaaaaaaaatagtaaagtattaaagtgaataatatttgtggtcatttagttttttcaaacatatttacttttttaattttttaaaaaggaaaatcttacctaacgccccaaatgacgcgtcctccttccaccaacagcaagctggacccacacgcatcagcctttatccttaaaacttcctgaaaccgtataaaagtaaaaagaagtttgaaaaagataaaaaaaaaaaagaaaaaaaaactacatatataattaaaaaagtaaatagggaaattttttagtcaattcttataaatttcccgaatatataaccccaaatacattaacgagacaaaatcggctcccatattatattttcttaggaaatttacactaagtggcttttttttttaccaatattaaacatttatacttgccctatctttatttttacttttttactttttaaatttttctttaatactatttacaaagtttgatatttacaattatacagtttatactatttctccttcttcctcctattcacacagatccactttaaaagacaaccatctccaccatttccatctcacatccaacctctctcgtctctagctctcttgtcccagccctcgatgtcatgtaaaacatctactcaacctactatgttgtggtctagggagaaagagagacactttagatttatttccctcttgatcaagccatctccctctttt

SEQ ID NO: 57529 - DNA, 717 bp, Cannabis sativa
  modified_base (42)..(47): a, c, t, g, unknown or other
gctattatctataggatcaataggtacctcgatagtgtcttnnnnnncctgggcggttgcggcatagtcgaggatcctaggattcaagtctagtttgtctttatgcggtatttcttctattctgaatacctcctgtcgagggggcagtggttctagcaagtaaatgacgttaaccgacttcttttctgcgaggtttactgctgtattgtagcattctcgtgagtcccattggactcctcccacagataagactccagcgggagtagggaaattcatggtgagatgataaatggatgtcactatcttcatctctttcaagataggtctaccaatcacagcattgtatgccgagtgttggtcaattactgcaaagtcagccattgacttagctaccacgggtgtggtccccaaggtaattgggaatttgatcatctccttcagtgcaatggtgtctctagtgaaaccatagatactcgacatgacgggtcgaagatctttctcttgtaatcccatttgtttgaaggcctgaaaatttaggagattcacagaactcccatcgtccacgagtatacggtggacattatctcctccaatatttgcgacgataaccagtgcgtcagagtgtggatgatggacccacctggcatcgctttccatgatgtgatgtcatcacattcccttttgaatagcttctcaggccgctcgctcaagttgttc

SEQ ID NO: 57530 - DNA, 933 bp, Cannabis sativa
  modified_base (135)..(137): a, c, t, g, unknown or other
  modified_base (163)..(165): a, c, t, g, unknown or other
ggactatgcagaattttaactacatgaaaaaccacacaaaaaagctttgggttatttcttttccttttattattattatttattcataaacccatcacaaaataggatttaatttagttaacaaaaatctgcgtnnnaaatctgcgttaacagtttggtactnnnattgagagccttcgtgaaaaaagctcagaaaaaaaaacctcctgatacaaaaaaactttctccatggctgacaacggagaaaatgtggatactcatcttgaagaaatcacccaacgtcatccaagaaaagagccgatgggctcccggaggcctctcaactcgcaatctacgcagaccactcgttccaagagaactcaacctgaaggtggcccaagtacactgtccactcgttctaggaggacccaacttgaaggtggccctagtacacggtccacacgttcaagaataactcagcatgagaatggccagaacccaggagcaggggatgaagaacccgatcttggaggccctcaacctactgaacatgataatgatgcgcttatgatcctacaagatacgtgccaatcgtcgagttggaaaatcactttctcaagcgccgcttggaggaggcgaacagacaaaatgctgagttggaacgggaggcagccgtagccagggcagcacaggagaacaatgcgcaaatcaacctgaccttgtggtgagaagaccacgaggcaaacctcgtggctcacgagccaggaggcaggagacagctcaggagaatcctcagaacgctcaggacgaacaacctggggaagctgaggatccccctgagaacgaacaaccagaaccttctcacagaaatgagaacagaaggcgaccagaaactagggaacaggaaatccctcgtgaaaatgagggaaatcttgggactcaacctgggacacg

SEQ ID NO: 57531 - DNA, 1699 bp, Cannabis sativa
tccttttgttcgaatgttcaattaaatttgggttcttaccactcctcttgttcctagaatgattcacattcgattcaagaacttatgtttattgacttgtttgttccaaggcacccctacatctggtttgggccaacatgaacctaggaaaacttgtaagtgtagaagtttgtcctaaggtagtagctccacacactactacaatttgggattttagtgccactatttagtgacccacataaaatgtgcgggtcactaatgagctaggagtgatttttagtaacatgcaaaagtagactctaaacattcagtgttagtcacctgtaatgcgtgtcactaaaaatatgaagggtcataaaaggggaaaacctaaaattttctaatttttattgatttaaaaaatattgtcatatagtgacacactaagcgtgacttggttaatgtatccctacccacctggcgtctactatgtcataaacttatttttctaaaaaccaaaattcaactgtaattatacttttaataataaataataaaaaaaatattaaaagaaataaagtaaagttcgcagccagttttgcatttattgaaaaatataggaaaaggaaaaataataaataataaaggaaaaaaataattattagattaaaacatcagttagagtctccctctttaataaaaaaccctatttctttatttctcttcaattttacatctagaaaaatggccctatcacttagccaaaaaaacccaccaaactcatgccttttcttattcttctccctctctttgcttctgagctctaatgaccacctgcgcgtgaaccacctccaagacgacaaagcaaccaccatccctagcctcctagtgcccatcgatggcggacgatagacagactgaaaccccaatcaatgttttgcctcaccgagctttgcaaccttctcttctgacgttattgacccacaagccttccattccagtgtcctaatcgatggtttaagaggtattttccttatttggctatcttattctctctctctctctctaatatgtgtaggtggaccacattttgaaaccatcgttcgtggttatgggtaggcggtaaccaacagctctaggttcgtccaggatcgtggttttgagttggtgatggatgagaacttttggtttgtggatggagcttcgggattcattgtagactgaaaatttgatttgatctgatttgtattttttatgtttaggtttctaatatttttagacatgtttatgaccattttttattttaatttttatttgagtgttcatacccactcttactgtattataaatattttagtttaaatttttgtatggtatttgatgttaaaattttggtttaatgatataattcagatttaattttgtttctagaatgtaataataattatgggtattttattggttttatatatatttatataatttgaattcattttaatttctaaataatatatattaaaaaatacaatatataattataattaattatatttgttaattagaattattattattatatttaaatatatttgtatataattaatataaattattatttataatataaattttttttgaattaaatcaaattaattattatttttttttagaaaaatatttaatatagtgacactttttgtgtgtcactatatctacaaaa

SEQ ID NO: 57532 - DNA, 1035 bp, Cannabis sativa
caaaaagttattttttttaataaacgagaacatattattagcgaaattttttagaataaatgaaatcttttaataacattatttatgaatatattttttaccaaaaaaacgttagttgaatgtacatattttacttctaaaactatatgaatttttcttttttttaaaaaaaaaaaataaaagaaaaagtatagattgattatgatatttaccatacagaggactaagattcatagtattttaaattttaagttttgtttatatttaaagttttagaaggaaaaaaaatactgaaatagttattttctatttttatgcattttttttttatatgtaactgagtgtacaaataatgattgaattttttttatatcaaaaataatcttatcaaaatttaaaataaaatatttagttgtaaattcaaaatataaaatagttgaaaataaattaataaaaaatatcttatttaaatagataaataaataaataaataagagactaattataatgttcttttttttaaggaaaactaaccacatacaaaaaaaaaaatcataatttttagaaaaatatatatataaatcgtccaatccagtaaataattaaaaaataataattatataattacacaaaaaaaaaatacaatatttccaaaatattaataatttactaataatagtttaggagttttttttctttctattgcctcgatttattcaagtggttgcatatttgttaaccaaatatgtcataacttctattcttagtactgtttagtggtctgactatttatcatgtattaaaaaatttatctttacagatgttaatattcaataattcatctaatctttttctaaaaaaaaaatcgcaaaatttaaattacttcatatttatatttgacaaataaaaatttccacatttatatggataccaaataataataagcacatagatacctataaagaaaaaacattaaaaatcaatcgtcgtgattatttaataatatatttataaaattataataatctatattta

SEQ ID NO: 57533 - DNA, 729 bp, Cannabis sativa
cattctagctcgcccagatagccgccctggtcgagatccagtaagcgtgcctcagtgaccttggatggaggactcacccacctgacacccaaggtacttagtttcctttgaggaactacaacagtaagctcctcattgacgtagtccactccttcaacgaggacatcgccgtccgcgtcaactggctcccagaccttgttctaccccacaaaatttggaggtgcagcttcctcctcttcctccgcctcgcaacgtctgctagggcggacatcgccctgttcctctatctcctagacttgtggatcctgttcggcgctaggtagggtagcgtgctgggctacgtgagggtaagacgcgttgactttacgcattgtctgtttagtgcgagccatcatcctgtgggtagacgggaagattgagttaagacgtcggtcgcttgaagagggcggactagaataaagacgagggtaatcttcgtgcaatagttgaagcaaatccttgtcaattcggtgttcgcttcaccaaaactcaccagagttcatctacaaaagacaacacgcgagatgagtgtttggttgggatatcgaaccgtaaatagccaaatatcccgactaggagtactcaaaagattaaagaatagaaatattcgacgaataagtcaaatcttagatgtttaaaatttttgagagtaagggcaaaaatttcgcgaagctttgaataagcaaggtg

SEQ ID NO: 57534 - DNA, 1088 bp, Cannabis sativa
ttataagtattttttggaaaaagtaaaaaaaatcagattgtgtataattaattaatgtatttgtgtaaaataaaaattaatgataatatgttgtattattgtgtataactgtgtattgtgtttgtgtatgtgtatgataataatatattatataattcttgacaagaaatgtcacttttgtcagcacatttttgtgctggtaaaagtttggtattgtgctggtaaaatgaaatttacttttaatgtgttggcaaatcaacgttgatattagaacttttgccagcacaaaatgtaaagtgctggcaaaaataacttttttcaacacgtaaatgcgctgataaaagttagattttagccactgtaaatgtgccctggtaaaactttaacctttttgccagcgcaatttgagaaatgtgctggtaaaagctacttttactagcgcaatggcgaactgtgctggcaaaagtgatattgtattattttgaagtttttttgttaaaaatttgatatttaaaaagtaaaaattgaagcctagcccaactcgaaacccaacacaacccacctgaacctgtcccaacacgaactcgacacactgccggaccaaaaactcagtctctatacgggtgaattcagtcccaagattccaaaatctggatccaaaattctagaaaatctacccgatgtgcacccctaccaacaacttctctactctatctttaaaatacattactaaaattttactttattaattttacagcacattttatattacaccatacatcagcactacaacatattaccctattagcggcggaccattctaccgctaataacctcccattcggccgcaataggctattagcggcagaagtctcccgctaagggtctgccgctaatactattattagcggcagaattgggctccgccgctaataataatacgaaactgcagagagcattagcagcagggtcctatcgcaaatggtccgccgcaaatatcatttaaaaataaaaaataataataattttataaataatattatataaatatataaataaataattaatgattatataaataattaatt

SEQ ID NO: 57535 - DNA, 1253 bp, Cannabis sativa
tactatataataatatagtctataagcataatatatcataaaattacgattttacccttctttggtcaaaattatgaaaatgctcctaacacactaacaagttcttaaaatacaatttatcaatataggtttgcatattaaattatataataatataatttctcaataatacataattaaactagttagggttgctaatccagcttcataaaccttaggatattacactttaattaatggttgctagtacaaatcactgatgcccgttcttcagtgcaagtaatcttggtttggattacgactgtagtgagaaatcaaagtgaatgtactctatataatagagattatatatgataaggaccgatatgaataaatctgtctttatcaacatgtcgtttatcataaagatctaattcatatcataacgatgatcaatagtagaccaacttaaatcttgagttatcatgaactcttcttcatgttatttgtttctttgattcactcgttaaagtttattagaaaagattattcttataacttctattttgggaatctaataacatggatggttggaaacatgatgtaccattgtagaatcctaacttcctaacggatcgaatgttagttcccgtaaagtgttaattctggaattggaatattgtgcacaaattcagatggcatcttgaattatactacactagtgaattaatggaactaaaagtaaagaagtaattagaaaggtaaaatggtattttgaccaaaactaattatgaaccaacacatggagggctaatcacttgaattgattatattaatagacactgtagtaaaattcagtaaatataattctataattactaagagtttaatttcatatttgtgataaatatttgaatttaaaaagtagttgatatattttctcaagtggttgagagatattctcaatcagttattagatataaatatctataacagaattcagttatattatttactcaaacaatcaaacataattaaataaatagatttaaattaaataaaatctttattgagtttatttaaatatattgcataacaatgaacataaattttgaaatagaattttttacgtaatttttttaaaagcctaaaaagaatttttatcaaaagtatttttctctctaatacaaaaaaatttcttgctcatgtgttgagatttttacaagaacttcatatacactttatcctagtagcccacattattccttgtgtgt

SEQ ID NO: 57536 - DNA, 1108 bp, Cannabis sativa
gctatatacaacaaatcctacaaagattccagtgaccaataaaagcaataatcttgacaagaattgaacctaattcaacaaagaaatcgtcaaaatagtgttttctctgaattttgacattggacaaattgagacaatcagatattcaggtaaggtacattttcaattacatggctcaaaaaggtatttgtgtaaatattcaacaactaaaaattggcaaaatgaacacttaacatatctctgatctgttcccccaaaagaacagaaacaattctaaacctaaaaggctaaaccaaaaaaaacaaaaaaaaaaatacaccaaagagtagacattccagtttcataatcacatttccccaacaaccaaaccgaaaccctagaaccagaaaagtacacacaatcatgaacaaaaccatcaagaagaagaatacaaaaagttaaaaataaacaaagacaaaaatagaataaaattaaaacaaaaaagcccactcacatggtcttgcaaaccggtcaagcgggcctgacattctcctccaaagctcttctacttcttattcttcaatattctctgaaaaacagtgccaagctccggtgaagtaacacaaatgcctaccagaaccccgcacattccgatcagaaaaccctagaaaatcaaagatcgatacatatatcgatatacaaaacacacacacatatatatacatacatatatacacattaaaacacaaaatcacctcttgttttttttctcttaacacgaatcacgaggaatataggctgcgcattaatggagagaatccgatccagagccttctctaacgaatcaccaggaattgaccaaagagcattaaaaaagtgtacgacaatggaaaatagagaaaaaatttatacaaaatataaataaatatataataataatttatatatatataaatatatacgccgattggccctagacgacggcgatagttagagagagaaagtttagagagagaaagtaaaaagacaagtagagagagagagagaaattatagttgagaatatgaagggaaatttgaatttccatgcttaaataacctaaaaatttgtctcctaaatgcaaagttat

SEQ ID NO: 57537 - DNA, 760 bp, Cannabis sativa
  modified_base (60)..(62): a, c, t, g, unknown or other
cagatcctggtcgatctgatgcccaagttcccaagactcaccagggttcatctacaaaannnaacacacaagatgagtgttggatggagtatctagcgaaaaacaagctaatatgccgaccaggagtactcaacagattaaagaacagctatgtctaaagaaaagtcataactcaagaagtcaaaaagttttcttgagttagggcacaaaagttcatgaagcttagaataagcaagatgaaagacagacgcaatgtggttcagagacaggctctatggccgtaaacccacgtgaagacatgataaagaagagttgcagaagtttctaaatcgtagggtttcctaagtgttttttctacggcatagttgcattcaaagtgtaaacatgcaaagaaaagcataaaggaaatcagaatcttactcgaagattcgaatatctgagttcgagcaacgtcaagcaagctcgcagttgtatgaaggcactacgacaactctgaagccagaaaactctcttttcgctctgaagtttacttagcaaggaagagtgataaaatgggttatttgccaggactacgggtatttataggcaaggaggtaactgcacaagaaggaacctcagacgcctcaacttcccgcctcaaaaatatgggacatcaaaagtaatcgagtgcaaccgtcaaccgtggagagagaaaatcggattttgaaatattaattgtcagagcattaattagccgaaaactgaagagacgcccagtcag

SEQ ID NO: 57538 - DNA, 1739 bp, Cannabis sativa
ttgtaagtctgttggtcctcttttcaatagacttgttatttccttccttaaatgtcacgtgttgatattaaattgctgcataagtctccaaaaaaattactttgatgcagataagcctccaaaaattttactttgatgctgattagtcttaatctcaaaaaattgtggttatagtccctcagctcaatttcttgttagtccgtaggtactcaatttaggagctctatttgtaatttttcaaattttcacatgtcaaaagtttatttgtgcataacataaaaattatttaaataataccaaaatgactgaaaactttaataattgtttttttttaatctcaaatccaaacaaattcctaaataataaaaaatttgttcatttgcttgaagcaagaaacacaaacccaaagattacaaataaaccaataaatcttagattcaaacttgttggattcaaaccagagctgatcctgaggtgagacgaaagaggcgaccgccttaggccctccaccgctcaggcccccatttcaaaatttttttaaaataaagttagtaataaaataatttcaagtgtatattgcaactcaatggtaattcaattacagtaatcactaaaaagtttaaagtaggattgtatataaattttggtaaactgcccaacccaaataacccgttcaaactaaactgagataactcgacgaaaaatacaaacagaaaaactcaacaaaaatatagcccgcccaatctttatattgagcgggttgaaaataataccaacccgcccattcaacctaaactaacccgaccaacccgattaaaagagttttatatatatatatatttaaattttttattgtatacatttataaatcatataatttatatgactattcaaaaaaaatataaaattcaaactaatatattttttgtatagtggttaatttaaactttgaattcaatctatatatatttgtctcattattacaattaactaaaatatagtaattgaatgtaaaaataaaaaaaaaatattagtggttggtttggacgggttaacttgaccaaaccgactaatttcattgggcgggttactattttcttttttcttaattggacgggttacgcataaatttttgtaacccgatctttacactaggttgaataaaatgtaacataaactgaataaaccgaccgaagtacactcctaatttagagttcaaatgtcacgacccgagccctaggctgtggcagatatgtaatatccataacttaggtggtcaaaggtcacactttgacccttgtaggaagataacgcttataaatggtcctttaatttatatcacaaaatatttatttaaaaataatggattaactcctatatcgttaaaataatattagtaataaaatcaggaccactcattgatataaaagaacaataacacccccacagctatgtaatcactgaatagatagatttaataagtcaataaaataccaaaataatatctggcatccatctgttcctcatttctaactggtacatagctaatttaagtcattcagaccatccactctagcttaaatacaaaatcagtttcattagaagcttaataagtagaataagactaaactaatcacgacttccttcctcaacggtaccatcctcatccactagcatcgaactgagttctcggaaagagagaaaatagagggtgagcttataaagcccagtaggaaaac

SEQ ID NO: 57539 - DNA, 1823 bp, Cannabis sativa
aaaataatttccaacaatactttccatctagctatcatattcctcattcttaacttctcatagctagttaaatgataaagaccatccatttatatttagatacaaaacaatctataaaagaatagtttattaataattatgactggattaatcatattgttcttgatcaacgattctcttttatttacaagtatcaaactgaattccaggaagagagaatattggagtgagtttataaaacttagtaggaaaaaaattaatattaaatactagtaggttaatgaaaataattgcatagtgagctcttaaaaatagaaaatctcatcatcaccatcatgtataaacaaaatataaagagaccataaataatcaaaagagaaaatctaccagtgcatttaacacgatcaactagacccctaaatctcaataccaagcaatgaaaatgacatcctaaaccgggtagtcaagcttgataaccacaataatactagggatcaaatccatgttcacttcctgtacatgattctaggtctttcacctacaggatagtgcacatctgatctataatgaaacagagactaggtcccaaaaaaaatatggacaaatcattatcacatggctctcatcaatagtaagtataaccaaaagcagccaaacaagaataacaaaagagcatattccctttttattttttaaaatctgaccgcataatggttgtattttgaataaatccaaaaattataactaacataaataaatgtacaaaaatatttttggcacttagtgtcccaacagtttagaaaaatatgaagattaagttagactttttaaatattttacaaatcataataaatgaaatatgtctaatgtcattcatgatgtggtttatgccctaaagagactataaagacatttatgatgattaaataaagagttgaatatttgatataagcttgaacattaaattattaatatttagaattgaataatttatattaatgatcagaaaattatttatttatatatatgaggttttggcatgtagttgtacagagaactaagaccactcagctatgaataaaacagtcaacaacatattaaagttatagaatttttaatcaatggtgctaatacggttcactgatgcccgttctttgatgcaattctcgatttgaattacggatgtagtgagacattaaagtgaaggtactgtatataatagaaattatatataacaagaaccaatatgaatgaagtaagttctacgaatacatatactgctgtcggatgggtggtaaatttttttattgtttgtgattattttatattgttttagattgtgttttgttattattaatagcgttaaatgtttagaaaacgttcaattatagtcattatgctgctaaaattttggtagaattaggtctaattagtaatttagtatactatacttagttactagttaagaatttgataagtctcgaggcatttgatgtctaagtctcataaattatattgaaataatattttagaatacctaaggatgaataaaatatcacataaaattcaaaaataccaaaaaagtatcataaaacttaaactaaaataaagataattatgtttctagaactagaaccccaaattctgttatcttataacacacataactcataaatcttgaattataatattaatgggaaatgaaatgacgattagaaatcatcaaagtcatcatcacttgttttatcttatcgaaatttcagatgtatggagtatacattggagtaggaccaacattgatcttggtaaagatattataatct

SEQ ID NO: 57540 - DNA, 1223 bp, Cannabis sativa
cagattgtgtaactggtggtgtgatattgggattgaggagaggcacattagatggtagagggagatactgaaccgtaggagtagatgagacagacttggaattggaagaaaacagttgggaatagggaaaacatgtctcatcaaaggtgacacttcgggcaatataaattcgacccgaggaatgtagacatcgataccctttgtgttgaggactgtagcccaagaatacacacatggaagttctgaaatgaaacttgtgtttgttgtaaggacgcaatagaggaaaacatgcacacccaaatgtttttaaaaaagaataatcgggtttggagtggaacatattttcataaggagagatgtattgattcttttggataggaagtctattaatgagataggtagaggagacaaaggcatcccaccaaaatgataaaggcaaagttgcttgtgcaagcaaagtaaggcccatatcggtgatgtgcctatgtttcctttctactcttccttgttgttggtgtgtatgtgggcaagggtgtctaaaaatgatgcctaagttataaagaataggcttgagaggtctatattccccaccccagtcagcttggactgatttgattttggtgttgaattgccgttcaacatagttgttaaagtgtgtgaaaacactggcagtttcagattttgcagtaagaggaaaaatccatgagaatttggtaaaagcatcaatgaaacagatgtaatacttaaaaccttcaggtgaaggatggggtgagggtccccaaagatcagtgtgaactatttcaaatggtgcatgggttctattttgtgatgagggaaatgtaaattggtgaagtttgccatattgacatgcatgacagagaggcatttcagcactagtaatattgagaaaatggagaacttttattgaagaaacttgttgattgggatggccaagtctattgtgccacaatgatacaagtttagaaactttattacaagaattgggaacacttgtagtagtagaatttttagtacaagatgaagtagagacagcatgtgcttgacagaaagaagcatttcttgcagcagcaggggctgggagatgctgtttgggctgtggaatcttgtgagtaaacttgggtgctatttggtagaggccatctttaagggcaccctgaagaagagggatcttcgattgattgtccttgacaaaacacaaatca

SEQ ID NO: 57541 - DNA, 621 bp, Cannabis sativa
  modified_base (26)..(29): a, c, t, g, unknown or other
actcttgttaatttgttgttgatttnnnnttatttgtatgttatttttttgttgttgtttttatgttattttcaagttacttctatgtagttttatattattgttttcgtgttatttttatgaaaaaccgtaaaaatgtaatttttttataaaaaaatggtatcttatgcaattatcccaataaaaaaatatatttattaaaatttaatttatgttattaatatatgacaaatcaaaatataccacacctttctcaaaaaaaaaaaaaaaatatatatataccacaccaagtttaattttataaccataacctaaaaataatagatatagaccacattacgggactgcaaacagacaagcagaaccaagctgcaaacaaagcagcagaaacagagaaactaaagcaaacttcaacaaaacttggctgcaaaaacaggcagcaagcaacaaaatactagaaaaaagtgcagtaatcaaataaaaaaagaaaaaaaacaacaaagcaaacaatcagccatccaccctgactaggtgtgtgcataaattgatctaatccaatgagaaccgaccgatccaattacaaccgaccgccaaacattgaatatccaattatgatcggat

SEQ ID NO: 57542 - DNA, 1314 bp, Cannabis sativa
  modified_base (26)..(40): a, c, t, g, unknown or other
ataattaaatatatgtagcatgccannnnnnnnnnnnnnntacattaaaatatttgtattatgcaaacaaaattatataccactattatacatagcaaaataaagagtaaatatcatcctagaataataatatactatacaacaaaatagaaatatactgtacaacaaaatctatataccaacaacccacaacaactcgtaaaaaattaaaaaagaaatcgacataacttttaaataaacaagattttaacaaagctaatatagatataccataatctttaagtaatttgcttctaattctagaaaaatatgaaaaaaaaaattattgattttttttatgtggcaaaagacaatataaataataactaatctacaaaaaaagttattttgctacaagttttgaaatagccttcggctgaataactatttgaggccagtcggtattgataaaaattaggattgagttaattaaaatgtatctgtcagcaaacgaaaggtttcgggtgctccaagtgcaaattctaagcgtcattttctccaccatacagccacaatcaaccttcgtaatacgctggttattgatcttcaaccctaaataattgaaaggtaagaaacattttttaaacctagtcatttcagtcaatttaacccaagtctcatcttacattggggctccatatattgatgatttaccttatttctttgcaataagacaagagctctctgagaatagttgaaaaattttcaacagctgaatcaaagtctcatttgctgaataataacatatcgtcagcgaaataaatgcgagtaaccctcaaccgctcacatcttgggcaaaaactaaatttttagtgcttgatcactttgacaaagatctttgaaagatattccatcctaatgatgaaaagtggaggagacgttggatccccttgacgtaaacaccctcttgtaagcaagatatccattaatggatccatttatcatgaaggagaactgaggagttgtcacacaagtcataattagctctataaacttgttggaaaaattaagcgctactaacatctcttgcatgaagtcccaatctagggtgttgccctctattattttaaaaaatcaaaatggttttgttaacgggaggtttatagcacacacaacattaagatttgtcaaaatttagtgaggtattatgatagattttcgcaatgattttctccgatgatttaaacaaaatttttgaagaatcatgccttttaaagaaaattaatcatctgtatatagtaaaatttcaaaaactaaagaaattttatatattat

SEQ ID NO: 57543 - DNA, 769 bp, Cannabis sativa
aaataatttattatattagatacttaaataattatagtaaatgagaattagtgcaatggttttcacttatttcacagatccttggttttattctaaagttagtttcgaaatcatattttctaaaataaaaataaaagtaacataggtggtatcgaactcggatctcgtcaacaataaactactggtacaaccattagaccaaattaaataatttgatattatttggtttgtattatatttaaatggtttatggttagtatatgttaggtttcctctcattatttcgtttaaatgctcacgagtctttttaaattaacaaatttaccccttaaaatttgacaactatcaaatcgtacaccctcaaaataaaaatgagaaatattcaacattagtaaaaaatcaatttagatgtaaaaaaaaatatataaaattttaaattcaaaactcgctgactttatagtcttaagcgagataagaataaaaactattgaactgatattgacgagacatatgtctgtctcagaatacatagtcaaaaagaagatatatattcgttcaagtagaataaatgtaatcatatactgcaatctcggattacatatagcaagacagtcagctcgcaatattcactcaaatgaagagatgtagcgagacgaaccacttgctaacatttaggattttttctacatgaagatggataaggaggacaactcatgttaagcgagatacacttataaaaatcagtaaccaacgaaaagaataagaagaa

SEQ ID NO: 57544 - DNA, 2258 bp, Cannabis sativa
  modified_base (181)..(188): a, c, t, g, unknown or other
  modified_base (1338)..(1354): a, c, t, g, unknown or other
  modified_base (1447)..(1451): a, c, t, g, unknown or other
tcgttgactcacggggatgaaaaaaatatgttaaaatttcgggattttttttctcagaattttgacatgtatattctcttaattttttttagctgttaaaaattaatttgaactattgagattgttagatttaaggtcttttatctaattttattcaattttactatttcagtgattattnnnnnnnnaaatcatgctctccagactttgatatctaccaaatcatgccccttgaactttgatatgtactaactttcatccatattagaatttttttactaaaattggacaaaagttcttaaattcaacaatcttaatagttcatgagtatttttaagggaatataccttgtgttttcatgaaaaacatatttggtactctgtgttttcaataatacttaattgatacctcatatttttaaattatatatatttggtaccctaaagtaaaatttaatcaatacagttttatcaatttaaccaaacagttctcagttatatataatcaaataattaaatttgaattcaaagtttataaaattttagagtgttgattgtattgataaaattttattaaaaaaatttgaatttaaggtaccaaataggtataattttgaaatacagggtaccaaattagtattattaaaaatatagggtaccaaacttgtatttagataaaacacagggtaccaattgtgtagataccctatttttaacgaccttaaaagttcaggggcatgatttgatatatgtcaaagttcaagggaaaaaatcttaattagcctaaaatttatattaaaattgtattaataaaggtaaatactattttacaccgtgtgttttgcaaaaattattaattgggcctttggttttgttaaataacaaaatggactctgtatttttttaaattgtataaataggaccctaaattgattttttgtcaaaataaaacttaataataatctaatctacaaaactggttacattttctgtatctgttcgtgttagaaattattttaaagtttgttatattaaaaaataaaattattaaaaattgagctcaatgttttatttttaccattttagaaaatatagtatctgttttgtcatttatcaaaacagaggatctaattgataatttttgtaaaaaaaaagggttcaaaatagtatttaccctattaataatactaaattttaacttcattgatcagcgatccaaacaagtcagcaagcatattttaaaggttaagcaataaaacccagccactttaagttgtctttcaccacctgatccgagaaatggcatttaaaaaatgaaaacttacaaaaatactggaannnnnnnnnnnnnnnnnaaaaatactgtcacacggaaatcttttaaaaaatactgtgtttttataaaacaccaataaaacacaaaacagaataactcaaaacaacagtannnnnactaaaaaacaccagtagaacaacagtgaaaacttaacactgtatactgtagtatgaaacttataaaaaaaaacacagtaaaaaagtaaaaaaatactgtctgacagtatttttgtaaaaaaaagtcagtataccatgtaaatttcctaatctaattcacatatatatggcatattaaatagtataaaaatactttaaaaaataccatataaattagtaaaacttaaaagtaccatatttaagtaaataacttttaaaatctcataaggaatgtaatttcctctacctcgtatagcaaagctgcaaatattttttcccacagtataacaatcccaatctggcctcaaatatgatgtaattttaatgaagttgaggatattgtgaaacaaattaggagcctttgttgtattgtagaccactagacctgctcaatttttgtttcattctcaggaactctaatattgttgctcattgtttaactaaagccaacactgtttgggatagggctttgccctctattgcaagtgctgctttattggctggcttccctaatttttgtgtaagttttttgttgtttgaatgataattcatctttcaaacaaaaagtctaataaatcacaatatacatatagttcctaactaaaaatatacatattgaaattataagtagtgattgtcaacttgacattcattattcatataagactatatatgatcattaaaatcctattgatattttccacaccatagttgttgttgggaatttatggaagataatattggttagacatggataaatctaatcca

SEQ ID NO: 57545 - DNA, 4220 bp, Cannabis sativa
gccctaccatctgatcaagagaagtttgtggtgtattgtcatgcatctaggcagggtttgggttgtgtattgatgcaagcagactaagttataacgtatgcctcatgacaactaaaagactacgagcagcgttatctaactcatgaccgagaacttgcagcagtggtgttcgccttgaagatttggcgacaatacttatatggtgaatggtgtgaaatttataccgatcataaaagtctcatgtactttttcactccgaaagatctaaacatgaattaaaggtgatggttagagttagtgagagactatgattgtgaaatcctatatcaccccaagaaagcaaatgttgctgcggatgccctgagtcgaaaagggcttgatcaaactttcagtgcggtaatgatttctccttagttagcctcggatatgtccagggcaaacattgaatttgtaattggagaattatataacctgacacttcattcagagttgttggaaataattagaatagcacaactagaagaccctgaattggctaaggatccagaagatatcttagaaggaaaagctaaggacttctcaattttgaacaatggaatgatgttgtgtaaaacttgggtgtgtgtcccgagtgatcttgagcctgagaaagaaattcttgatgaagcatacactatcccttactcattgcatctgagtaccaccaagatgtatcaagatttgaagcccgatttctggttgtacagaatgaaaagggatgtggtggataacatgtctaaatgcttaacctgctagcaaatcaaagtagaccatctgcgaccggcctgattacttcagctattaacacttccaaaattgaagtgggaagacattgcaatagattttgttgttggattgcccaagaccacaaggatgtacgactcatcgctttacaaagtcagcacattttttgcctgtgaaagtaacatatacagtggatcaatatgctgacttgtacgtgaaagaaatcattcgtcttcatggagtcccaaagtttattatttctgataaagatccaaaattcacatcaatgttctggtgagcttatagaaggccatagatgctagctggaagttcagcaaagcctttcatcctcaaatggatgaccagtctgaacaaactatacaaatagttgaggatttgtaacaagcttgtgtcatggactttcgaggttcatggtgtaagtatttacctctgattgaattctcctagaataacagttatcaaagtaccataggaatgctccctatgagctgctatattgcagaaaaagtcgttccccaattcattaggacgaaataggagaatgaaaatatttgggccctgagttagtccaaaaaacaaacgaggcagtagacaagattaaagctcggatgctagcttcacagaggaggcaaaaaagttatgcggatcccaagtgctgggacattacatttcagataggagatcatgttttcctacgtgtatcaccaatgaagggtatcaggcgcttcagaaagaaatgcaaactaagtccaaggtttattggaccttttgaggtacttgaaaaggttggataaattgaataccggtttgctttgcctccagctttgtcaatggtacacaatgtgtttcatgtctcaatgatgagaaagtacgtatctaatccaatgcatgtcttgagttatgaagcattggagttacatctggatctgtcttatgatgaacaactagtgcaagctctagatagaaaggagaaagtccttcgaaacaagaccataacatttgttaaagtgctctggagaaatagtaaagtggaagaggccacttgggggttggagtctgatatgacgactcaatatccagagctattcaggttagatttcgaggatgaaattcttttaacttggggataattgtaaagaccacctatgttgatatgttagattatcaaataattagggtttaattatgggattgaattattagttatgatttgtgtatttgtggagatttattcaacttcagaatgtattaattatgctatttatgtgaatttctcatttttttcgtatttatgttcggtagtagtggaacgcgacgttgggtcattagagagtcacatttttatatggttttgaattttgttactgaggaattattgttaggtataggaagtattaggaatttttggggtttggaaaatgaccaaattacccctttttgcgcaattagtatttgttttcttgtcaagggcaatgtggtcatttttgtatgggttcttgtcactttgtggggttattatttgctttaggttttattttaattaagttaaaatatgagtaaatggattaacttgatgaaacatagaagaaaacccttctttctcttcaactctctttctctctttcgattgtgctagaaggcacctagggtttggatttttctccttgtttttgagaattctagaaggaattgagagctttggttcaaggtatataattcttaccattattcttttaaatgttttatagtataagttgggttttggtgttgagttgagcatttaagttgctttatgaattggggtgtggtttcatttcaaattctcaagataggttgtgattatttaggttattctaagctgagttggttgagttttgtgatgattgggtgaagttagagtttggaagctcaagctttgatctctaatgatgctttcattttttgagctatttattatgttctattacttgaattaagcttgttggagtataagcaggtattcttgagatttttagagagtttgaggttgaattgtgctgaggggagcatttttgggttcccagcactgaaacggtcgacccgtttagggggatctgtagcaaccaatcgacgggttggtcctcaagaaccaaaattctggttggggaaccggtctgctggttgggacaattaatgaaccctagtttttccagttgttgtgatttttaaggtatttccatgttattcattgatagggatatttctagttttgattttaagttcccaaagtgtgttttaacgtgtccctcactagaattgcaaatgttgtgatttaaggccctgtaaaacgtcgacctgtaattccactcaggctgactggcacacctgagtgccaaaacaaggtaagatagcataaagtatatatatgtgaatgttatgttattatttgtttacactacttgcactattaaaatgtagttttaagggtgctagtatagtggagttttagggtagttacagtgttacaaccacgagtatcggagggtacggtgtgcatgtggtataacacgcagtaactcccggaagcacaatgattgtcctatcaacacgagtacggagttactgtagtgcatatggtacagtgatcgtacttccgttgagaatgctcttaaccatttagtgagctggtagttgggctcaggacgactttagcataaagctggtatcgcattggttatatatatattatgcatatcaaactgggtcttttgactcatcagcttgctaccttgtgccaataagggtaaagctaagctggaggagcaatgagctgagccttgcaaggattgtacatatcacaacagtgcaacctggagggtttcaatcatactgcattttgaattaaattttgatgctgcctgttgttttttaaaaaaatatattgtgtgtaattatatataatacatgtagtttcaacagtagttttgaactcgggatcccgacctacgagttttataaatataattaaagtagtttatatatttgaattagtaaattttcaaatacgggcattactcttgtttaatgactatttgaagtcatacttttcttattatgccatgtgtttcattatccgaatacgtggataacatttaacccccaagctctcggaactttgcaagttgtgggaacttgcaatcctcatttggaactctgaggtgcttgtatgacacgtgaatgattgttgggaacatgaatgtgttcttcttgttgagctttcatcgattgaaagatcaagaattaagatgacactggagtggcacacatgccatgtatttagtgaacttgttgtcaatacgcacgtgtagggggcacgttgtccagggaaagtttaacgccctaaataattaggcacgctacccaagatacttatgaaa

SEQ ID NO: 57546 - DNA, 636 bp, Cannabis sativa
tcagaaaactatcacaaattgattttctattttataaaagaattttctaacatgtattttttttaacattttttctcgcatacacgtgggtcccaaacccaagtccagggtatgggttggagtttggattttgagttcgagttcaggttttcgaattcgagattcgagatttgggatccgacatttgggttcggggcgggattcgggtcttggtgcaattctaaggtcttggtctagttttgggttcggtacgagtttgggtttaggtccggggtgtggggttcgggtttgagtttgggtcgcactgccagtctaagtttggggccaaggtctgggtctgagtctgaggttcaaggttcgaggtctagggttcatggtcttattaagtctagggctgggtctgggtcgcgcagtcgagtcgggttcggggtccgggtcccaagtcttagttcgaggcctggtctaaggagagacgaattcatgtcgtggtatggtgtagtatattgaagttttttttttgggaaaaaagatctaaaaacagattttaaaaaatattagccaaacaccgttaaatttttaaaatgacaaaaaaatcccttcttaatcttactattgaaaacataattttaaaaatta

SEQ ID NO: 57547 - DNA, 1064 bp, Cannabis sativa
  modified_base (1007)..(1012): a, c, t, g, unknown or other
cacatttaatttttaagtcacccagagcaggtgggtgccacggattaaatgcttgaactggtgaaggagatcttgaaacagagttctcattctgatgataactagtttgagcatcccgaaaattttgcaagtaattcgtagcaaagagacaagtgtgcttgctggttttgcagtacccttatgtacaaccttatttctctcaaaccatgtcgaccacatagtatagattatagattccatataaattttggtgtacagagttgagaggtgcattgcatcaagtattcgcatctatgcataaagtcggcaaggctcaagtcaaacactaaatttgaatatcgccaaacggaacgtgcatatttacatctgaacttggcatgtcttatggaatctcaagcccgagaataaagggagcaggtcgagtcagtaattacttttcatcttaccaaagagatgatgatagggagtaatttcgccttttttttatgaagttttgtcatctaatatttcattaaaaaaaatattttataaaaaaaaaaaaatatttattttgattgtcttgtttgattacacaataaagagttggtgagtgtaattagaagcctttaattatctgtaattataccgtataattgcataatcaaataaataagtcaaattaagtagttatcgagaatcacacttgaatgaaattacaaaacgactttgcaaatgcactattagtaattacatgaaaaaaaaaaaataacattatacagcaattaattatctacaaaataataatatttggatgttaaaccttccttaagggttagacttttggcttgacaaatctctactaaatggattcctacaaaattcaacttagttcgtcatgacctttgtcctatttgcgagttaaaagaagaaactatccatcatactttttgggggtgcttttttttttatatatatattggacaataaataaaaaattattaaaaatcaatatatcaatatatatatannnnnntctttatatattaaaagtgcctaagtttaacattcttggtttaacagaatat

SEQ ID NO: 57548 - DNA, 1574 bp, Cannabis sativa
ctcactatctttcaatatttagtaccataaaaacgagaagcatccaagtcccaaggcatgggagctaaaaataaacgaaatagcatcaaagaaatcaactcgaaggcctagggtttcatccagtgcccaagttaacaacccaactaaggtttcagtttttgggactgtcttagatggatcaaactttacactgagacattagacatgtcacgaacatattttaggcatcaggattagattcaaagcacttctgtttttgagcactcggagcacccaggtgccccaagcacccaacaccaggttgacgttttatcaacctagggcgcttccaagcatcaaactgaagaacaatcttgtgcattttcttcatcttcatgaaaatgaggaaacaagaactattagggaagaaacagaccgacctagagggcccaacgcccaagttgacattttgtcaacctgggcctattccaaggagtttttttgagaagtcttctgggcatattctttatttttaaaaaaattaagatacaagtatttttgggaatcaaatggaaccatctagtggcctgaaattggatccagcgcccaggttgacacctggtgctgggccgagtgcctagtttacattttgtcaacatgggctatttctaatcatgttttcaaaaagtattcctggcatttttccgtcatcataaataacaaagatacaagtaaactcggggagaaaacgataattccaggcgcatgaaaactgagcccagtgctcaggataacctggtaccaagcctagcactcaggttgacaatcaacctggtgtgctggtttcgatcatccaaatgcaaattgtgctctgagcattctctctagcatggtcgaaaatgtggtaggggactgcgtcctcgatttcaagaaccttggaagtatcaagacgggttccctaaagctccaaaaagagcacatagtgctcaggttgatagatgacctggtgctttgggttttgcttattcgattctgattctgtctcgagcgttcgtctagtatttcatagtaattaagagctatgaagtcagacaattcaaattcacaacttcatattttcagctttttagcaaagtgacttactcataaattaggcatttttgagtctctcaatttcgtgaaacaacaacatctttgagaactggtaaatgacttcaccagaataaagaaactagctaagtgatgttaaaatacaacttaggcatcaaaaaatgcatccccatcatgttttcctactcactcagcatccagattgatgacatatctcaacttgggcattggtccgagaacaaattttagtgaagcacccattactcactcaatactgatctgattgacgtgattcaccttgcgtttcgaagatatttcaatgatctataaagtcaagtctcacactccaatcacaattctgaagttatgacctccaaatattctcctcaagagagttacaaatttaagctaaaacttacccgaagtgggtcccgaggacgcaacccaaattttgaaaatcgacgactgacctctagagtaaattt

SEQ ID NO: 57549 - DNA, 1236 bp, Cannabis sativa
tttgccaagccatgggccgctaaattctcagagcgagccacctgcccccgaaaatttagacaataaagctgtaacatcttcaaacaacgctcttaactcgttaaaatacatctttcccttgttgatggtcgtcaccaaagctcacaaatctgaataaattgcatgaattgaaagaccacacatatgagcctaattgagaccaaccaacagggctaaagtttcagcctgtaacactgaaattccacctgaaaaaacatcagaaaatcagaaaaaaatttacttaaaaaattatcaagctgatcaaaatcaatcaaacaccaaaaactaaacaactagaccccctataaaaatactagaattagccaaagagaatactttttggctagtagcaactaaactcttgcattttacttcataatcatcttaggatcactatccttactagaccctaagacctaaaaaagattttgatatgtaatctagtaacaacaaataagcccttcaatgctcccataacctaggatatcaaaaagtttcctttggaaataaacaaaataatgaaataagcaacggataatatttttaatgtactcactatgattaacctttgaggggtttgctcaacgcaccgtgggctatattatcttctgacaatataacaacacctaatccaactaagcttgtggtgttcaataccgctgcatcaatccactataagtttagagtgtaaactctctttttgggcacctctagacgttctagccaaagctcctctccttccattagtttggagaccttttttggagccatctttcattgaaatgatcgaatcataataactaattatccactcaaccacattttatgattatcttttctgttggccatgggtaatcttattccttttcgtccatattatgtaagaacacataattaattttgattgcctgaaaatatataaatgccaaggcgacctaaatttatggagcctcttattttattttattttttaattcgagaaaaagaagtagaggaacttgcatttgcatagccaattgccactatgctagagttacttattattttatgggtaaatggtggcaaaactcctaatacttttgttttggtttcgttaaactcatacaacccgaatttctgcgggtaaacccccaaaaccaagaaactgttagcaatttaacacttccgtccaaatttagttgttaactgccaggttgg

SEQ ID NO: 57550 - DNA, 1401 bp, Cannabis sativa
  modified_base (685)..(698): a, c, t, g, unknown or other
ttaccagtgcagtagcgaacggtgctggtaaaagtgatatttcttgtagtgagtcacgtgtgtaattttaattaaaaaaattaaaacatgtattttaaaaaaaaaaaataagtaaaagtaaattaagaaaacataaattatttttttcaaattaatttcatagtgctgacatgacattagtagtctaaacggtcacatcattattctgtttgccacatgtaataaaatcagacagaaggaccactttacaacattatgaatagcttatggaccatttttaacaagttgaaaaattcaggggcacaattatgcataagtcatagttcagagggaaaaaatccaaaataacattttcaataaataaatttattgtctttatcataaatgattttaagtggactatttgacgtctcgggaaatcgaggattcttctcatggattttatctcttgtagtacgtaggacattgctccttggatagatttttagattactagatcgatataaaaacatctcactataaaacatctcatttttagtcacaacaaaatttgtgactaaaagtaaaaaaagttgcgactaattataaataataattcttatgttgtgattaaaaagtttgaatagtcacaaaaatcataatttgtttttactcacaatacctgttgtgactaaaactaaattannnnnnnnnnnnnnctaaatattatgttttagtcacacgtataattttttattgacaatttagtttacaaaaaaaaaattatattgtgatttcttgtagtgtcttttatctgatgtttatcaacttttatctctaaacttgttttgggactgtcaaccatgtgaattgatgatgcattgatgctgctgatggtgactttgaaaataaagaagaagaaagacaagttacaaaactaccctcctccatccaactatacaatacttgaattgatttgatattgtgaatttgttatatttattttatctttttgtaattatctgaagccaatactattttctagttcttcattgagatcaatttttttattaatgttggtttcggtgtttgttgtcttaaggtggggttcgattgcctatgatggtatgtttttttttttttttgctgtagtcttcagggctatattgggtgtaaggatgcacaccgggtaggaaataagcggggagtgctctccccgtccttatccccgttaaggattttaatccccatccccgcttatttcccattggagacggggtagggaatctcctaataaggcggggacggggtggggaatcccctgatggggcggggaatcccctattgtaaaaataaagtttattttaaaaatttaaatgtataaaattattaaattatattaaagataaaatattacatatt

SEQ ID NO: 57551 - DNA, 1138 bp, Cannabis sativa
tagaaaatttatataaatattttaaaaaattaatatttatgttaaattagtgattaaattagtgttaagataaacaattttatattattcaagtatttttactttactattttaatatttattaaataaaaaatatagtaaaatattttattatatatttatgatatatatttaattatataggatacattattttattttattttctaattaatttattttttatttatttttttgctacaaattatttattattatatattttaattttaatttattattatatattttttattttaatttaagtttttctttttctaaaaggaaacaaataaaatagtccagtctattcttaaaccaaacacaggattactttcagcataatccaatcttgtccagtccaatcctttttagtccaatcctgcataccaaacgggcccttaaagcattgtatgaaagttaaaaagtcaagatcttactatataatgatgcacaattattagccatattataattatacgtgaatatggttgttatatatagtgacaatagtaatactcccacattgagtacaatttgtaataacaactaactataacttataaaacttaaatcttttaattaaggataatcatacaccacacctattactttaatttaaatttaattaatattcttttagaaatttaggatactttaattacgtacacattagtttacaaaatttacatacttgagtttattttagttaagcattaatatggaggttgttacatctttattagttatatgatcattcccatgatgatggagaacctctcataatacttattgatcatgcgaaataatctcatattatcaatttattaacattaggaatgaaatatataaatatatcaccggctatatatttacattatcaacacaattaagtttgcaaagttttggagtttcttttagttaagtatcatcttacactattgttatttaacatcgatcgagctcaacaaaattaacatggagattgataaggcgaacataatacttacgcttttattagttataggcaagctaatacccgtgtgttttgctttttgtgtccatgtgcatgaacgttgatcatcgccgcgatgatgaa

SEQ ID NO: 57552 - DNA, 1238 bp, Cannabis sativa
agtatatctaaaatgaaatgtcttctaagtatttgttcaaatgcattctatctctcttcatatgtataatcaaataaacagctaagggtaaaatggagattttacttataatactgggtataaattaaataatatataaggaaaggtaaaaataaaaggaggtaatgaaaagtgggtatggggtgcaattttctcaaaagggatttatgtttaggctaaaaaataaaaataagttttttctttttattaatgttatctatgtttttaatttattgaatctagctaaatagttttattttttatttttattttaagattcttaactaatcacaaatttatttttttaaaattcaaaaatattaaattataagaataattaagcactatttttgtaaaacttttacatttttacgtttaaaatattcttacggtgttttataaaaataatacaaaaataataaaaaaatacataaaagtaacaggaaaataacattcaaaaaacaacaaaaataacatacaaataacaaaaaatcaacaaaagtacaacataaaaatatatcaaaaaattgtatttactgtaaataaaatcataaaaatatttaaaattctgtacaactgtatttttgtaattttttgttgtttttgtgtattttttgaataattcttaaatcatattattgtctagaatttctctcaaaatatatgacaatcctggagtaagccaagtgatgatgggccccacactacaagacatgtcatcttaaccactcccagagattattgtttcaaaggaataataagagacttgtcgtctccgagagggtctacctggacaagagtatttcttgtctcatcctctccgcaagtgaactaaacccatagaaggatatagaaggacaagcggagtgtagcacactgctcaaggctaaatcactgtatgtgtatttaatgcggcaaggggaagagcatccgactccttacgctgaacagacgtgctcaaggttaaaactcataattttctaatttcacgatgtcccatacatcaattgacgactacatagtgagttatcaaatcatgagtaagaaataagtcaaatctcaccaaacacctataatagcccaaatacatcatgaaaaaaaaggtaatcatgccctgattgagactcaaatttgtatattttaagcttttaattgtgtgtataaaattaatttaattaaatacttttatgattttaatt

SEQ ID NO: 57553 - DNA, 959 bp, Cannabis sativa
tatcagtaaccgatttagttatagatatatttatttatttaaagaattaaatctgatttaattaaaggattttaactactataaatacgagtctgatttgagaaatcagaagacttctcaaacactttaattttcgaaattaagagagaaaaaagaaattattttttctctcatcaattcgtgctcatgtgtttagacctcatcaagaataaacttatacactttatcctaatagcccacactattccttgtgtgtggtggatcgatttggaagacactagtgtgagtctaattgcatcatcatcatcattataattaagggatacaacatgcgagaagtttcaaggatgccctgatagtcatcaagatgtatatattttaaacttactatttattgttttgatttaatggacacacatctacagatctattgggatatagtacaatgataatcaattaatacaaaactctttcgctgcgtacctgatttagtaccataaaactaatagaaccctcaaaacattctcacaatctttgtgagacagagactctgaacaaaaaatcttagcaccttttctcaaggttctctctctcgtcccagccctaactaccaacgatcccattccccagcccaccgcaactggaaggacgacaaccctagccttgccttggtgatcagtgaaacccaggtactttccccttcgatctctccctctcacgcactttgttgtctctcccaatctcacaccctctttctctgtccatctcagtctctatatgcttagatctcatttttgttcatgtttcatagacatggcacatgatatgttttaaatctgtttatatatatatatagtttcaaatgttggattaaaaatcctatgtgggcacatatgtataatgtatatgctattataaagtgtgatacaaaatttagtgaccaattatgttatgggtat

SEQ ID NO: 57554 - DNA, 1297 bp, Cannabis sativa
gttcatgacccagcacccaagttgacatccaacgtccaagttgacatcccaacgcccaagttgacatatgacattaacctggactctagataagggatgtactttaagatgcttaagtgatatttttacatcacttagtctatttatgtgttctggtgaagctggttaccagttcttggagatgttgctgtattacaaaaatgagagactcaaaactctccatttctgggtgagctagaaatgagaaatgcaaagttgtgaatttaatttctctaaattcatagatcattgtcattgtcaaaaactagacagacggtcaaaacagcattagattcggataagtagaacccagcgtaccaggcctcttgtcaacctggcgttttgtacttactctcgagctccaggattttgtttttgatacttccaaggcttctgaacttgaggacgaggttttataccttgtttttgatcattttggattcaatggtcgcatcgaatttgacatttgagcaattgaaggcagtgtcctaggttgattgttaacctgggcgctaggccttgtttctaaggacttgggattgtgggtttctccctaagtttacatgaatcttcgttatttctgatgacaaaaaaaatgcatggaacactttttggtgaatttgatcggaaacagcccaagttgacaatatgtcaacctaggcgctgggtcccccttttgcccctctaaaaattctgtttggtttccgaaaatagtttaatctcaatattttttgaaaacggagaagatgctcaaaagaattcctaaaaaaactccattttgtcaacctaggcactgggcctttattttgtacctaaaaattattatttttcctctaaaaggatctattttcctatttttgataaaaacaaagaagatgtaaaagtcagatctcttatatgatacttggaaggcgcccatattagcaaattgtcaacttgggcactgggtgctcggggccccaagtgcccaaaaatcaattttctctaatgctgattctgatgcctcaaatatgtctgtggtatgtctagttaatatcccaatgcaagttttgacctttttttcagtaaaacggtccagggtgaaaccctaggttcccaggttggcttatgggttgcaggttcatgtaatttcaattcccaaggcttagattatgttgctccatgtcttcatgtgttaggctatttttagcctaagtttcgggtcacattttatagttatttttcttctttattgttatttttggaatagaattacgct

SEQ ID NO: 57555 - DNA, 5877 bp, Cannabis sativa
  modified_base (144)..(149): a, c, t, g, unknown or other
  modified_base (199)..(203): a, c, t, g, unknown or other
atgtactaaaccatgctccttagaatttgatatctaccaaatcatgcccctcaaactttgatatgtactaaatcatgccccctagactttcatccatattagaagttttttactgaaactagacaaaagtctttaaatttaacnnnnnnaatagttcgatgggaatttttaacggtaaaaaaagtttagggggcatgannnnntacatgtcaaagttcagaggaaaaaattactaattagccttaatattattagaggcagagaggtctaccggtaaaaagttcattttccgtcgataatagttattatctctgctaataactatttttattattagatatttttatttaggaaattaatattattattttgttatccaatatttgtggttttcgattagaaattgatacttgagctttttcttcttcatttttttgttccaatttatttaggctatcatctaacatgttaagtctccaataatctatttcaaaatatataataacgtaactaaatatgagtttctcaaacccatatataacttatttcaataaataagaaagatcaactatatgaatccaaacattcaaaagcagatctcacaataattaagaaaaacgaatttccatacattcaaaagcagatctcacattaattaaaaaaaacgaatgtcactatataacattatgatttgtatgaaatatcaatatcgctaaccatacaatcgatctgttaattaaattaatcactgcactagctacatacatattcgtataatttccttatagaatggtttaataatgtgtcggttatatgacattggccttattttcttatgtcttgttattgattgtctttgtaggtagccttatatttttagggatatctctcacacacaattataaacgacaacatccaaaatgtactgcaaacagatagaaatgtaatctcatttacggcaaccaccaccattattatagcacaggccttagaagaaaggcaaggcttttattattagatataataagaagaaaaagtcacaacaacaccatattatacaacacaaataccaaactggaacaaaacacataggatggggtaggataggataaaatacaataatacaatattaatacagcgatcaaatcaggtgacataaatgatttattttgggtccatagaaggacttatgtggcaaaggagccttctaagcatgaaccgaaaggtccttatatactctacaaacaaagccacatatcattaatcgctgcagtggaagagccccttcacttttttaccatttcagctttttgtttgggaagtactgcaagaaaaataataaaaggtgtgaataatatgattaattgcctaatataattcttttaagatataattgactggtgatagggctaattaccttttcgatgagggagagataatatggtttgaccttttccacatcaatcagctcagtagccttgctgtagagctcatatttgctgtaaagaaaaagttgtatagatagaattagtattataagtataatcatatataatatacacatatatatatataagaagtatttattaattacttgaagatttggagccactttagattttcatggtcctcctcattcataaggtgcctgtatgctccaccggtgtgtaatgctgcagttatcaaatatccatcatcaatcaaaatgattttaaattattaaatttatatacaaaaaattataatttttataaaagtactatatatacttacgatagaaggagtggtttctaataatgaaaagagcagctggaggtagagtggttttgttctctctcgccacctgaaatatcaattaaattattatgtcattctaaactttagcttctctgtttttaccatataaacatatataaaatatgtgtgattaattaatttgtaattaggtgcatgtgtttgaagaagatgtaccaaatacatgtagtcatcatgtccccatgacatcaatacattgtccagtccacaattctctgagtagactccatacttggtgttataagcagggttgtggtagtctgggttttccttgaaatactgaaaataatcaaaaagatgattcgttattattattattagactattaactatgttaatttcatcgactaaatttgagtcacaacaaatgatgattaaactaagtaccttgtggtgaagaatagactcatcaaaagcacatccaactgggtatgtgtcccctgtaatgtgaatcaattatgagtataatgagtacaaattaagtttgacttaataaaaaagttgtcacatgcaatattttacttacctacaacagcccaataaggaagccctccaaactgtggaagaagaagcacctttccaagatctatacaacattagaacaagaaatcaaatatattagctaacttaattaagtttgagtagtaatgatgttatatatagtactatagatataccatggataaggccagtcaaatgaagccaatcctcatcgggatagtcctttctaatggattcagcagtttggagcaagtgttccatttgaggcaaatccgagtcaaggtcactctcatccacaacatcattaagaagctcacaacattcccatatgctcatctccatcttgtccattttgatgtactcttccctcatcttctttacctgaattaattaatttacacacgtactatttgtaagaacatttatttaccccttcatctgatatatcttaattataagcacttcttttttagtaacacttttattaaattttatatgcttaagtgtattgaggaaaatcttaattaacatttgagttgggttgtagtgactagttgtagttgtacttacaaaatcataagtctggttcttgtgattgattttgtagaagttctcaacacgcgcatgcttttctccttcagcattgtagtccctgtttatgtcattttacaatataattattagaatattaacaagtatttatggtctttgacattccaacttttaaatgtttgttttctgtttttaaaatcaggtaattgttctctacaaagaatagataaaagaattcgcatcattttctcacaataatatttagatatttattaatttcaaaaaaaaaaaaaaaagaaagaaagaaagaaaaaaactgaaggtttttaattaattattttcctggttttcccaaataatttttcttctttcctaacctctggaataagttacaaatttacaatatgtaagttttagtaacttatcaaaaaaaaatgtaagctttagtaaccgtatttaaaagaacatttgtaaatagttaaaactaacaaaaataataataattgtcgggagctcacacttaagaacatttaccattttttcctaaattaaaagtacacaaaagtatgaaagtactaattatgtagcccataaacactaataaagttagtgaagctaagcaattacctttttcaacagaaaaatgtcttaagtttaattttaaagtatatataatacaataaatctctctatgtttattttagcctataaacaatggcatatttaaaaagaaatggtataaagtgtagagtagtatgagaatattccagattccgcaggcccaatgggttagtagtccagtgaacatatatgggctcagttatgagtctaattttaaagatgtagattctcttgtaatttaggtgacacttggacataaatcacaccaagttttcttctaatttcgttgaaatatatgatgtcacaaatgtgtgtcttttttatttttttgaacatacacaaatgcgtgtctatgatctatcttcaccaccaacgaaacaaatatttccaagtttagaaaatttgataagaactataacgtatcatccttctctacaatataaatatatcacatatataataatgttttaaaacgacagctgttgataaattagttagatcatatgtccaaaatttctgcatttgtaaatatataaagtggggggtttgagctggaaagaaagaatcaccaacctccaaagaacctaaaataactgaaactaacctccaattgcacgtgtttttcttttttcctaattaatactttatttgtgggtacgtattattccactccaaaaataagaacaaaattgattttcttaataatatatagtaagttttatttatataattaatagaatcaaggccatgatattcatttttttttttaaaaaaaaaaagaaacaaaaaaatatactttcttattctagagggattattttattttatttttctttaaattttaaagaacaaaattaataaaacttgcgattaatttaaaatgttgtttaagatcactacaaatacaaaataatatgtttccaagaaccctcccggttcaaaataattaagacacggatctgttagattaagttattatatatggccatgtttatatcatcacttatataattatctctttttaatatataaatattatactaaattatatatttattgataataattctgcttggagtacttttagttgagaaataattaataattaagagttaatatgcatagattataacctaaaggtttcaccgaatgagttggtttctggcaccacaaacccaccgttgatcttcttttcctcagcttcttttcctgttgtaattaacaatcaaaaatatttatgaggaggggagaccaaaacatttgagtacggaatttatgtcaaaaagaactgtacgtacgggcaatattcttaattagtatatgtttaacaattattattatagtcataataatagtatacttcaataaactaaaataaaatattataataatagttgcggtccaatataatttaaatatatatataaaagataaattaaggcatgcatcgtgaaaaatgtaaataataaagtcagcccaaaaaccttcaatatataaattggattcagaatatttattttattagttagacattattaatatatactggtaggtgggaatatttatttaattatatataccaaattggtgaggcgcctggttagcaacggcagtagccatcttgaatcaaaaagctgaatacttaatttttagaagaataatgcaagagagagcaatgaacagaaaagtatttgagggaagaaaattaattattgtagtggtggtggttaagttcgctgctggggctcctatttataattgctcggaagtccttgcctgagaattcgatgtttccgagtccttgacagagaatttcgagtttctgagtccttctctgaaaatttgcacgtttttctatttattattacttttttaatataatttttaataaacagaaattaatagtccccacacaaccagcaaagtctcatgtgagaaagacacgtatatttgattattttagcaaaaagacatatatattgaaaaagcacaattatagaccaggcccgcacgaagaagacaaaaaccaaataattaataataataaaaaaatctaaatcaggtcgacatataagtccatatattatatatcgatccgtcggtcatcggttgtatggtttgaatattttgcttttactccaactctataataaagggtctcgatttaggtttacaaactatatatatatatatgttttaattagttaactttaagaaatttaattttcacgtacttatagcaaattattatatcaacaaataacatctcatgcatgtcatgaagtgacatatgctattttaggaagggaaatttgaatttctatgcttacattaaggaataattttttccctaaacttaaaatggggaatattggtaaaatgggataa

SEQ ID NO: 57556 - DNA, 1271 bp, Cannabis sativa
gagattctcaattttggtaattttggtattttataagcctttttgagcaaaaatgaaaaaatataatggagaaaggaaacttcttttagcttggattgatttcatgttgcctataataggacaaagatttcatttttagcttcaaaatttgtggtctagagtcaagagtgatcactttttagaaatatattaaaaaaaaatttaaattttggatgctaaacatgcttagtttgtgaatgaaaataaaatctgaagcttcaagctaatttttgactattatccattcatttctaagaaaaactttccaaatgaaaattctagatctctcttttatctgtccaaaacatcttgaatgatccaatttcgagctatatcgagagagatatgcccaaaatactatcggtcattgcagtaaaatattgaaaacgtaaaattgcaaaaattagcgaagaaaagagaaaatcacttgtaaggccgcgatgttagtaaaaaaaaatccctagtaaaatagggataattacataaaaacactaatttttgtaaatttttttttgtatttttacgttgaaagtttttttttttacgatattttataaaaatacaagaaaacaacatgaaagtaacaagaagataacatgaaagtaacatcaaagcaacataaaaaataatatacaaataacaaaaaatcaataacagaataataagagtacaatagaaaaatacactaaaatattctattttatgtaaataagatctaaaaaattataaaaatattaaaaattctgtacataccatatttttgtaatttttttttattatttttgtatttttttaaaattatcccaaaaaataaagaactcattgtgagtgtaggattaaaaaataaaatgttttatttattaattggagagaagtttttacaagatatttttcaaattaaaataattttcataatttatttacttttctagaaatcttttgttttgctattaaaaatatttctataacagctacaaaaataaaaaataaaaatccaaaagttttattaaattattgtatgattatacatttacatgttattatttggtgatgatacaaacgaaatcatgattaaaaacattgacataaatattgtattgtaataaataataagtaattacgttgattggataaaatattgtgttgtattaattattacgaccataaattttagggttttttttaatattatatttaaaattgattttatttataaaaatacctttaagaaa

SEQ ID NO: 57557 - DNA, 772 bp, Cannabis sativa
  modified_base (26)..(34): a, c, t, g, unknown or other
actaactattttgccaaacaagatannnnnnnnncatatgtaattactacctcatatccaaacacactttttttttgagagaaagggggccagctaaaaggaaaggaagtccactagattgcaggggtcatcacctatccaaatcgctacttcgtctaaacctgaagcccaatgttccaatttatcagccaaagagttggcgttgcgattaatgtgaaatatccgggctgcaaggaaaagagacaaagtttccctgatttgcagaatgaggtctccgaacaccgaaagatcttccttgtgatggcgaatggcgtcagtgacagctttgcaatccgattctactacctgaaccataaaatgctcgtcaatacaccagcgaagcaaagagaggagagccttggcttctaaggtggcaacagaactgcctccaaagtagggctgagcaagagctgcgactaccaaaccttcactgttcctgattactccaccaaaacccgctcttccaccattcttaggaactgctgcatctacattgagtttgagggtaccgtgggctggaggaacccatgttgtgggagcagttgccaaactgggtcggcctaggagaattgtagctgaggaagatgagttgtaatctgccaagaaactttgagccaaactgacaattacgtgagcttgatcggatggttgacctttgagagctttgttcctgttaaaccaaataaaccaagcaatacacagaaaaagatctacatctttcttgggaaaagat

SEQ ID NO: 57558 - DNA, 1148 bp, Cannabis sativa
ataattgtatatttagtgttaataagctcgatttaagttagcttaaattagtcaaatagataattataatataattatatatgtgagtcgtgattacattacttatttatgtaataaaaattaaaataatgcaactaaaagagaatatatgaaaagaaagtaggtttcgtaggttaattgatcggtacacttcttattaagaatgatatcctggttagtattagttaatgatgcttacactaattgtaattgagttagttacatttatttttgtacaatctctttctgttttggtggtctcccctttaccaacattagggccacctgtctcttgtccattggtttttataatcttctctcagagtataaatagataatgtttctctcagccacctttgagctgaatttttcatcattgtaatttgtctaaaacctttacttaatatcagagcaggaaaaggtttgtacgcatctcgtctcaatctcagactccccaaggcaccaccacagctacagcaggtgctgcaagcccatcagttctatccccgcctaattatacacaaccgttcaataccctcaatcaaccatttcctttgaaacttgatcaaaacaattatgtgctctggaaaattatggtgttggctttaatcagaggccatctccttgatggtttcgtgaatggtacttgactctgtcctcatgagtttgtccctgctccagctgcaacagaaggtgaaccaggttttggagtaaccatcaatctagaatatgaacatttgattgtgactgaccagcttttgatgggttggttgtatagttcaatgactgagggaataacaactgaagtaattagatgtgaatcaactgctgcattgtggaaagctcttgagaatctgtatagagctcactcaaagtctaaaatgaatgagactcgaacactgattcagacaactcgtaaaggcttaacatcgatgtaagagtgtttgaagcagaataaaagctggtcagattcactagccttagcagcttacccagaaaaccagctcatatccaatgtaacatctggtttggattttgagtatttacccattgtgctgcaaattgagactcgtgctttgactacatggcaagaattgaagggaatcttg

SEQ ID NO: 57559 - DNA, 1813 bp, Cannabis sativa
tttaaatccgtttcactaaatacagcaacgtatgcgactttcatagcgcaagttgcatgttcatattcttgcacaagctcgcaggcttggggtgcgatttatcattcaaagggaggttaacggacctcgtattaaggtatatgcgttctagtcgagtcgcgtatatggacaccttatcagctttgataacattggacatgcgagtccttatcgagtcaccgagtacgttgggtcattcgaaccaattcgttatatgaagaaatgatctttactaagtcgcaggagaaggctacttagccatcgcatatatctcggtatatgcacgacctgtataatcccttcttggtcctgcttattttatattatgcgaggcgtaataatgcaactagattctgtcatggtcacatcatctcgcgagtttgattcaagcgaggtttattctcaaggagtccttttttgacattttcagcaatcctcaagggatgtgagtccacgtgtcattcttatggaagcttggtctcgattttctaggctaaaaatttagactataacaatttatttatttattctagcgttgtattaattctctttagaatttgtttaggatggctaaacatgggataataatttaaagtggattttttttaatgatcgtgtacattatagttattcaaaaaattatgagtagtttgtaaatgctaaaagtaatgtttaaatattttgtttcacgcacgattgtttttttcttctacacgtggcaagtaatttttaaaattttatttttggcaagttaaaatgaacttaattatgaaaatcaaatggactaaaaaacttttataaataccgaacaagataagagaatctaccaaaatgatcatttaaggggatgtactacacaaattggtacacttttcaatttctcaaataagaggttttaaaaaaatattcttaactgtatttagagtcttcctatttttagccaacgtactttagtatttttttttttgttttaattagaaaactaattcgtactttgtaaagtctttaaataattttaatttttttaagttgttaaaatttttattatgaattagtaatataatttaaaatataatattgtataaatatttatgcatctaatttttatcacaaacgatgacaaactttatatgcattaagataaacctaaaagaaaaaaaataaaaaaatgactatttacaagaaacactaactaaaaccaatttgagcacacatggaaggtggagatgtgaatctatgtatatatatatatatatatatatatgttgacggtggaaacttatcaactaacctttggccgaaaattctaaatttgaattcaaaacttagagctaagatgaagataaaatgaaaactaaaacaacaatagatatagagaaaaattgctttgtatttcttcaagttatgtgtttacaaaattaatttttcaaccccctctcacatttgagaggagtatttataggctctaatggcctgtggtacaatggtggtcccaaggtacaaggtgatatctatagtctgcaggctgtagatggtggtcttacgccttgtatttttatttggtgtcatgtggtcccaacttgcaggggtagtgattgttgtgcacccttgttaaggatatcagactttgcagttgtggtgcctccactagtctaccttcttagcatcaaaacttgcaggaggcgtggttatacccaccttacatgcacaccatgtcgtacctccgttgcatttgtcctcaacatttcgggagaatctgttggaaatattttac

SEQ ID NO: 57560 - DNA, 902 bp, Cannabis sativa
agtaaaatatgcataactctctcaatttttattgaaatgacctagtttaacttgcgttggaaagataatttcaaaatgaatcaaagtctctcttatagctatgactcaattctgaagtatcgggtccaaaattagcttacaaagaaagatagtgcattttactcgaaaattgggaaatgcggctaagcgaggtttggtggtgcacaccgtcacagcctatgtggcgttgtgcgcaagaattgacagtccaaagcgcgtgtgttcagcactccatttcaaattggtgcatcctcaaccgaaaataactaattgtccaatattggtgggatatatgcctagatacaaggagattattattgatatttatttatttgtaatattttatttataaaaaggaattgtatatgagatttgttagtgaaatatctcgatatgtgagggaacgctaacaaaccctctagtctatatatacatcaagtagagactgagaaatgcttcttttttcttctatttggcttctttttgacttcttcttttggagaccttcccatcttttttggatcttcctcatcgtgaccttcccattgaagttcacttgaagacaaccaagaacaccacattgattccttgaccttctttattaactccaccatactcaggcgacaacagacctcaaaacaccatttaatacacactttgttctacaaattattggtttattgttcccaagaactttacaacctttaatttagatcagatttatgaatatgaagtctcccatgagccttctattcataaatctcgattaagacttcacctagaaatcatttgttgtacttttatccacacactcttgagaacataactttggtgtgtcggatccaatcaataaaactacaagt

SEQ ID NO: 57561 - DNA, 1777 bp, Cannabis sativa
ttagaataacattctaatactttagaatgcaaccaaacaaaggaatggaatgaaaattgtttcatttccattccattccatttcattccctctaaccaaacgccacctagtgtgtactacagaaaataaaaaacactaaaaaaaaaaaaatacacatcttcattacacaatcatctagaacccattatgaaccataaaacaacaataattaacttaaaaaattgtacaaactgagaaagaataaaaaaaacacacacaattgaagtattaattaagataaaaaaaaaataggacaatcttctacggcaacaccgcgagcagatggataaagttaattaacgttgtaatttctgttacatttttttatttaaaaaaaattaactaaaatcttcaaaataatttaataaatattttaaaaattattacatagaaaacacaaattgatactttatttacaaaaatatctccataaggtgtggatttatattttttatgtgtttttaattaccaaaatacctcttacaatcaaacgatagttgctgggtagttggccgaaggttgctgggtggttggtcgaatgttgcatcagacgaaagtttcaatcagacgaaatggtcaagtgaagagtgtagtagagaaggatctaccatgttttcaactgtcaacaaacttccatctaacataacgattttgagtaaagacagaatgtatcgaaaaagaagacacccctcatcaaagcagagcgacactaggccaaagacatcataagattgaagagtgaagtacaaaaacaacttcgatgcagatactgaagttgaaaaaggctcatcatttcatgtattgtgtggttcaaatgctctaaagacaagagaaagagaaaaaaaaaatattgaaatatcatcacagtacttaaccattgtagttttagaaaaacattgtctcatatcatatggttttatctaattgcatgcctatagaatttcaaacaactaattttcataataattaagcaacaaggaccttaacattctcatctcattcataatgtgaaacattcatattgattcctacacatacatttaagctatatatagtttttaacatacaatctcatactcacccatgttaagatttataaaacacaaaagaaatataaatatcatagatctaaatatattcctaaaagtgctttaatatagaaaatcctaaatcataaatctatatatagcctagtgctttaatctaaagtattttctctgatggggaaaaatagaatacataaactctagtgtttcttggggaccactacctatttatagactcatcttagaatgagttttgggtatttataatttggcctctcaataaattataaattaattttcttttgatacaaccaaattttgtctcacactttataatagcatatacattatacatatgtgcccacaataagatttttaatccaacaacccacccacaaaacattatgaaattaagaaaagataatacaaagaactaattgccacaacaatacaacagcaataatgttcaaagagagaatttaaagaagcttacttgtgagagttggaattattgtattaatatgttatgttagattcttaaattggtataagcaaagaaacatatataaattaaaatgtatttgctgaaataaattcaaggttgagatcgagatgaatagttacctaaaaatgatgaaaggaaagagataaagaacaagcaagaaaaatctcattgatatttacacattgat

SEQ ID NO: 57562 - DNA, 909 bp, Cannabis sativa
gtgacatgcctggctgttggactttcgagccattggattggatatatttgtgcttttagagagacaatcttggatcattcaattttcttggatcattcattttagagagacaattttggatccttcatttttctacacgtggataattatctcgagtataagtatccctaaaagatacaatttaccactttttcacatttcatattttcaatcgctcaaattcaaattttcttgagagcaaaatagggtgaaaattttcagtagtgaatgaacccagcccttgatgatcttcttcgaattgctttttgcctgagaaatcttcttcttccaaaccatccacccccagtgattatgcatcttcagaggagtgaactggcgaatatcaattttaattctcaaatcgactcattgatttccctagccaaccgtcttcctgaaaggtatgcttgcttgcgctatccagaaccatcaaagatcaattgggggcctttgacttcattaccaggtatgggttgattcaatttttcaccttttgaatgtgtttttaaatccattgtagaagttagggtttgcatgtttttccttcaaatgaattttaaatttcttaggcctgtgaccaatactgctgttagtttgtaaatatgaagaattttattgctttcgagttttagtcttagaaacttctaggaaatagttgtgttgttacaaaaatactgacaaaatttctccacgctcaaaatccttctaattctgggtactttgtcagtttcttcctcttgatgttcttaatttcctatcttgaacggatgacccttgaaggtttttcgttcttggatagtgaattcgatggggacctcttcaagcaatttatgggggaagaattctctgctccctttctatattaggtag

SEQ ID NO: 57563 - DNA, 893 bp, Cannabis sativa
tcacaatggctggaaatcagacaattgaaggtcttaacaatgaatcaatcaacattgggacaatgaatgtcccactttcgggaaatagggtacctcccgtcgataacggaggagtaggacggacgagcgtaaggccactcaattttttccccaaaactgctattcacattggggaaacgtccacgccagcagccacaataggacagttcccacctatcacacctatcgtggtatctgagggtattgttcaattaaccaccgatcagtacacgacaatacaggacaaaatatgagctttacaggccgaagttgacgaacaaaacaaaacacgccgtcctcctcgagtacccactacccgctcagataacccacaagtaacaacctctaagcgatgaactaatcgtagtcgcaaggaacgaaggacacgttaggaagggctcgatttaaatcagccgatgtcgagggatcaattcgcgaggaacttcaaccgcgagtcacaaccggcggaagaagacccagagcgacataaccctcgcagtagaccccaaccacgaaacgaggaaaacaacattgagttcggctcttcgtcttcgcaaagtcgtactcctagcaggtacaccaggtcaggttcggtggaaacaccgcaacgagggagataccaagttcataggcgcgaacttcacgatcaccttaacgctgtttttaaggtgcgttcccagaaaccccagaacgatgaagagtctcgtgatccctacttgggcaatcagggcattatcaaccacaccaacccgcctacactactacaaggaaaggccttttatcctggtttttaaggctttttatcccggttttcgctaatatgaaaactgggatgtatgtgttgggttttatgc

SEQ ID NO: 57564 - DNA, 1854 bp, Cannabis sativa
tgtataaatgtttaatgggccggcccatagtatttttgtaattttttttccttttttgtatttttctgtatttttcccaattttgtatgggtcaaagcttaaggggtaaaaatattagtttttaaaaataaaaaaatgctggtggtaagatcgtcatcgcttggaatcctgatagatttactgttgacatccttaaatgcactagccaactaatgcatttaaggttgacaacaactgaaggattcaatagtcttctgactatggtgtatgcatcaaacaacagaaatgaaagaagagtcttatggaaggatttatgtgatctgaacacaaatgagcagtggtatgggggatttcaatgatacttgccaaagaggagagaatagggcatcaggttaaaacccatccggacacggagtttttgcaatgtgtcaatacttgtcagatggaagatgtaaaagcaagtgggaatttctttacttggtcaaataagaaacatggggatgatcgaatcttttcgaagatagatagaattatggccaatcagtcttggattaataagtatgagcttgctaaagcgttattccttaacgaaggtttatttgatcacacaccagcaattttgactctttatcctaatataattagtgggaagaagctttttaaatacttcaagatgtggaaatcccatccaaagtatgaaactgagttaaaggaagtgtggaaacagctaggggaaggataaaaaatgtatagagtagtgtctaagatgaaacagttcaaaatgcgacttagagaaatcaacaaggagggtttctttgacttccaagccgcagttttcagagccaaggcagatctggatatgcttcaaaaccagttgcaaatacatcctatggacagtgagctacatactcaggagaaggaagctcggggaaaaatgctcaaaatacaaagtgattacacatccttcctgcaacagaagtctaaagctgattggattcagcatggggattgcaacactgcactttttcatgcgtgcattaagcaaaggcagagacaaaatcgtattctatccattgaaagattggatggtaaaagagtacatgaaccagagctaatcacggaggcatttttggagtactataaaggattgctggggtcaaaaatggaacagagaaggaaagtagatcctagaataattgcaaggggtcctgttcttacaaaggagcagacaactgggcttattcaaagatttactagtgaagaagtaaaaaaaacagccttcagtatacctggaaataaatcgcctggtctagatgggttctcaagtagcttctttcaagataattgggaactcattggtggggaaatcagtgaagcagtgattgcattcttggattcaggtaatattcttaaagagattaattctacgatcattactctggttcctaaatgcaaaagtcctaactttgttaaagattttaggccaattgcttgttgcaatgttatctataagattgcaacaaagctgttgagctctagaattagcaacatccttcctggaataatttcccaatcacaagggggatttattaaaggaagattcataggacacaatatcatgatttgtcaagatttggtgggacattactgcaggaaagccaataagccaagctgtatgatcaaacttgacctccaaaaagcctatgacacagttgagtgggaattcctagaggaggttctgattagactcaactttccagcacttttattcaactcataatgaattgtgtctctaacccaaagttttttcttatgttcaatgggacccttcatggtttctttgaatctaggaga

SEQ ID NO: 57565 - DNA, 711 bp, Cannabis sativa
gtttgaaaacgggatcccgatatttgtaaatattttattatattataaagtttaataattaatacaaaagttttaatttgacacattttttaagaaaaattcaaagatttgcaaagattgcactgtaattgaaaaagcactgtagtgtgccttagcattagggcgttacactttttttcccctaacattattcagattatctctctctccctctccttcactcacggtggtttatcctccagacccgacgctggtattctatcaccggccggcgacacgcgctgcatgtagagaacgatcacccttggaggttttggacagtgaatggtacggttaaactcgggaggtctaggagaacaaaacctctcaatagatcgggcttgaagatcattggaatcgggtgttgacgttcgccagaatctatggagtttcgagatgtttgactctgatttggtggcttctggacctcctttcgactaatagtctctaatgtgtgttctccttggcatgggcttcttgatctcatggttcaatacccctttcatcattatcgaacttgggcagccaccttgcgtggtggttcaacggcgatgctccgttttgagtttttttttttagatatgtatgttttttttcttacagaaatgttgccttttggattttgttggatttgcgaaaatgttggtggtgatagtaatggcaatagaacaa

SEQ ID NO: 57566 - DNA, 3121 bp, Cannabis sativa
  modified_base (3073)..(3074): a, c, t, g, unknown or other
tttagtggtacttaatccaattccctgtgggatcgacctcacctgtgtgagattttactacttgattgcgtatacttgcgtagcgtttaaaaatatagcaacaactaaatggccacgtgggaatgagtactcaaggggaaactgttaatgcctggaaacctactatcaaacctggtaaccgtgcaaatactaagcaaataacaggtttttgagactcaccggagggaagcaaaaccttgggaaagagtctgaaaggactcaagctcaagggcgccaaccaatggaccctccaccttatgcgaaatgaccacaaacaaccgatataaccaacaaaactactctaccatgttctctctgttgctctaatgacaccaggccccgagaccctgcataaggaaagggacctaatactcataccaaaggaaaaaattgaacactctactttaaaataggaggctatgagttccatcaattaaggatcaatatgtcgcttcatacttgaaagtattactgagatgaaagaggtgagttgtaccgttactttgctcgtgaccccgatggccaatatgagtgcttacctcagatacatggagaggagttgagcttgagtaaccaattcaattctctttgtacctatgatccaaccgaagactactttaagcgaagtagtcacaacaatgctctaaatgaccgctcccataatgcttcatctcaagatgacccaaattttgttccaaagacatcactagtgttaccttcacgaccccgtggtcagaagacaaaaaccaaacctaagtcaaattgagttcatgatcgacttaggagaccaatagacatgcgtgatactctaactataagacgcttggtggaagcaggagcttctagaggtgaccctaattgggttacaaaagttctgactgggacacaaaacaccacccactatgtcaacaagatatagtttgaaaacctagcagccttggtgagaggaatcacgacctcaaagttatcaatgtttgatctggacaaagagcgacgctcatcgctctcaaactcaatcaaagctctaccaattcctccaaagttcaagaatccgtcctggcatcagtacaccagtaaagaagacccgttgtctcacattcattacttcaaagtgtagaccaattttcaaggagtaaaagatgacgtcaagtgtgaaattttcccaatcacactgataggcctagctcaacggtggtaccttaagccttcccctgaattaatcgactcatagaatgatctagtgaatgcttttggtaaccaattcgctccatcacgacagcgccaaattgaaccaaatgatttggtagatgtcaaaaaataagaaaaagaacccctcaaggactacatttaacggttcttaattaggggtagccactaagacaaaaatactttgcgaggaagtaagggttatggaaattgtagccagactcaggaaggtgagtcctctatggtctgacttcatctcaagtcagtctacaatatgaatgactttcgtgatagagtagatggtttatcaagtttgaaaaatttgtcactcaagctaaggtcttgaaaaataacaagaagaaattgctagactccctaaacaataccaatggagcgcatggtagtgggaagaaaagaggctttaatgggggaaaaagagccaacaatagagacagacaaggtaactcccctagtgggaagaaatcgaaaactgggggcaagcccatacaggagtatgaagctcgttttatcatctactctattctcttgccccctagagaagagatctataaggccacccagcagtaaatggtctcataccaaaaacatcttccttttaaagaatcagggaagagagacatgaaaaatttctattgctatcacaataattacggacattacaaaaattagtgcaatcaaagttgcgagatgagattgaattttggatcagacaaaaaaaagccactcttcagtagtatgtatgcctgaagctccagctgggggcaatgaacttttccagcctggccagttgtaggaaagctcaagattttaatttgaggcccacacttggctagaaatttaagaaaggtcttagaaagatatgtaaggtctttacgacatgatccaagagcaaaagtattagagtttgcaaaatgtccttcgaagtctcaacaatacgagtgtgatccaatcacatttagagactctaactcgtatcatgtcagctaccctcaaaaggatccattggttgataaggtgaaaatggctaacttgatggtggctagggtgataattaatgacgaagcatcctcgaacatcttatttaaacaaaccctaatactgatgggtttgtcactcgaggacctagagccatgcaagcaactatattgtatgacttcagtggaggaggcatagcaccatgatgtaagatcaaattaccacttacagtcggcactgccccatggcaaaccaccatcatggccatattcatatatagtggtggacatgaagtctccatataatgtgatgctcagatggccaaccctatatgaacatggagatatctcgtcaatataccacttgtctatcaaattcctaatgatagctagtatcggttgtctcattggaaaccaaggaagtgcccacgagtgttataatgcatcattgactctcgccaagaatacctctactgctgctttagcagcagggcagacaagcaagggctctcccacgaaggccagagagatgaccaaggcctccaaggttgagaaaccacagagaagacagaggcggcacctaaagccacttgaaggtgtgcccaagtcaggggtgacactaacccctattttagggaaatcaacttaggagtttgtctaattgaggagttcgtccattgttagtttaaacaagtaatggatagtcagaataagaaactaagaagcaaaaccaagagaactatggttaaaactattcatatggagtaaccaaaagttttccaattaaaaggacaagataggaaatgttgaaataagtctattcaatggacttnncaaaacttcctgatcctagtattgtaggtttgagattatctaaacct

SEQ ID NO: 57567 - DNA, 1212 bp, Cannabis sativa
actctcctaactacaaattataagaatatatctatcactatttttatttttttaaaatatatgtttggacataatatataaaatgtattagtaaagtatataattatctaatcaaacttaaattttgtaaaaatattttctaatataatccttatatatatagaaagatcaatataaaatacatataaaatacatgtgacaatgaaattcgttcttttattgtacatacaaaatacgtatataaaatcacatctaaagagcataccagtgtagctgcaatagctaaaaaaaattctcaaagatcaaaatctcataccctatttttaaaaattaaaaagtacattacctaattaaaaaaaattgaacattcatatattgcattgcatgtaacatcaacctaacaaattaaatatatagggatataattagcggtaagactattcaaatttttataagtgtataacaaataaatattcaagcatttttattggtcgcaagatgtttaactttacacaagtgtaacaaataaacaaataaataattatgaggaaaaactggtctaaagtacccttgaataacgctattgtccttgtggtgacttctaatttttcttggcttaatggccataatagttggtactaaggaagttgaagatattgttttacgatcaaatagtttaatggtggaatctaaagaagaatgggaggtaaatgaagtggaagcttcagagttttgagagaagtatgaggaaaacaaagtatagccaagagagaaaagcttgatgctttgttttattatctttatcatcaatattacatgtagggatatatatagagatacataggagctaagttagttggaggaataactaacttagctcaaaccaagataagcctaactaactgagccaagaatggcatctactaactttattaacagaattgtaactaacagtgaagtcgtaatagcctcccttaagatggcgtgtaaatgtttgagacactcatcttggatacaatgttgttgaaggacgagggtagtaaggctttatagtgaatatgtcagtcaagttttgttgtgattgaacatgaagtagtttgaggatgccttgctaaaatttttctctaataaagtagcaatctatttaaatgtgctttgtgcatttatggtagacatgatttttactatgtggatggctgcagtattgtcaca

SEQ ID NO: 57568 - DNA, 983 bp, Cannabis sativa
ctaagcgggctttacaataatatttttagttatttgtgaaagtttttacatagcattttgaaaaataaataaataacaatattataacttaaatatttgtattcaactatataagaaaatatattaaagtacttttaattttaaaatattaacgtatatttttaacgatactattaataataaataaaatttatatttattatttttttttaaatatatataatttcaacacattattattttttttctttcaaatgtgttaaaatatatagcacttcaataaagatgttcttagtaattaaatattacatgatcgagttagcttacattgcaaaaaaattatttattacatagagataaaagaattaaaattaatattgtgtcaaaatttaattaaaatttatttttaatttttattaaaagaaaaggcctcctttcaaatttcgtcctaggcctctcatcaccttaagacgaccctggtcatagtgattaaacctttacgttatgataaaattttagtaattgaataaatattatattaaaatctaccaaataataataataaaaaaatcacaaaagtccaaaacaaaaaatagtgcaattacttatgaatcatatctattgataaaattattcatatgaaaatggaaaaagtaaatactaaatagtaaggataaaagtgggcaagaaagttggtgaaagggaaacttatcctctcttttaatagcatccaattttttaatactgggcattggtcattcctattattggtattgagcatacttgtgactgatttgcgattttttatattactagttggtcaatgtgtgttaaaccttttataattttattaaatttgtaatgtacaattaaaatttaaagagaattagaattaaaggagaaattaaagaagaattaatttgattaacataaaaatttatttggaaattaaaattaagattaaaggagattaatttagttca

SEQ ID NO: 57569 - DNA, 682 bp, Cannabis sativa
gttttgtttagaaataattaatattatgataaccaaaatactttacttctactaagctactatattatatattaatgtctacccaacattgtaaagcatcaaaatataaactacatttgttttattttatttaccataaattaaagtactatttatcaattctgatcagcttcaaataataataataaaaatatgatcatcttgtgtagcaaatttttatattagtaaaagaaagtgaaacatatataataataacttatccaaaaaaaaaaaaaacatatatataataatgacttttcacagactaaaattctttttttctcctcaaaaaggaagtagctttaattagtaatttatttggttctatattgacaaaataacatgactcacctagcatcttttttttttttcttttttaactataaataatatttttaatggcttataattaagataagataaggtttggctatatgagttatattataagtacatagctattcttttttttttttcttttaactttcatgttttctcacatgaagtatcttttttaattactttacatgtgaggagttcatgtatatttaaatggtatatataataatataataaggggatgagaaagaaagaagattgatattgccctatactctcttttcatatatttgtttatttatta

SEQ ID NO: 57570 - DNA, 785 bp, Cannabis sativa
aattggtactgccatgtatgaacacattgattagtataaaaaaaaattcccacaagaactaaagcttttattaaaagaaaataaagcccacgaaagaaactaaaataatcaagcagttctacaacattttatcaaacaatggaacaaaactttgtgacaaatgctcaaactgagtcgatcaactcaatagtacagaaaaatttccgcagtatcataactatttattgctcatctgtagcatcttattaagctaatcacaataatatctaatgattttagactcttttagaagttcaagcccttcctcagattcatacatcccattctcaaatccattttgagccaaatgtgtgagttggtagtcattgtggtgttaaacctaagaacttaggatcaaatctcacctttttgggccaaactcaggttagtgtgatgtgggttgtgtaagttgtaagagagagaacattaaaacagtttgagcatcctatatagctcatataacattttcaaacccagactgaacttgtgtggtgagcaaaggattctcataccgtttcatccttttcactttttaaacttgtgtttctttttccctttctacatgtaattctctctcaatgcccatatataattgaggcttctcttttatgcgttctccaaccaaaccagtagttttgaacttttgaccctcccatattcatgtacaaaatatattgaattatgtggatatacttaaaattggcactgatttcataagttgattaaatgaagtacctgagaatgtt

SEQ ID NO: 57571 - DNA, 1454 bp, Cannabis sativa
gcttagagaagtcaaggtgccacacgggtgttccgctgcctgagaaggtgagcccgtgacactccgcatggactcggagaagcttaggctcttccaaaattcaaaccaataaatcaaacaaatacacatatgaatacaatataattgtgtcgtcccatggaaaaaaaataagcctttgatttaatcaaatcactcatatctgatgaaagctagggcgatgtaaattgctatttagacacaataccggcaagaaattagttaattgctcgaggcacatatagaggaataaagaggcttggtgtcgaggtaactcgaagaacgatctgggatgtactggaaaaaaaatcaatagaactcagagtgcgcttcgctggtggagcaagaatgtgtttgggaaatgtgagagtaagattaaggaattagaatttgagctccaaactcttcaatccaaagaagtccatgaagttgatgagttggctgaggaagctatcttaaaaacattgggtgaaatgtggagacgtaaagaatctatgtggaagcaacgatctagggagctacggctctcaaaaggcgacagaaactcttatttctttcatgcttctaccatggttagaaggaagaggaatcacatatggaacctgaaaaactgcaatggatctctgtgttcgaatgccaaggagattggcatgattttgaatgactatttcattaacctattctcttccaaaggagctgtgtcttacgaaggtttggatgatttgattagtgattctatttctccaatggagaatagctttcttactgcggtacccgataaggaagaaattatttcccatgtgtttcttatgcaccccttcaaggctcctggcccggatggtttgtcggggtgcttctatcgcaaatgttggcagatggtgggagatgacgttgttaatttcatccaacggttcttcacctctggaattttggaccctggtcttaatcactctttcatatgccttattcctaaaggatttaatccaaatagcgtggatcggtttcgacctattgctctatgtaactttttctacaagattattgcccgtatcattacgcatcgattgaaagttgttcttgatcatatcattgccccaacacaattggcgttccttacgggaaggtggattgcggagtcaactcttctcactcaggagattgtgaatgttatcaagaaaaagaaaggaaaagggggtctcttagccatcaaaatggatatgaacaaagcgtatgatcgcttggagtggggtttcttgaaggctgtcatggaaagattcgggttttctcctcattttatcaacttggtgatgtgtagtgtgtcaactgtttcttattccatccttctcaacgggaaacctctgaaaaaattcaagccaggacgtggaatccgacagggggattgttgggttttatgccct

SEQ ID NO: 57572 - DNA, 725 bp, Cannabis sativa
tacttgctcaagcaagtatgcctctaaaatattgggtcgatgctttccaaacatctgtctatcttataaatagacttcctacacctatccttaacaacaaatcaccttttgaagtcgtttataatagaaaaccagattataatctgctgaaaactttcggatcagcatgttttccatgtttaaggccttatcaatctcacaagtttcaattccattcacttaagtgtgtcaatcttggttttagtgagtcattcaaagggtataaatgcttaagttcaacaggaagagtatatatatctaggcatgttgtgtttaatgaaggagaattcccttttaaaattggttttcttaacaattatgcccctgaacactctgtgattgttcaaaattctgcttggtctcaacttccaagcttccatcctctcagtaacacaacctctcacaactttgtcactggtagaaccactcaaccttcagcaattcctgatgcagcagccacaccagaagctttgtccacaccaaacgacagtcgggtaaatcaatctctttcccttgactcaaatactgatcatgaccaccttgatattgtgtctgaagctcatacactaggtcaacaaattcttgctaaaaatttagcagataacagccccagttctgccacacaacctgctgctcctcctgcaccgcagccctcacatccgatgataacacgatccaaagatggg

SEQ ID NO: 57573 - DNA, 1673 bp, Cannabis sativa
gtgccctgtcagaaattgaagtaattaaaacttgggcaagaaacttattattaaaaagagtaattaatatgtagaaatggcttaacatagaaaagttaagtcacatcctctaatgatataattaactttcataaacatgtctatccaaaaacacacataattaaaggttttctccactaaaatcataacactgtaaatagtgggcattcaactttgagatgatttgctgccttttatgttttttatattctaattattttattttttgttttgtttttttgacattaaattggttctctaatagtcactatgtcactttctccaccaagcctcaaaaagttactggctttgtggagtgtatcatcccttgtggtagtgaaatcagtttttctttatttgtaaattaatttatttattttggtcatgtgtatcaaaatttgacacctcattataaatattgttacatctttattataaaaaatgagattgtgcaccaaaaaattacacaccaggacataataataataatttttaaggagctcatatttacctaaactaagtaccatgcatacatcactatatgtaatattttagtatatatttttggttcacatattgttgtctgcaaaattggatgcgcacatgttaccatcctggaaaagaaattattcaaaaattggttttgagatggaatctcatatttttatatatggctcaatatttttacatttaatccatgtgaaataatattctcaaatattccccctcaagatagtggttatttttgctcaccaatcttgaattaccttatcacaagtcatctcatttgctcgcttatttttgttcgaatctcaagcgtttttgcaccatctgaatctcgcgcagctagctaatcatctggataggtttgaatcgaaagcccgctaggaatatgaccccgataccatgacaagaatcgtgaggttccatctcaaaaccaattggtgatgagtggagtagccatgttcttatatatggctcaatactcttacatttaatccatatgagataatgttctccaatagtgctagatgagagggaaccaccactactacaaaaaacttgataactctatggtatagagttattttttatgcttttaaactaaaagtattgtgagaagagtagtgaaaattgtgtttgtttgcttaactttagttagttttagctttattttctatttggtaagctaacttttaagtcgtgtaaaaattggtattgttgggtgtgttcctccaattaattgtgcttgtttgtgttgaaaaaggaagaattaaattgataggaaaagaaaaggaagcaaggaagaagtggaacataagctgaaattgaggcagattgctgcaatgctgaagcgaattcagcattctggcagtgacgtggaaacacgagtttcacttatccacataagcaaattcgtcccaatcactcaaaatacatgctggctgctgtggaaggaagaggactaaatctagtgggccaaagtggaaaaagattgggcttctattttggggtatgaattttgtaccctaaaaacccaacaactaaaagaagagaaaggaaagtacatatccatcttccatcatcctcaaggacgggcagctgccatttttcttgaagaggagtaattgcag

SEQ ID NO: 57574 - DNA, 3862 bp, Cannabis sativa
  modified_base (3832)..(3834): a, c, t, g, unknown or other
ttagttagggtgttacagtgtaggctcatattttgttagttgctaggcgacaacttttgtagtaaacatattttgaaaacagttgtaaacttttatacgagatcctagaattacacatttgtatataattatttcagtttaagtttgttaagaaaattttaataaatcatatttttcaattaaccctgtaattagtaaaggagtgtacagtagttaaaaaatactatagcatgcctaaactagtaggacattacaattcggtatcagagttgcccggttgttctttgaagatcgtcaagatatatataatcatcatcatagataagctcgacgcatggttcagtaaacttttttatattttagtagttttaatttattatatatgattagaaaagtaggatacggaacatgttcgtagatttatagttgaataagagtatgttaagttcccatggaagcggtaagtagattataattttgatcgctgcttatccgagctgactcatgaattcgcaagtgttatctaaatttctacactatgacgtggcatccatctaggtgacatatatagcatatctcataacctgggcgaatgattctactcccagtaggtcgtaaagacagttataatgctcgaagtcatatatagatggtaggatgtccgagcagatcatggacaaacatcctaccagctccactaggtaggtagctcgcatgcaccgacaaatgggtgcaagttagaaatttttaagatatatctcgtatatctccaagcttgcgaatcacagtacaatccttacatttgtgggatgaattcttatctttagagaataaaggtaatcaacccaagtttcccatttcttcattgtaattatggaaataaactaatttcctattttatttattattgatttagggaaactaatttatgtaattaattcttataaatagtagtctcatctcactattcagggacataaaaatattcagagagagaacactctagagagaaactattatctaagagtaaattgcttaaagatcattgtaaaagctttcgataaagaataattcattcttgctcacaagttaatacaacaaaaagggggatagggctattaccaactataaggggtcaaaccattataaaatctagtgttttctttactttatgctattattttttttgttatttaattatttttaatcgctttaatttgactcattgtcgttggctaaaagcgagatcaatattttgatactttcactgagagcaaagacacacaagtttttgtcttaagtctttttcatgacacaggatggtggtgaaaacacgaaggggaaatcagactgatactttcactgagagcaaagacacacaagtttttatcttgaatattttgtatttttctagctacaattattgttgggtggagaataaaattaattaaaagttaatatataaattcaaaattaaaaaataattaattaaaatttatatatattcatcaagtaaataaataagaaaaataattaattgaaaattataaatagtcatcagatgagttaatatatgagttttattaacaaaaatgtaattttctttttgtggtgcacgcactccctgggtctgacgtaggggaaaaaccccttacatggtgcggtctcgtgccaaaatttgaaattaattaagtataaataggaaaaaaaaaataattgtaccacacactaattagaatcttttacctactagcattacccaaagctactacatatgagtttgattgacaacgatttctaaaccgattggattgttttgatagtttaactcaacataaataatcttagttataatacaactgttgatcttttgaaatacctagggtgacactttgattattgaatatgtttgaaaaatatcttactattcaaagtttttataaactattacatttggatgatatattaatgacttatctcacatcttattttattgttcacaataattacaaaatttgagaaaaaatattttatatatgaattgtcccataataacaagatcaattaatatactatcataaagatttaaatttgtataattaattaagattaatctcaaattaaaactaaattataaagaccaaatcttatgggatcctaaactaatttagtgggtctggattgagcatgtcattatcggggttgtagaaactaaagaaacaactgtccgttgaactatttaccttgttaaaatatatatgctagtaatgcatataccaatccttcagtataagtatcgaacatgtttctctatcaggttgttgtctcctactgactagacaacacatcacccttaggttgagatcaaatttgcttgagatcaacggtaatcgagatcattcagatcttttctagtgcgaaacttttcatctatttattatgcatagttttctttgacaaagaacaataactttttatttggatattatttgttaatggatgtgttattttattgttcactattatattttatgtaatacaaccatcaatatatatattaacaataaaaaatataagacttttcaccatgataatttcaaactttaaatttttatagtataagaatttttccatatattattattttaaaaaaaaattaaattattaaattaatttaaaagttaaatttaaaataaataaaataaaataaattagcacctcataattttccaaagttgtcaacactatcaaattgagatgagactattcagataattttttagttcacattttttcatctatttattatgtattttttttctttgacaaaatttattattcaattttatataattataagttttttttttattattattattgaatgtgttattttattgtttactattataatatatgtaataaaattgtcaatatacattagaaaagaaaaattaaagacttcccactacaataataacaaactttaaattattatagtataaaattgttccatattaataataaaaaaatattgaagaaatttaaattattattttgaaaaaataaaattattaaattaatttaaaagcttaaattaaaaataaaaaaaaaaattatgactttacaaaagattaaacttatgacattgtagttgatgtaagagaattttactacttacaccatgattatattgattgtattgattattttagcattaaataacttgaatattttgtactcttttagctataattattgttgagtagaaaataaaattaatatataaattcaaaattaaaaaataactaaattaaaattataaaaaagttataaggtaaataagtaagaaaatttgtagattttgagttagtgttggagtattgctagttggatctaattattaatatttaaaattaattataaataaaaaattattaattatagtgtaattttcaagagttaatttaagtcatttgataaaatcaatgactataaattattatacctatcaataagtaaaaaagacaatacctattgtattagctctcaaatataaattatgtaaattttagtttacaattatttatgatataaaaattaagcaaataaaaatataaataaaatagaacaaagagatctaagcacgtgcattaagcacgtgcattgcatgtgctagcctcacctaattatagaaaaattataaaatggcatggaaaactatttatagaagaattatttatttatttaaaaaaaaataggtatcagttaataattttaaatgtgatgacattagatgtatataaatttggggaattaccccatatactannnttttaactttttttttcaaatttacggt

SEQ ID NO: 57575 - DNA, 1030 bp, Cannabis sativa
tgtacataacgttaatattttagatagaaccgggcgaaaggaggacttttcattgtttatcatagatcgtggggatttttgccaaacagaaaagtttgggggtatgagtctacacacgtaatagttgaggaggcaaaaaagcattttgtcctaaattttaatataataagtaacccaatcctaatcctaatagaattcacacaagtcaatttaaactaaccttttatatctctatataaatactcaccgtgaacatcaaattcatattcattattctttagttcctctcctaagctatagctgaacacatttgattaattaaccctaattatgagttttctagaaaccattgttggtcataccatttaccaaatattaccatatcattttgaatcaaatccaacaggacaagagtcacataatgcttgtttctttaccattaagttaaatgtcaagttcattcttgctatagatgatgaagaatctcatttacttgatgatatagaaaactcatatgtttttatacaaagtgttgggcgaatttcatatgatacattgatgaagaacaacgatactcaagcccaagttaccattcaagacatgcttgttgcggtcttacttcctcctctctcttttcttgctgatgaagtcattgattgcagtagaaagatgatgaacaacaaagattattatagttcaaataaagaagtcggtgttaatgttgatgaactacctcaacttaatgtagattataatgatgacaacgagatgatgaatatgatatgaatgatgttcctatttgttttgtggcggcgagtgaagagtcaattaaaaactaataacttaaaaaataattaaaaacctactaaataatcgaaggagagaagttttcgatggtagcccatcctatctttttggagtttttttttgtttggtgtacctttgaaaaaaaaaagataataagatctttatatctcatttagtaatggtcaaaattcattcacaatccatgtggaactaagcaagctta

SEQ ID NO: 57576 - DNA, 920 bp, Cannabis sativa
gatggccgttagagtcacatgggtaattttagaacctatttcttagtagaacaaacatttgagatattgtaaatatcgagtttaagcggggttattaattatgaccattttacccctaggcttattattgcttaagttacaaggaagaggggcatttttggatttcacatttaaggattaggtggttgcttagaagagtggcatctagccatcttgatatatttcagcccaaaatcctaggtattatttcattaatcaaataaaaaaagacaaaaactcatttagataaacaaaactcaagtcttgaaccctctctccctctctctcttcgaacctagcttgaaccaacaagaatctaagctagttgctgtgttttggaggagttagctgaaatcaagtggacttaatcaaaggtaatcctagaaattcttgttctttgaagatttgaagttactagttgagttgttgaatgtgaaatgttaagtttggctctgtttgaatccatggtagttaggttttattttctgggtttatgttaggttgtttagagctaatttgaggtggttttggtgcataattcttgggtttatttgtcagttcgtgttatttttagagcctttgatggttattacctcgataattagggtattgttataatgattaccggtactgaatccttagtagtgagtttggattttcggattaggttttttatgtgttatttacctgtttacataaatataacttagggcatccatccagcacgagattttttgttcgggtcggccaactcacttgaattcagaaacgaggtatataagactagcatagaacatatgtgatagtgtgtatgtgtaatatatgcattgcatttatgtgagttgtaaaagttatgaattgattgttggaaattattttac

SEQ ID NO: 57577 - DNA, 1292 bp, Cannabis sativa
tttttacaaaaatactgtctggcggtatgtttggggaaaatttcagtgtgtcaacaagaggcccatggtgttagaaacataagaaaggcccaataaatgaatacaggtaaagcctacaaaaaaatgggaaagataaaaaggttaaaggggtttttttcaatattatacctaaaattggttttatttataaaaatacctttaagaaaattatttgtagaaataccgttatgctacatcagcatatataccgaaattcaaaataactaccggaaatagaaaaaactaaaaaaaatattgtttctagaaattttcgctttttgaaagtttttaaaaaagcaactatttagttacttttgatataaataagatatcaatgagttacttttttattaaaaaatttattatagaattttacacatatataaaatataaaataaccattttaatatgtgagaaacatatattttttttgcctcttttttacaaaaaaggatgactattattaaagaaacttttttatttcttctttatatttttaggttatatattatgttattttattgtttaagatactttgatgttacttttttttttttagtgtaatgtatatgatgtttcagatactattcaatttatttacaaattatttataaaactatcaaaatagttttataaaaataaatttatttttatttaattttgtaatgtctaaatataaaaaataataaaaaaatattttttagtaacttattaagttgtttgatatattaaattttatttaaattttaaatattatttatttatttattaacaaaatgtataaaaaaaacttaaaatatttaataaaaaaagactaagaagaaagaaaatatttgacaagtttattatcattattaaaaaaaaattactgtacatgttatgagtcaagacaaaaaaaaaaagtaatcaacaaaaaaaaaaatgtaaacgttgagacctagaagagaaccactaaatatattgatatatgtatcagcctattttaaaaaaattaccaattttcaaaacaaaactatggtatgtgggtgtaaaactattacatattaattaatattttaataactaataataattttttaaataatttgatatttatgtgttggaatataattaattcttttagtgtaacatttaagaaactaaatagattagcgggaaactagtaggttacctatttattataaatatcatcttttataacaaaagtaaaaaaaaaacatatttaaaagtagtagaatgcaataatttttaag

SEQ ID NO: 57578 - DNA, 872 bp, Cannabis sativa
ttgtcaattgttatgaatcatgacattatgtatgtagcatactgatgttccataaaaaaaaaaaataatactcatctatttttgttattgacaatagtatgcatttagaccatttctcaaattagtgtagaatcttttatttttagtgtaacaactctaatcatttacattacatagtatattagatattttatcaaataaatatattttacttaaaatatcgagtattttatattatttaataattcaaaataacaaatttaactagtaagaatttaaattttaaaataacgtaataaattaaaatatttattaaatctattaaatattacacttattaaatcacatataatgtttattaaattattattttacttgttctttttaattttataatttgtgttatattgtttttattttatttaatattaaaatatatttttttcaaagaatgaaagaaagtatttttgttattgttattttgtattttctaatatgttattactattttatattaattattacttttatgatgaattttaatttgagaactaaaatgtaaaataaatttttaaaacaaattaaaataagggttagatgaaaaaaaaaaaaaaaaactttagagtaaatttatgtagactcaaaatccaatactattaatggtgcaaattttagtacacactaatttagtgtataatttagtatactatttgagtaaatcgtctcaagattctacactaatttagtaaaatgaagcaccattaaagatgctctcaatacatgttaagggccgcctattcgccatgattacatgcagaatcaaaatattccgtcgacacggcacatcaatgtcctccctctttcaaaaatct

SEQ ID NO: 57579 - DNA, 1072 bp, Cannabis sativa
tctggttaaattcatacatagaagtacatttaacctcttactattgttttgagggatgtctttttgtgacatattattttagtctggaactgtaagttccttctagactaagtcaacaacatagcaatctagtataataacttgagtgtaaaatacttgctagagattaagtaatcaatagagataccataaaatttataaggattaggaattttttcccaagtcattcgaatagactatgaaagaattctactatcactactagaaaattgggatttagtgacacacattgagtaactctaaaaatatatagtgacacttcaacgcgcatcactaatgaggctgactggaaagacagtttttagtgacactccacacgtgtcactgaaaccttttgcactccttttctacgcgtcactataggcgtatagtgtcaggttttgttagactaaaaaagtaccaacaaccctcaaaaagtgtcactatatctttttttattatattttattattattttgcagatatagtgacacacaaaaagggccattaaatgaagtttttatttaaaaaaaacaatattcaattcttttttttttttgagaaaaaatacaatattcaattctatttttttttttttgagaaaaaatacaatattcaattctttttaatatagattttatacttttgatgaattatttatttttttaattcactgttattatttttatttaattcaattttagagtaaaaaagtgtagattagctacattaaatgatgacagatttgtattaaaaaaaggaaaataaattatatttcatttaaaaaaaaatgataccagattgtttttaagtaaaacccaaagaagtaatttttatgatcattaatgagataactaatcaaattcctatatacttacactagggaattaggccgcgcttcgcgcgggttcgacctcacttttataattcttttaattattttaatgtaatttttttacattttatttaaaatgtaatttaaaataaatgatattcattagcgtttaggttactataaattaggcaacaataa

SEQ ID NO: 57580 - DNA, 1818 bp, Cannabis sativa
tggcggcaagttgtacaaacggtcatattatgggcccttacttaggtgtctcaatctaacagaggctcattatgttcttacagaattacatgaaggcgagtgtggtaaccactcaggtttaagaagtctcagctatagagaacttactactggttactattggccaaccatgtgagccaattccctcaactttatgctgaaatgtgataaatgccaactgttctcccaagtttcacatatgccaccagaaaagcttctttcaactctagcaccatggcctttcatgaagtgggggatggacatagtagggaagatgtcgaccgctccaggacaacgagtctttaggctagcactaacagactattttaccaagtgggttgaggcagaaacattcgcaaaggtaagagatctcgaagttaagaatttttttggaaaaacataatatgtaggtttggagtgccaaaggagatagtcacagaaaatggctcgcaatttgtaagtttagagttccaaaacttttgcaaagaatggggaatccaactctcattctcgaccccaagatacccacaagccaacggtcaagcagaatcaacaaacaagattgttgtcaacacattgaaaaagaggttaaagaaagccaaaggaatgtgggcagatgaattgcctggtgttctgtggtcttatcgcactactgcaaaaacctctactcgtgagacccctttctcactcaccttcagaacagaagcagtcatcccagtaaagacaggaattcccacttccaggtatgaacatttgactggcaaagtatgaacctcgagctcaactcacttgatgaaaaaagagagcaagccttgatcagagccgcagcataccaacggaaggttgctcaacatttcaacaaaaacatccgagcacaaacattcaaggagggttattgggtgctccgttgagtattttaaaacaccaaagaggcaggagctcgtaagttaggccccaactgggaaggcccctacaagattactaaagtaataggacaaggggcatatcgactttaagtagaggatggtcgagaaataggcaacagctggaatgccactcatctaaaacagtatcatttctaactcaaccttttctttttgtatttttttttttaatatgaataatatactgacttaagcatcggacgtgactacaccccaatcacacagacgaggaaatccttcaaaatctataattgataaactagcgatcattcctaatcataagctcacaagtcatgagcactaatcaatccatgggctcagtatactatcagacttaaatcaaatcatgaggaagctaggtcacgaaaacgaatctgtaatgtattcgaaacttcacgctttttcaattgcttttatcttaatcactctattgacttaagcattggagagtccacggctctgccgtcgactaccttcccaggtataacttatcaagtcaaaaatttgacgatcacgaggctacacctcccaatggttcctggttcttgtgtgagagtttgactatgacatgctttgtcacccacactcaaactggggaataagtaagagacgttatcaaagtggaaacaatcaacaaatcttgcgcaagacatttagagtctcaatcaccttcaacttgttgacaatggtttatggtgctagacggtacgctcaattctaaatttagcttgtttaataccaaatttcttaaaatttctatgttgatcagttactcaattccagcataaaataaaaaagaaacataaactctcatttagaacataagtggtaaatg

SEQ ID NO: 57581 - DNA, 1031 bp, Cannabis sativa
tttatgccaaatgcccttaacaataaaataaattttcgattagataatataataatttattaacattgtaagatttgcatcttaggtaaagttaatgtaaaacttacgttctagccataatcaaagcatcctctcttggatcgctaccggccggatcgtagaaataacattctttgctgaatggaaaatgattatccacatccaatgtaatctgtataaatacatatgatgtcattatttactatttgaaaataaaaaattaaaaatcaaaggataacactatcactcacccgaagttatacggtacacataagaacatccttttgtctgctattcctaagctttcagacaaaaatctggctcgattctcagtattatatatttttgtagcaaactatgaagggtccatgaacaaagtgttgagcgattttcaacttgacaagctcgttatataggcctctacataatcaaaataacatattaattataattattttaagtaacgaacaaatttattagaacactatatatttacctcatacatagtgagatgacatatgcactgatttcttgaagatgcataaactgtgtaatatcatccctatcaagataaatgggtgacggtgattttccaaagacatcatcaggcgctgtaattgtgcacgtcaaagaacctttttgcttcaaaattattttgcccaactaagcaaactttttggaaagtgacttacaatgttgatatcattgggccttatacttgatgttttgacactagatgatgatgatggtatgtctttttaccttgcggtttggttgtaggtgctattggtgaactatggctcttctttcgtcttgttattttaatccttagtcgtgatggtgtctacaaatgaccaattatattagaaagtgatacaattgactaacatatagtaaaattaagatatatatgttacctcgaatcctttcaagactaaatgttctggccatgagagtaaagtaccattgcatctcctactttgataatctca

SEQ ID NO: 57582 - DNA, 976 bp, Cannabis sativa
ctctctgttattcttatcgtaatatggtatcagagcagagaagcaagcttctccactgatcttctttgcttccgcctcttcctaccatctcgtgtcttcttctccgaaaatggtagcgtactgatctatcatctttttttttcttctttcacagattctttcctgtgcaatcttttcctttctctcctggaattttctttccagtgttttttcctgatcaagaatgtctggtgacaatcaagaagatggagctgaaactggagttccaagttctgccatttctgcaaatcaaaacaatccagtcacgaatccaagaagtcctcttaaggatccttctgatccatattatctgcaccatggcgacaaccctggtaatattcttgtttctcagcctctaacagggcaagacaattacacatcttggagccgtgcgatgcagcttgccatttctgtcaaaaacaaattaggtttcttggatggttctatacctaaacctcatatttctgataataatctttacaatgcctggattaaaaataataacattgttatatcttggattctcaattcggtttctaaagaaatttcttctagtttgctttacgatgaatctgcagctgctatctggacagatttaaagatcagatttcatcaacaaaacggaccgcatatattcaatctcagaaaaaatttgatgaatcttcgtcaagaaaatcagtccatcagcatatacaatactcgaataaaaacaatatgggaagagttgtcaaactacaggcccaattgtacctgcaatggatgcacttgcagtggtgtgaagaagctccaagaacaccaccacatggagtacatcatgtcgtttttaatggggctttcagaccatttttcccaaatacgcaggagtatacttttaatggatccattaccagaagccaatcgggctttccatcttgttactcaagaggaaaatcaaaag

SEQ ID NO: 57583 - DNA, 1349 bp, Cannabis sativa
tttaaatatgtaagaggtggtagcgtgaatgaatagaaaaagtaaaagctgacttgatttttatatgtaggaaatgaataaaaaaggaaaaagttattctaaatatgtaggatttttatatgtaggatttttattggtttttttaatatatgtaggaaaacgcactgtttaggttgacgtttgagtgaatagtaaatttattggttcttttaatatatgtaggataaatagtatcatgccctactaatgttttaaagagtaggtctggcacaattcataaatttggtattttcgtattgtgcttagatttatgtcgtatattttgctcgtactggcctatttttcttaaacaggtcaactcatttttataatttttttataattactaaactacatatttattttataaattcggctatatttatataatttttcaataatattttataaattatcatataaaaaaaaattattagcattattagaatttaaatatttacttataaaatattcatatttttatcactataaataaattaatttatcattttaattttacatgttgtatgaattttaattataaaattataatattcaattttagttttattattattttaatttatttataattgataaatatctatctatctatctatttattaacaataataataaattataaatttttttaatgtcctgtcgtaatttttggctaatttatttgtgcttatgtgtcatatttttcgtgtgcttctcctgtcgtgttatgtttacccatatatttttcatgtaaatttgtaacatcacgcccatacttttttttttatttatttagtcatgcctgccttccaatccaagcttgtgtcatatcaaaaaatactactcctatttacaacactactttccatgctctatttgaaaatatatgcattttccatgtgcaactagaagtgagtgagtgactgtgaaaggaaaatagagatgttgatgcataagcaattttattaaataaataaacaaatatatatatacacaaattttacaatacttatatactttgtatatttgggttggtgaaactaaatgaacactaaaaaataaaacaataataatctaaataatttttactaaagattaattgattatgctatgtaagttaaagatttccttaaaaaaaataacaatttctttttcttttagtaggaaaaataactccacaaagctcaagccaaaaaaacattattttggtatttatgtggccttttataaatgactccattgttacatatatgtaaaaaagaaaggaatcccactaagttagcaaaatggttctttactaaaaaatt

SEQ ID NO: 57584 - DNA, 1212 bp, Cannabis sativa
tgtgagaattcaaacatgtaattacactctccacaccataaaatctatagtgtgagaattcaaacatgcaattacaataatcaaacactacatacagtccagtccacaaaatgtggtgtaagaattttcactttgattaaataaataattcaatttgactaagtcctacactacaacaatattcaattaaacaatgttcttaattggtggtcaagtgaaccttataacatgacgtggccttcttttaaccacccattttttcccgatcatcattaatatgaaaacgacatgaagaactcattatcattaatatgaatcagggtcaagggtaggcgagccaagcgtacgtctcgagttcttaaacgcttaaggtctcgaaattataaaaatgtgaagctataaaggattgaacttaagaaaaaaatgttatcattacactaaattactagaataattattttgataataactaataaatatataaaggaacccaaaatttaattttatcttaggtcgcatatattttagagtcgatcatgatattaattaggccttcaaacaatattaattgactattcagataacataaagtcaaatttcatggaacccaaatcttccaaagaacttatatatatcatatcaccgtacatttgtaatcgaagtaaccaaaatctcagaaaataataaggccaaaaataagaaatggctctgttttatgagctctgttttcttcttattcttctaccaaacacagccttattacaaacaacaaacaacataacagtaggcacaacactcacagcaacagacaactcattaacatggctctcaccctcaaccgaatttgcatttggttttcgaaaactcgaaaaccaaaacaatctcttcttactctccatatggtatgcaaacataccagacaaaacaattgtctggtatgctactaaaacaaccaatacagactcctcggctgcagtgccaagggggtctcaggtcagtctaacagctgaccagggacttgtattggttgatcctcaaggaaaagaggtatggagttcgaagttagtaagcggagaagcttctcacgcggttatgggggacgaaggaaactttgtgatctttgaagggagtaatggggataagaagctttgggagagctttgatcacccgagtgatacacttttgcctggtcagagtttgaaccgcggagaa

SEQ ID NO: 57585 - DNA, 1499 bp, Cannabis sativa
atgatctattaatttcatcactaaaaacactttttgtctcaattgtgctgcatattctctaatgtatcctattcttgtttcaatttttggttagttacatggaagatgaatgaacctaaccttcacaaaacagtaatcttgatatctacttaggatttacaagatttatttgatgttgaacactctgatatgccctcaagtattggctcttttcgagcacttatgataaaatagacctctcggttctttttggctcaccattatttgagctattgaaaactaattaacaatgaatgggtgtaatccatggtcttacaacaacaagtgtttttcagtaaaacattgagtcagaaaactcaaaaatgtgatttagaaacaagtaatcaagtactcattattgaaatcacaatgctaacagaaaattaaagcaaaaatattttatgggaagaagaagaaaacttgttagcaaacaatgggaattcaaagtatttctaccatttataaatctatgcataaattatcatataaccttttcgtacattgccactaaaccatcccaaagggccatctcctgcaaaggagcataatttgcatttgaccagtggagctgccctattccaattttctcaacttgaatacgttctagtgagcccctgaaaaaccatgctatatcaaaattatatcatacacagggaagattttcaaagctgtctctagacgaattcgacaacagataagcctgaaaagggggttattacctgcaagcatttacaaactgccctggtgtcgccatggatatgcagcaaacttggtggctatcacaatgtcatcctgaagcccttttcccccggcatatgaagttgcccaagaacttggattaaatgaaagttgaccacattatataacaaatgtatgtttttctccaatctcttattgcataaacatcaaatttcattttctgccacaacagaaagaccccatgtttcattacattgaaaccattttctgcaagcggtttagagataatagtatgacgaatattcgaaacctcaatcaactagattgtaattcagtcaataaaatgttctataagagtaggtaggtagatagcaatatacataataacattttctttatattatttttcaaataggtttctgtagtgaaaagtgacaaaattaactaaataagacattttccaagcattacacttaaaatctcaatgtcatatcaatgttctgcaagaacaattactgactaaagtagctatgttttgctaataattttaacatgtaagtactgagtacacataaggtctttcatttttgttttggggaaagaaaaaaaaaactctgaagaacaaacttatcagaattgggaacaaacatttttacctcataatcattcactagaacacatagtgagcaaaacaacaaatacaatacagtccaaacaaactaagaagataccttgaaattccctgatgaactttccaagta

SEQ ID NO: 57586 - DNA, 1389 bp, Cannabis sativa
taattaaatatcactagaaaaatacttcaagcaaaaatacttcgagatgcccttaacaaaaatagggacaaccgcggttccaacataatgaacccacctgagccggttcaaagagactaagtgaatgctggtgtcaatgttgctcaacctcaagcagccacatatccagtgatctaggctcagttggacgagtggacccgattggtcaaggaccttactgtaccaaaaccactgacttagagttggaaaggaggagagggtctgccttctcccaaacaatcaatgacctctccattctagcgaaattcaaaatgcccacaagcaagtacacgggtagtgaagaccccctaacacatgttgagaaattcaaaatccaaatggacctttaagggatcaggaatgacctcaggtgtcaaatcttcccgacaatcctcacggacacggtacaacaatggtttactaaactacccccaaggagaattacttcttgggatgagtttgaagggttattctatacacaattctcttcagcccaacaaataccagtagagttgggtgacttggtcaccatcaagcagaagcctgatgaaccactaaaagactacattcaatgctttatgcaggaggcaaccaaggtaaaaaatctaagtgatgatggcaaacgggctgccatcataagggggattctggtgggaaatcggttgtggaaggatacaaggtgaaaatcaacccatactatgagagacttccttgacagagctgatgagttcattaaattggaagaagccgagtgaaacgctcaaggcttcaaccacactaagaacaaaaagaacggaacaagctcgaatagtcaaagctctcaagggggtaatggtaagaatggctccaacaatggcaagagggggaataacagtaatggcggtaacaacaatgacagcaagcgaccaaagaatacccctaagccagccaggcataaaaatttcaaaaacctaaccaatttgacttcaaactttaccaaaccttccagacctacatattataccccaatagacatattccaagcaacaacacaaccaaacaagctcaaaaacaattttcaccattaaagagccaagcttgagttctaaaactcaaagcttgctcaaacaaccctacaaccactcaaactagccaaaaacaacatatttaaacataatttaacctcataaaataatttcaaacaaccacaatcactacagaactcaaacatctaaaatcatgcaaaatctctaacttaaaactcaacaaactaaaagacaaagtgttgggagcttacctagagcttgagatcgcttaaaccttcttgaaaattacttgaatttgaggaagaaatccagaaccctagctggt

SEQ ID NO: 57587 - DNA, 853 bp, Cannabis sativa
atatttatatgaaataatccctaaataaataacattgaggccatgaggccatagagagtgagttaagcctcaccactatactttagcctctttcctagtaagctaatttaacaattgaaagattgcttaatgttatgagtatttctttattgttatcttagtagggtgattcatagttttgttagaatttttcattcttttcccgatttttttttttaatgaggtattattctttaaaaaaatcaattgtgacatttggaactctggggaagtgaagtatagagtagaatcatgactctcttcatattcttctctattctcattaaacctatttttctttgttcttaaacttgaaaatatacactaggatagatattcgatttaatctaatattttttttcttattcgatctaattcaattagtaattaaatttgaaaaattactatttgatccaatctaattagatctcaatatccaatctaatccaattcaattactaattggattttatcaattttttaattagatttctaattatactcctaattttcaatattaattcaaaaatatataaaaaaaatacgtaaaaatcaaaattaccctttatttaagtttaattctccataaaaatatcattattaagcgtaatgtaactaaaactttaaaataactaaaacaacactattgcgaagttataaaatataacaaaacatcataaaaataaatacatagaacaattaagtgttacaattttaacaaaaaaaactactaaaaatataattaatatagggttgagatgtaaaatggccctaaatttggtaactaagttagtaaatgtccactttttaaaaa

SEQ ID NO: 57588 - DNA, 825 bp, Cannabis sativa
agtatttgtggcattgaaagctcaagtagatcaataccaggttctgagataccaaagcatgggaaacaaggttctgtgctccacggtaatcatccaaattataattaaatttcaattcattggacgaattatgttgaagatgatcaggttgttaattctaatgatcttttttatttttcctatctacaggaccagattttgctgaagtttatagctttatcgggagtgtctttgatccggacactaatgaccatgtacagaaactcaaggagatggatcccattaattttgagaccgtgagcttcttcttcacctttttcgttccttcattagttcattctttctttctttcatctagaaccttaaaagaactagttgcaggaagtatatttgggttccagtaatatactattgccagtttgggttttataatttagtcattaatgcttaatatgtcttctcatgtatcatgccatctgaaactgaagaatttttgtcactctaataagaaagtatataagaaaagagaattggtatttaggtagttgcgtgttacaagtgattagcggctttttcatagtaattattaaattaaaatatgtggaacttaaaattaaattgcaccaatagtagcatgacatccgtaggtagtgttgagcaccgctaaatatgctgaagttcccaaaggtggcataaagttatattggcaaccaattgtcagcagctactatgtaaaccttcgatcatgaacgctagaatattatttatctctggggctcagtaacagtacttctactttgttctgccttattttatgaatgggat

SEQ ID NO: 57589 - DNA, 878 bp, Cannabis sativa
aaagaagaaaaacaactataaaatgtgacccaaaacctaggctaaaaatagcctaacagtggcatgagtgagagggagtgagagagctcaagggcttaagagatcagaattcatgtcccttttcactttgcctaatcctctttatatagttttaggacttacaaaagattagcattcaaataagtaaatatccattcaaaatagggaaaacaactcttttatgacatatttaagttataaaatagctaattgatatctttaaaagatatgtagatattttgagattgaatttctaatttcatgggttgtaagaattgtcccacaactgaaaccaagttgtgacccgtccagagagatggttatggaccccatcattcaatcgaagtccccttgatgctctttgtttgtgcttgtcagcctacccttttctgagggcctggccgacatatgggttcccttggccggctagggttatggtccgaccaaaccctcctggttggtcattttcttgtaacttggtctcacctgagtatttgcaaaccttgtcaatcgacgtgttgtgcaaggtgactttgttcactctactgacatgttgtattccacctggcctcaatctttcccatatggacattccttgttaggtagataaaatttaggataacatatatatatgttattgcgcataaattattatatttaactttcaatagttcaactcagtgttacagcaaagacagagaataatacaagtaatattatacatacatatataaaatacatatacatatcttaaatataatgtaacacttaattgttaaaaggtatgtatatagtatactttcttaaaaggttaatttggtagattttatatctgtttc

SEQ ID NO: 57590 - DNA, 1413 bp, Cannabis sativa
aaccaagtggttgctcaaggattagttgtgcgtgctctttgaatgaataaacaacttacttggctagatggttttctttttcactcttttttttttggaatgtatattcctttagcctgtatgacattgttatattaataataaatttcgtcattgcttaaaaaaattattgtggttctaaacatgtattaaaaaagaaaaagaaaaatatatatgtgatgcgtgtcgtatgtcgtatcaaatttactatttttttattctaatacctctaattattttagtataattgtaagtcgattccacgaggactatgtttattcaattattcacaaattagtaactagaattagaaaatgagttctgatgaataacaataataagataaaaagaaaacaagtttaaagagaggctacgatatgagaaattagttaaaggttattcgtcaccctcaacaatcattcctaattcctattagtgaatgtaatttcagtttctaatcaaactattaatcccgcagataaagctgaaacggtcaattatctcaatatccttattaaagtaaaacttaatttagcgaccgtctaaacaagatgacggtagattaaagtaaaatctaatttagcgaccgtctaaacaagattaaagcaatagtcatgatattgaacatagaagaaaagaaataatttgatatataatgaaaactagaaattaacattcaatatgaaactaagaattcatgtctcgagttttgaaataatccttaactaaaaaaaaaaactactcagaactagacattataataaaaatcataattttagtaagagttgaaggagaagaaaaaaaattcgaatccacgatctccttctctttcttgctctctctctattttgtagctctagaatgatgaaattcgtaatctaagaggtcctatttataatactaagaaatatctcactaaaagaaaagataacccatctttttcaaaaaaaaaatcgcagttcagattttgtctcctcacagcgaccataggtttgctcgccgcgaccatgacttcctcgccgcggtgacaactcactgtcaaaaaatttctattacctgattagtattttggtcataacttcttcaatacaacttggaatcggacgattcaagatatttcaaaaagctaagaacgagatctaaaacttttatgttaagctccaagtccagttctgcctctaagattgtcaaaatttgtaattaagttcagccttgtaaaactgaactcaccgacttctattatttttcactaaaatatgccaacattctttcaaatgactctaaatgcatgattagcctttaaaatatcctaaacaattaaaatcatactaatcaataatttaaaagaaataatttaaaaatattaatacataa

SEQ ID NO: 57591 - DNA, 959 bp, Cannabis sativa
tagtagaaatgcgatcaccgactaagccaaaagaagtccaaagtctcacaggtaaagtcgccgctctaaactgttttatatcacgatcctttgataaatgcaaggagttttttcagattttaaaaggcaacaagaagttccaatggaccgagaaatgcgaagaagcttttcaagcattaaaaacggatttggggcaggccccaatcctgtcaaaacccatattcgacaaagtcttatccatttacctagaggtgtcagaatatgcgattagttccgtactaatccgcgaagatcaaggatgacaacaccgagtgtaccatgtcagttaacgtttgttagacgctgagactcgttatcctcaaatggaaaaactaccatttgccctggtaatatcgttaaggaaactgcgaccttatttttcaggcccatagcattgaagttttaacaaactaccctttgaggcaagtcttagcaaaaccagaggcatcggggggattgttgaaatggtcagtagagttaagccagttctacatcagatacaaatcgagatctgcgatcaagggacaggccttggcagatttcatccttgagttccgaaatactgaagtggcactcgtagaagaaaaaattgacactgctgtactgaatggagaaggatggacgttgtacgtcgatggggcttctaatagtgaaggttccggtggtggaatcatacttatcagtcctaacaattttaaggtacacgctgctttacgttttgagttttctgcatctaacaatgaagctgagtatgaggctttgatcgcaggattaaagctcgccctcgaaatgaggatagaatacttacaggcttttagcgactcccaaatcatcgtatgccaggtaaacggagaatatttggccagaggcgggcgtttggctaagtacctcgccgtagtatgtgagtttttgcaaaaatt

SEQ ID NO: 57592 - DNA, 895 bp, Cannabis sativa
cataagagttgttcttactcttgccttgtccagaaaatggtccataaggcaactcgatgtcaataatgcctttttaaatggagatttacatgaagaggtgtacatggtccaacccccaggctttgaagatcctaatggtaaacaccttgtctgcaaacttaacaaagctctctatggtctcaaacaagcaccccgtgcttggtttgacaagctgcaacaatgtcttttgtcttttggtttcacaccatccaaggcagacacatcattgttcatccaacagtcggctcaaggtattattctcattcttgtgtatgtggatggcatcctaatcacagggaataatcaacagcacattgattctattgtcactgccttacacactcgatttgctttaaaggatcttggccaactcagttactttctaggcattgaggtcaattatacaacagatgggatgcatctttcccaaactaagtatgctcaagaccttcttgcaagaacacagatgcaaggtgccaaacattcgaatactcccatgacaagtggtctgcaacttcttgcatatggtagtgacaatgttgaagatgttcatttgtacagatcagtggtaggtgcccttcagtatttgacaatcacgaggcccgaaatatcatactgtgttaacaaagtttgtcaattcatgcaaactcctcttcaagcacattggattgctgtcaaacgcattcttcgatacataggtggcacactcaactatggtttgcacctcaaaattccttccacacttgatctcgttgccttttgtgatgccgactgggcatctgacccaaatgatcgacgatccacttcgggtcatgccatatttttgggaggcaacttaatcgcctggcaaagtaag

SEQ ID NO: 57593 - DNA, 1146 bp, Cannabis sativa
  modified_base (152)..(153): a, c, t, g, unknown or other
  modified_base (367)..(380): a, c, t, g, unknown or other
  modified_base (503)..(505): a, c, t, g, unknown or other
tattatttaactaactaactaaattttaaaaatttagggttgttggaacaaccttaaatatctcttcaaattttaaaaatcaaactaattttaaaatatctaagttatttttgaattttgttatcaaactaaattaaatatctaataagatnnatgatttgaaaataaccaaatagatattttcaatatcattttctaatctcataatttaataaaattaaaataacaaaacaaaccaattttaaaataggtatgattaggaaattatcattttaagaataaaatattgaaaaaataataattatcaaaattatatgtcaaaatatctcaaattaagcattttttaaatttctacaaaaatatctannnnnnnnnnnnnnttaaaatactatttataaatttatgataaataaaatgatataaaatgttatgtttttaactaatagtttataaacaattaaatatttaacaaaataacctatttttgaatttgaaaatattannnttagagtatctataaaaatatctaggttaatttcaaatttactaattatttaattcatcttacaagacaattttaataaaatattcaaattaaaatgataatgctatcttttaatttaaaatatatctaatattaaaatatctaatcttataattaaataatgtataaatattaacaaattaaaaaaaaaaaatttaaatctgacaataatttaaaataaaataatcaattttagaatttaaacctcaaaatatcagaaattaataataatctattaaaagttcaatattattattttacaaaattgatatttaaatttaaatatattaaaaaatattattttattttgaaatttacggtttgaaattgggaaaattcaaaaaattgaaaaaatcccacaaaaattggattttgggtgtggctgtccaaaaggctgcacgtgcagcccagagaggctgcatgcagctattacgcgcacggaggagaagggacgtgcagggtccctaaccgagaaacctcaatcacctgtagccttggacctcggcgaaggcaacctcatgcgtgtctgaagggtgcatgccaagcattcggacagggtgtgtccccttcatgcgcgtgcgcacggcttccttgttcgaagc

SEQ ID NO: 57594 - DNA, 863 bp, Cannabis sativa
  modified_base (455)..(465): a, c, t, g, unknown or other
tttatttatttattaattttataactttgaattattttcttaattttaaaataaatattgaaatattattttataatttataaataataatattatgtgtaccaatattaatatgttatgtgtatacataggtaatttatgttggtacttaattgtggtaaataaatatcactttaaatttactaacagtttagtagtttgaagatttttaccgctaaaatttgagtttagagagttaattgtaagtgaaatgagagttcagaagatttaaccgcaaattactcattaaaaaatagtatttattgttagctaaaatttgatatatactatcttgttaaatttaacacaatttttaacttagaccaaatctatctatatatataaatgagagatatgaggcggtgatatggtattttaaaatttctccaaaattatttttcttttctctccttaannnnnnnnnnnttaatattttattagagcataaatctacaaattgatattttacattattttaataagctattttctcttctctccataattctcttattttttatattttattagaacataaatttacaaattaataattttttttaagaaaacacattacttatttgatacaatttaatctattttttcattattaattcatagattttatttgacatattatttttgtgggtaaatactattttggatcctgtgttttgcaaaagttaccgattggacactctgttttgttaaatgacaaaatagatcctgtattttctaaaatgataaaaataggaccataacacgaatagttacagaaaatataaacagttttgtcataacacttttagatcggattattatta

SEQ ID NO: 57595 - DNA, 860 bp, Cannabis sativa
agtaattaataagttgaattattacgcatgaactcatcaaagtcatgattcattccctatctatatttatatatagatatgtctgtataggattaaagtaataataattagcattaataaaaaagttcactaatatttgaatcatctattgtcaaaatagcggtgtactaatattaatggggtcacataaacgaatagtagattgatacgtaacatatatacataagaaaattaataaagacacttctttcttttggttcttaattcctacccttttattatatacgtacatatataattcattaaaataatgggttttttcatttttacacttcaatacagttttttttttacattttaacaggattcgacattaaaaaaaatcgtatagaaacttctattgcaactagcgctgcaaccactttagaaactcaaaccgtgaatttgaacaaaaaaaacagtatatggggtaatttccgttaaatttaatcttttctaaaacgaggtcataatatttattttatttttaatttgttgatttttattttatttatgtataataatgtgcaatgtgattattactgaggaaaataggatttgaaaatatatataaaataataattattatttgggaatatgtataagtaaataatagtcacgatataaaactcaatttataaaacaatccttttgaaaaaaaaaaatattttgaaatatcaactaataaatcactattcattaaaaaaaaactaataactcgcgattatcattcaaaattcaaattttatcgttaaagataactaattattatcatttttataggccaaactagtcctaaacctaataggaatacagtagaa

SEQ ID NO: 57596 - DNA, 792 bp, Cannabis sativa
tgttactattttgtatgtaaaaagttgtaagttatgtccttggatttgagtattgaacaatggactccctgctgattatggacgtctcctcacccccatttttagttacatgagaaatataaaaaaaaattggcatcattttagcacaggaataggctcaataatttggaataacaaacacaatactggattatatattattaatcagattgtgaaaaaaaatttggttttggattaatagttcataaatggttgatttgatcttccatgtgattagaatatttggtattatttttatgtatatatatatgtatatataacattccctgatattattgaggctcttatcatggacatgtaaatggtgatcaagacattgagattgcctagccacttctatttggtacaaatgttcattaaaagtgataatataaaaaaggataatttgacttgaatgataatttgatgttagatttgcctaagaagatgaacaccaacaaagtaatgtcatgtatgctttaaggatatatggtaaatactgagaatttagatttgagtcataacatagttgcttaactttgaaagtgcaaaacgcacaactttttatatattatatatatttatgtacctaaaaaagtttatttattaaaaacatgtaattgttgttggtttcacaattcagattttcatatagaatttggtactctctgattttggtactaaaaaggcatttctagtttgttgtatgtgtgtatatatttttttttttgtgatatgatgaagaattattca

SEQ ID NO: 57597 - DNA, 824 bp, Cannabis sativa
taaactattatacacatttatatacacaatacacacaaatttataaaaatacacataaaactataaaaatttacacacatatataacttagaaaactgaacacaattttatacacaaataaactaaaattattatatatacacaaataaaaaataaattaaataaaactaaaatagagaaaaaatagggtactggagcggaggtgcggtggcacgtcctcgtcggagtcccggtagaaatagtttttcggaaaaaaaataaaaaaaaaagaagaaaaagagaaaaaaaaagatttggtagtgaaaatggggtttttggatggtgaaaatggtgtttggaggggaaattaaagagggggctaccgccggtggttcaaccaaaacgcagagagagagagaaagagaagaggaaaatggggaagaagggttcgtggatgcttttatttactttcgacttttgccggcgcaattaggtgcaccggcaaaagtctatcctgaataaaaacgcacgaaacactacatttcatttaagctgggacttttgtcggcgcatgcaaaagtttcccacaaaattttcacacacgttttcctttgggtgggaagttgactgccaaaaatttcaggacttttgccggcgcataaaggcgccagcaaaagcaaaaccctgatgcaacgtgtccactggtcaaacggttcccacttttgtcggcgcaattaattgcgccggcaaaatgccccacctatttttgcgcgcacatttttccactgcgagagaaattgatcaccttttttttagacttttgtcggtgctaattaaaataaata

SEQ ID NO: 57598 - DNA, 912 bp, Cannabis sativa
gggtatttttctagtccaataataatggactagaaaaatatttctactccaacattaatagacataatatttggagtcaaaataagaactcatttatagtccagcaaaggtagacgttgaagcacaaattttttattttttttaataaataattaaaattattcaaataatataaattgttcaaaaattataaaaatttatttatatatgtaataattaatttataatatcttagattattgaaaataaaataaatactaaaaagaactacaattattctaaacttctttactgaattatacaaacaaaaataagaaaatacaatttattatttttacaagttcatacccttttcttttttatgcaagggttacaaaaaacactaatctcatggcactaaaatagatcctgaatgtctattcaaaaaaaaaaaaaaaatagatcctgaatgttaaacaatttgggaatcgaaaccaggtgaagcccaactccatccccgtcgttcaactctggccaacattgcaaaacccaaacttccacatttgtctcaccagcgccaccagctccgtgttcccatcgttcgtctcaccagcgccgaaatatatgaaagagaaagaaattgagaaagagaacatgaatcacaggagtttaggtctagaaaacaccaatcgatggagttgggttaggataacatgggaaaagagacaggatatgagaatgagaaaaagaaaacaaggatggacctagggaagtcgacgaacttgcttcgtggctgtgtggtggctttagggcttcggggttgtgaggcggcttcaaggcttcggagctgtgatgtggcttcagggtcgccggagttaaattttcatttttcattagtgttgaacagtggttaaaaagagagagagagagaga

SEQ ID NO: 57599 - DNA, 959 bp, Cannabis sativa
tgtataaatgataatattcaaatattaaactatatgattattattattacttttcttactgagtccttatgatgcacgagtgctgtgtggtgcaggtaacgacaaggaaaagttagagctaccttgaagtaactgccttctccagcaatgtacatattgacctcatcggcctgcgtgctagattgcaaggagttattttaggttgtatctattgcttatttaagttttaggttttttaagcatcgttgtatatagctcttttataaaacttttcataacaaggatctcaaaaacactctttttacgttgttataatatttgtgtttagtgttttagtttattcaagcttttaatattatcaggatttttaataattaattaatctatagtattaaactagtttataaaatcacacacgtggcgtccctatagattagggtgttacaacttggtatcagagcaaccatagttttaaaagtcctaaaaattagtcgaatatgtacatttgttgtgaaaaaaggtccacttatggtatagtaagaatttatattgtttgttattcgattaactgcctagattattataaagtatattgggaaaagtagtataatgatgattataataagaatatgtgtatggtatacacatattgatattgatattcatttgagttctagatgcttggaagatgtggattaaatgtgtgacaagttatgcagtaaaggcaatcgagttgtttaattagcgagctatctaggctcaaggcaaacagtaaggaagagaatcctttattgctgcaatacttggaacatgtaaattctgctatgtaggatatgatttggcaacaaggggaaatagatccgagatctgagagaacaacaagctcgtcttgtgtctattcttgtactaccaacacttccttttgtacaactggatgtggtgaaatatatgaagtcaac

SEQ ID NO: 57600 - DNA, 2115 bp, Cannabis sativa
  modified_base (160)..(163): a, c, t, g, unknown or other
ggcaggaattggcggggagtgctcccctatcttcatccctattaaggattttaattctcatcttcgcttatttttcattggagatggggcggagaatcccctaataaaaaaaaaaattatgataaaaatttaaatatataaaaatattaaactacataannnntaaaatattacacattaattattaacttaaaattcataaaaatgatactaatatattaaaaaatacaaacataaattataaattataaaatactattagatacataaaataaaatactaaacggattctcgtcagagcagggagtatcatccacgtccctatcccgtttaatattcggagacaaaaaataatcctcgtttctgccccgtttcccatttagatggggaatccctacctcatggggaaaatgtgcatcctaaatatgtgtaatacattaaattacttgtaactatggaaaaaatttcaaatcacaaatataacaaaaaaaatattaaaaaaaaaaaaaaccatgaaagatccccatttaaaaggcttttactcaaaatattatattttaaaaaaaaaatacatttatattgtggtaagaaattttatactacccatatttttttcttttcatttttactaatttttttatctattttagtttctataaagcttcttttttactgtcattttcttatctctctttcttctttttcctgtttttagtaagtcacgcagacttctctctctcacactctagtcagtctctcttcttttttttttttacactaatcttcttttttgtgtacaaacttcattttaaatatattaaaagaatattttgaagtaactgatattatatatttctgtctagacccaataatcttaaatctggacctcatatgtgacttatttaagaaaataagagagtttgaactgacgaaattagagaaaaattacagttttataaatattgggtacttatactgctaaaaataaacattaggattatgccacttacaaacttaaaactttgggtactcatacctatttacctaaaatataaatataataagtgtaaccttttacatcacttttttttaatcctattttactctctcaataaattttgttttattatttaaaaaataataattacaagcacattttatatctttttctctcttttacattttcttactattcacactcaaactacttaatactatttttctttaattaatcacactttatatttacacagtttttctaatgtatatatatactgtatatagttttaacattctttctctctcttacaaaaaaatttcgagcactcctcttatatcttgctccttacatgatgtagtattttttattcttttaatgttttgtaatttattcggagtatattaatgaatgattgtgtatatgtatatttgttgtgttgcttttatgttatattgtagttgtttttaagtggatttcataatattttttagttattttttttatgtatatttgttttaatatattttttatttattcttgacaattcttttattatatgtatgttgttttgtagatgtatatatttaacttattttcttgacacatttttttaaatacgatgataaatttcatattttttaattgacacaatatacacaagtagatattgagatatagttaattttttgttgttttaattatatattacttattatattatacactcaattttaaaattacatggttttattatttctattattaatgtaaataattattaaatttctaaaaaaaaaattaaattatcattttaactattactaattcaaaaaagagaaaaagagtcaaaattgtaatcaacaaatttaagaagaaaaatataatagtataaaaagataatcaaattttcaaaactatataaaaaaaatgtaaaacaaaaacatgttaaaaaattgatattatattgcatattacatacaacaaaatcgatgtcttattatttatttttctattgcttttgtagctgtctttttagtattttataattattttcgtgttattgtttaagtattctatgaatttttagttactttagttattttcaattttactga

SEQ ID NO: 57601 - DNA, 719 bp, Cannabis sativa
ctaggatattatgttcttccttccccattcaaatcatccaagttttattccaactaatcacataattcattatctttaaaaataaccataaactaacttttctatcaaataaattaatcttgtttgagagagatgattgagcgtcttctatttatccaccttgtaagcattttgtttgactgatttgaatatatatagatagtatgataaacacaaaatgatatatgttagatatatattagtaatattcattttatttgtaaatgcagtattctaaatgggaaccattcgacgcttggattccatatctggctgcaaatctgttcaatctctacgtctgtaaagaacaggtacttcattaattaaataatgccatgacatgattttttcaaaatttattgttgtttcactctaacaattattaatttcttaggttgagtatgaaagtgaaacaagcattgatctcattgccctatgttgtcttgacattgcttggaaaacaagagacaaatacttttccattggtcatcttaaggtatgttattaactaattagttaatctgttttaattgagtatcttccagtcttataattaattaattcattctgttttttgcttttattcttctgttgtttaatcttgttatctagctgtctttagctgaattagttaatgattcattagctatgtaagtttgtttaggcatgtctttctctta

SEQ ID NO: 57602 - DNA, 1017 bp, Cannabis sativa
taccgttcttcggcgatctgctcggagtaatagtggtgttgcactgcaggttcttgagtaggagaacattcactactcacctcccaatcttcaaagctcaaattggaaagtctgtcacttgaagaggacgggctggcacgaagacgagggtgatcctcgtacagaagttgaagcaagtcctggtcaattcggtgttcgcttctctaaaactcaccagggttcatctacaaaagacaacacacgagatgagtgtttggctgtgatatcaatagtaaacaggcaaatatgtcgaccaggagtactcaacagattaaaagaatgaagaatgttcaaaaataagccaaaacccagaagtttgaaatttttgggtttagggttatatctcacgaagctttgaatgagcaatgaaagacgaacaacgcgcgatcaaaggcaaacgtggtaaactacgaagctatacagattattaccgagaaaatcacaaagttttaaacctagattttctatctatcttctacaacaagtcaaaaatgcatgtataaaacctagaaattaaacatgtaaagtaaaaagagaagaagattgaaaacttactcactatttggcgtctaagttcagtccaaatgaagctgtttggatgctatggtggaaatctcatggtagacttgaagtaaaaaccttttttgctctgagttttgtttagtgaagaaattagtaaaagtaaagttatgaggaaaactcatccctatttatgggtagagaggtgaaaaaaggcaatcttttcaaatgcctttagacccatcggttccctcccaaaagtaaatattgggaaatcaaatgtaatcaagtgtaaccgtcaaacgtgatgagaaaaaacagggtttcgaggcactaattaagtaagagcattaatgttgacctcgcttttagccaacgacaacgagtctatttttataagcgataagtgatttatagcaacaaatatatgataaagtaatataaagacacaggaatttt

SEQ ID NO: 57603 - DNA, 1134 bp, Cannabis sativa
acatcatcctccatagaggagttctaccattgaccgactgtagatgattataggaacttttgacagtgaaaaaaccagttggatccttgttccaaaacgaactatcacttacaagattatcactcaaaggcacctgtttgatgagctcaacatcacaggaatcaaacaagtcctcaataagctccaagtcccactatctactacctgacttcatgagttgagacactttacaattggtcagtgccggatgattagagaccacatacagattatcctcaaacaaaagccaaggcgtgttaagcacctcagtagatgaaccaggtcctattctcctacgagcaccatctttgagtagtgattgtgactcaaagacactatgccatataaagctcggattgccacccaactcagcttccaagaatgtacagttaggaaaatatcgaggcttatatatccgtcccacaagggaatcctgatgcagcagtaatcaccaaccttgcttaccttacaaggacagattatactcacgcaaacttcgaaaacccatccctccagagttcttatttttgcatagcttcctccaactaaaccaactcacccctttcctaccactcgaactctaccaatatttagccataaggctttccagacgtgaacaagttttcaaaggcaataagaacacagacatagcatattttttttttaatcatttaaatttgttctcatctttgtatatcacatgttatcatcaccatatctcactaactcattattactttagcttaccaaaaaacaaatcaaacaatgagttaacattattaacttttaatacaatttttctttgaataataggataagttaggtgtaagagaaatattttaagatatatatattaggttgatgttacgagcaatacacgtataattagttttttttaattaggttcaattagttgatgttaagtacaatacatgcatgtttaattttttttaattaggtaatgtattttttttaatttttaaacgggatttgaaattttgatctttaagaaaaaaaaattagctattgctgcattcgtgtgtcatttggatatgattatatatatacgtactcattacaaaaaatcttactttt

SEQ ID NO: 57604 - DNA, 1295 bp, Cannabis sativa
  modified_base (120)..(128): a, c, t, g, unknown or other
aatctcctaaatatcctaaattctcacttaaattcaaatatctaaccaatttttcaaatttcaagtttattcaaaatttaaattaactaaatttctaatatgataatataatataatatnnnnnnnnnaattttaaaatttagatattcctaatattatattcttgatcttataatttaataaaattaaatattacaaaataaacaatttgaataataagatattttatgcttaggagattaccaattttattaagaaaaaaaaaataaaataagtttgaaaaattttgtggttagaaattctaaaatttctattcaaacctaaactaaccaacttttcaaatttcatgttatttttgccaaaattaattttaattaaaaagaaatatcaaataagataaaatgttaaaactaacatttatcaaatcttataattttaactaataaaatatatttcaaaaaataataaatttgaaaaaatatgacatggttagcaaattttgaaaatttaagcaagattatttttaaaaaaattattttatatcaaaataagatcattcaaatttaataataaaaaaaatgtaatatatgatcttataattaaaataaataaattaatcttaaatttaaaaattaaccataaggttatttttgtgaaaaatcaaattttcataatttaaagcctactaatatctaaaactaattttactaatcgaaaaattaataaaaattagttttattttgataattagatttttaattgaaaatttagattctacacaaaattctaccaaaatttaaattttgtttcaatgaaaaatgatttttgaataaaaaaaatgatgaaattaaaattggtgcacaggggtctgcaatgcataccgctgcgcgcgcagttggaggaggctgggcgaggaacgaggctgcatgcagcctcagatgcctagtaaactcagcgtgagcagccattttgacagggctatgtccaagaattctcggtcagctcctgtctgaacatgcgtgctgtctgagtgacgcttagccccgcgcgcacacacatgtgcatccaaaacaaaatattttcatctaaattcaaaaaatcataactaatacacaaaaaatccaaattaggttttgtaaaagcctaaatttattattttttgtctactttccagtaaaaatattttcaaaacaaaataaaaaatatttttacaacgtatattgcaatttctaaactatcatcaaataagcacataaaccatcatgaaactatccaaatcaacacaaacatcgttt

SEQ ID NO: 57605 - DNA, 1018 bp, Cannabis sativa
aataatttcataattaatcacaatcaactgataatttccaaattaactaagcgggctttacattatagttatttatcctgtaaatttttctaaaatttagaaaaattttacatgctgaaaatatagtgtttctacaatgcattcccttaaaagcaatttattatataaaaagtaatgttcaaacagtctattcacatgcgtataaaataaaatagtcacacatccaatataatgtttgaaccttattttcagcgtgctaattttttttgaattttttaaattttacaagatattttaaataactataacgtatatgatcatgagaaaaaaaatttgattaaaaaagtatgttaaatatcaaaacaaagatatatagtggattaaaaatgggtgtgtgtggtaaaattttccaattataaatagtgtatagttatgagaaatctcttaaatattatgagaagtgtgtgtttcaatctttattcttataatatctttttgaacttgatttattatttgtaaaataaagtgtagtatcttttaaactctttataatgactcaacatagtgattcttcttctttctcttgctacaatttgtttataattgtactaggtgaatgttacgtgccgagccacgtaaatgttagttttatttaagatttaggtttcttggttttttttagatttctgtaactaaaggtatgattatatgaatgatttgttttattaaaataatcttcgtgttattgtatttagttagtaaaatatacttgtgtatataaaattatgatatgtacattggtattaataataaaaagtacgttaattgtaatatttacagttatccttatatgaaaaaataatttataataagtcaaaacaatatataactttatcatttattattctaattttcatgtaaatatatttaaacttattctctgtataagtaatactatttttgtaactaaagtatatctattctatataaagtgtgcctatataactgaaattcttgg

SEQ ID NO: 57606 - DNA, 1720 bp, Cannabis sativa
catcaaatataactctgatggttcagttgatagataaaaatctcgacttgttgcaagaggctttcaacaaacacctgacttagactattttgaaacttacagtcctgtggtaaagccatcaacaatttgagtaattttctctcttgctaccagtaacagttggccaatacaacaaattgatataaataatacattcttgaatggggagcttcaagaatgtgtatatatgactcaaccttcgggctttaaaagcactgaatttccaaaccatgtttgcaagctcaataatctatggccttaaacaggtcccttaggcatggttcaataagctaaaagcatatcatgttagatgaggatttaacaactgaaaagttgatacatctctttttttcaccaagaaaaaaaacaagctgttacttctcctagtttatgtcgatgacattctaataataggagaagatattgcccaaatttacaaactcattactaatctcaacaaacagtttgccttgaatggatgtgctcaattctaccaatatgacagaagctactcctactcctactcccactcccataattcatggaaataagctctctttatcaagtgggacacctctatctgaccctactttctataggagtgtgattggtgtattacaatatctcactatgtctagacttgacatttcttttgctgttaacaagctttctcagttcctaaaagctctgacttctgaacattggttagcttgcaaaagaattttgatatttagctggtacttgtgacctcggtcttcacttccagccttcaccaagctttcagttagttgcctactttgatgcaggttgggcaagttctgtttatgacatgaagtccacttctggctattgagtcttccttggtaacaatctcatccattggtgttcacacaaacaaacagtagtagctcgctcaagcacggagtctgaataccgtgccattgccttagttataacaagttgatctggttacaatccttgttcacagaattgggtttaccctgctcctcttctccaattctttggtgtgacaatctcggagccacatgtactcttgcctcaaatccacttttccatgccacgaccaagcatattgaagacgatcttcatttcattagagatcgtgttatttcagagcaacttgatattaggcatgtctcaataaaaaaaccagataatagatgttctaatgaaacctcttcccatagcatagttcaagcattttcgatccaagttaacactgacaagccccagtataacttgaggggggtgttaggacctactttgccttgccttagtgttagttaggctcgttagttttctattttaactaattttgtgtaagagttgttatgtcaacttggttagttgttcctaattttgtatgtactgtatgtaaaactcattctataaataccaattactcatctcagttgagaatgacctaaattcaatttctcttttttcctaaaattctattcttgcaaacatcgacaaaagtagacacctttttttttttttttctgaaagagcacacatttatttattttgttaaatcttattttaatctatattataataaatattgttaataaaaaaaatctgcattatattattatataaacactgtaacacgtataatattttttttttttttggaaattatcacatatactatttt

SEQ ID NO: 57607 - DNA, 520 bp, Cannabis sativa
aaagtgtgatattattattatagatgagctttaacagaaatataaatgaataataagtgttttcaggatgttcaaagaaaaccctttttgaacgagaaaatgggatagcaaatagataatcacattagttccaatctataatataatatagggtaattatttatttagtactttatgttttgttaaaatacgtgtttatatttagtaacttttgtttaagattataatcaattgttatcctctcttctaaaagactacacactttggtaccttacgtgtatttaaatttttaatatttctaaattagcctctcttaaatgtggtttcggatatgatcagtgacacgaagacttttacagatgcctaccaggctaccttaacccaaagctgttcaaccacttgcccaatggagaataggcaaagagagacagttggtctagttcttaggtaaagtcgacggttggttcgattttcgcatcacactttatagtgatgaatccaagcctctagtctcgaataa

SEQ ID NO: 57608 - DNA, 852 bp, Cannabis sativa
agagagagagagagagcaaggagactggatgagaaagtcaaagaccctagggtttggttttattaatagtcgattatatctattaaaaagtcgtgataaatctataaaactgtcgattgccctcatgagtgttctaaattgtcgagaatacctaatttttcctaacaatttttttttaaaaggatttttcctaagagtttaaaacagtcacttaatattgttagcgatgatccccaaaaaatattgtttttgggaccgtcgcgaattctgacttttataatagggaaatttggtttgtgagtttagtcttagctactcctagattgtctatctgaaaagaacttagttctatggttgaaaatgagtattagttatagtttagaaagaagaaatactcaacctagatggtttttgaggttattaagaaagactatgaagaaactcatagatcgctttagtttattggtaataccatgcaaaaaaaaaaaaaaaatcaagagttaaagaatatgatggaagaaacatgattctgttgcattattttaaggttatcaaatctctattcttattttaattctgttatttgaaacatatattaaataaatactatatctttgatcattataattgggataataatgtcatagctaactctcttgcacaactagctatcacacttaactctaattgtgtggtgattcaatcaccattcaagaacataaaacaagatcaaaaataaaaccagaaaaacagatgacataaactagaaagcaaacaataaaccagcagcaagaaaagaaagaacacaaccgaattacaaggttcaatcacaagtgaattaacacttggatc

SEQ ID NO: 57609 - DNA, 850 bp, Cannabis sativa
tgtcaaagttcaggggcaaaaatcctaattagccttttttaaattatgttttgtataaactagtatattgaataatagataatgtgtaatattttaattttatgtaattttatattttacacattgaatattttttttaaaaaaaaaaactttactttaagcatatgtattgtattagactaatattattctaaaattactttaactatttaaggattatctaaatatgaaaaaaatatatatatatatatatatattcatataaaggaatatacctcataccaaatgatgatgtgtgtacgagacatcataaagaaactttgtactaaaattttaatagaataaaaaaaataagttgtatgcaatgaaataataacaaaaaaaatggaaaaaaaaaataagagaatgaccaaaattatggagtgcagaaactaagttgagtagagggcagatagcaggtttgaaatggcataattttttcattcttaacaaatattgcaatgtgaccactcaattttatacaattttttgagaccaatacaatgaaacaataagtgaaggtacaaaatgaatggataaaataagagaaagaccgaaactatcataaagtttttcaaaaactttaaacattaataacttttgatttggttgtccgtttgaggtaaaaaaaaatttgaacttgggtctttttttgcgttctatacatcccaaacggcctatggcggttggtgttggattttgtgccctaaataaaactctacttcaatgtaatcttgaataatcatttatcaatgaagaaacaaatttatttcattacttgtttaatatgtgttatttggttaatgtgatc

SEQ ID NO: 57610 - DNA, 2762 bp, Cannabis sativa
atgatgcctcagatgaaatgcatccttatgtcaatgtgttttaacctctcatgaatcatgagatttttcatcaaaatgtaaggcacattgattgtcatagtacattgtgatcctttctaaatcgaagccaagctccttagtcaaacccctcacccttatggcttctttaattgcttcagatgctgccatatactttgcttcagtagaagacagagcaactaccttttcagggttgatttccaacttatgcatccatcttgagcaatggaaacataacttgtaagttttctcttagcgtctatgcatccatcatagtcattgtccacataccctgcaacttcttattttgaattgcagttagcattttaagctaaaccagtgtcaagggttcgtttaacatacttcattatccattttagagcttcctagtgttgttctccagggttagaaatgaacctgcttgtgaagctcatggcatgtgtcagatctggcctttgtacaaaccatggcatacatcaagcttcccactacacttgcataaggcacataattgatgacctttctttcatatttttttgaggtgactgatcttttgagagtttgaagtgagcatccaaggaatggtggctggtttggcactgctcatgttgaatttgcttaaaaccttttccaaataggtcttttacgatagacagatcttcttaggcgtctttgttgtgatttctatagcaactatcttcttagcatcacccaaatctttcatttcaaattaaatcctcaagagaccctttataagctctatttctatcatgtttttcccaaccaaaagtatgtcatctacatacaataagaggaacaacttaccatttgagtagacacaaggatcagatcacctcttagtgaatctaattcttgccatgaattcatcaaatctgatgttccattgtctaggtgccagtttcaggccatagagggacttctgcaatagacaaactttatctggatcaccactttcaaaaccctcaggttgcctcatatagattttctcttcaaggttaccatgtaggaatgctgttctaatatccatttactgaatttcatagtcacaccttgcaactttggccatcatagctcttacagaagcttgtttgaccaattatgaaaaaatgtcattgtagtctactccatctctttggaaaaccatatggtaactagtcattccttgaaccttctatcttcaacccctggaataccctctttcactttcgttatccacttgcaatctacgagcttctgtccaggaagcttgtttgaccacttgtgagaaaatgtttttgtagtttaccccctctctttaggcaaaccctttggtaactagttttttcttgaaccttctatcttcaacccctggaataccctctttcactttcattatccacttgcaatctacaagcttctgtccaggtggtctcttgactatgatccaagttttgttcttgatcactgatgacatttcttcctgaattgctagaagcaactttgtaccatttctgatatttatggcttctctgtaggaggttggttgtgcaatatcaatctcatatgcaacaaatagtgcagatcctgtgtattttgcaagttcaacaaaccctaatctgtctggagggtgaatctatcttctttccctatctctgtcaagttgatatgtctcaagcccaccttgaaatgtagaaggttcagtggatgtagattcatctaatctctcttatgtcccaactgtatcctcgttgagttgaatctgagttcttacattgctacctataccttgtgtatctgcttacttcttcaacttcaagggcatttccttctcattcaagatgacatccttactgatgatgcatcttttgaaagttggttcaagacactagagtttgtaaccttctacccaactagggtagccaagaaatagatatttgattaccattggttgcaacttgtcttgcctgatgtgaacatagggagaacacccaaacacctttaagtgatcataattaggaaccctcctagtccattttcattgaggtgtcttgaaatcaattgcaacagttggacacatatttcaccaagtagcatgctgtcttgacaaattctccccaaaaatgtctttccaaaccaactctagttagcatgcatctaaccctttctatgagggttttattcattatctctacaagttcattctattgaggaatctttggagttatatgatgccttgctattccttctttgacacaatattctttgaacatcccagaacattattcaaggccattgtctatgttgagtttcttgatcttcttcccaatctgattttcaatcagtttcttccaatttacaaaggtctcaaaagcttcatccttgcttttgagtaagaatatccataccttacttgagtaatcatcaataatactcaagaagtagcttgctccaccaactatctttactcttgatggcccccataggttagagtggatataatctagatgttgttttgatgtgtgcacactagatgggaatttcagtctacaagttttctcaatggcacactcgtcacagaagtctagtttcctagacaatttaccttttaggattccttgtctctcaagttttgtgagccccctctcactcacatgcccaaatctttgatgccacaatctggtttgatcaatcattttgttcttgttggctccagtttcaacata

SEQ ID NO: 57611 - DNA, 1035 bp, Cannabis sativa
  modified_base (31)..(47): a, c, t, g, unknown or other
tctaggtggatttgaaagagagagagagagnnnnnnnnnnnnnnnnngagagagagagttgagagaaaatatgatctttattgatatttttctatttttttgtcaaatatagagataatattggttttaaccaactaatttaagcttaaacaccaattaaaaatctgatttaatacatcccacaacaagccaaaacacacttggcaaaatcaccattttgcccctttaacacaataaaacataaaaggccatttatgggcatttagggaaattctagaatcccgaccaatcccagtgaccaaataaactgccccgctacactaaaatgctaagatgtgattctaatagccaaacaccgcgttccaatgttgtcgggcaccgaataagcaaaattatgaaatttctatatatgacatataaaatgcattctgaattaaaataaatcaccataaattaataatttaaaattaataaatattttccataattaaaccctaattatccgctaatttccaaatttaagctaagcggtctttacaactccgtatgagatgttgtatggcagaaagtgcagacctccaattcactgggatgaaactagtgaaaagaaatacttgggtcagtataggggagcaatgaggcaatagagaagatcaaggccgaaatgcttgcctcttagagtaggcagatgagctatgcagatctaaaatgtataaatgtagagtttcaggtaggagatcatgtattcctacaagtatctctgatgaaggggattaagcattttagaatgaagggcaagttatgccctagatttatagggcctttcgagattcttgaaaaggttggacttgtagtgtatcgtctagccttccctccagcattagcagcagttcataacgtattccacatttttatgttaaggaaatacgtttcggactcgacacatgtccttagttatgaaaccctagagctccaaccagatttttcatatgaagagcatcaggtacatatccttgatagaaagtgttggaatat

SEQ ID NO: 57612 - DNA, 804 bp, Cannabis sativa
  modified_base (324)..(329): a, c, t, g, unknown or other
ggaggaaaaaatatgaaataaaagaaagaagaaactgatttgagaacatcttttaaaaaattaccaagaaaagtagaagccttagcaataagttaaactatgaattctcatgttcaacctaaaaaagatgtttgttttatatgtgctagttcatgttataatgctcaattatgtccttcttttcttgaaacattttttaaagaggctaatgctttacattcttatggtaaaccaaatgatagcccattttccaacacatacaatcataattggaggaaccatcctaatttttcatggagacaaaaccaaccacaaatgaaccannnnnnccaattcaacatgccaaatccaaatcatgctcaaaccagtcaaccttaccatcaacaaaaaaaaaaaaccttccttagaagatactttacaataattcatgcaatccatccaacaaatcatgcaaaatcagtctcaatctattgacaaactcgagacataattgggtcaacttgctaatgctataacttaaagagaaaaaaaggaagatttcctaaccaacccatcccaaatcctaaaggccaatatgaagtaggagttccaagtcataaagaagaaattaagtttatttcaactcttaggtccggaaaacaaattgtcaaacccatttacatacctcaagttgaaaaaggcccaagccaacctcaaagttccaacacaaatgacttgtcaaaagataatgatcaaattcttccttccattccaaaagctcattttccacaaagattactcccactcaagaaaggcaaccaatat

SEQ ID NO: 57613 - DNA, 817 bp, Cannabis sativa
aaaaaaaaagagacaacgattccatgagaagaaaaagaaagaaagaaaagaattttttttatataattttataattcttttttaaatttttaattatttttaaaaagttaaaaattattttaattttatttaaatattaaaaattaggtagaccaataaaaacataaaatatgtacacttgggtacacatagataatccgccttagcattagtagaaatttactaacaaaagggtaaataacataacaaaagtgagaattatatagctttgccacaaaaaaaaatcagtgttgatctcgcttttagccaatgacagtgagtcttaattaaagcgataaggataaataaataatagaaatcaaagagcataaagtaagaaaaacaccagatttatagaggtttgaccccttatgtttggtattatcctactccctttttagttctattgacttgtgagaagagtgagcaagaatgctctaatttctctcgaaatctcttacaataatctatgagtaattcactcttagatcgaggtttcactcttgagcgttttctctctaaataatttcatgttcctgaatagtgagattaaaccactatttatagaggttaattacatgaagaatagtttcccttaatctataacaaataaaatgggaatttagtatgtttccataattacaataaagagattgggaaatctaggcttattgcctttattctctgaatttatcccacaaatatagggattgtcttcgtgacatgcaagcatgaaaataacgatgttcatctctgaatttggcaattcgcaccccct

SEQ ID NO: 57614 - DNA, 959 bp, Cannabis sativa
tgttacttcaaagttggatttctctaatgctctaggtggggaagcgtcagcgtgctgtcttgccctggaggaagctaaagctcgaggagttaaatttattattctggagagtgattcgagggtggtgatcaacgctcttaatgggaaggagtcccattgggagattgataactacatctctttttgtaaaagcatctcccctttctttatcggttgtatgtttcaatatgttagtagacaatgtaattttatggcccataatgtggctaagtgggcgttttcttgtcagaggtttggcatcatgcctctttcctctatgcccgatactatcttttgtaatgaccgcgaggtctaacggttttattctaatgcatgcacgcttttcttcaaaaaaaaaaactaaaaatataattttttttaaaacaaaccttataaaacattaaaaataaatctgaatttaagattcataaaaagtaaaaacttaattaaattaccataaaaaatattaaaattcttttcataataattttttttttaaaaaaataaaacaaataaaactatagtgctcgccggagttgtcactcgtgccgaaaaagtcaccggagtagttgtcggtgccggaaaattcgccggagttgttgccggcgccgaaaagtcgtgagaattagtattatcgctggaaaaatcactcagaaactggtttcttgatgaagaaaccgaaagcagtttcttggtgatttttctggtaattttaccggtgacaataccaattccgacgactattctggagtttgatgtcggtgccgaaaaagtcgccggagtagttgccagtgtcggaaaaatcaccggagttattaccggcgttaaaaaagttgttaggattggcattgtcgccagcaaaatcactagaaaaatcaccaagaaagtagttttttcatcaagaaaccggtttcttcacc

SEQ ID NO: 57615 - DNA, 840 bp, Cannabis sativa
ttctttaatgacttattgtgggactaggaatttcaaaatccattcctttttgaattggtgaatttgaaatttaaagataacaaggaatgaagagataagagaaaatatagaggagatcaattgctataaatagatactcctccattcactttccccactccttcacatacccaaaaagaaaaaattgagaacctaaaaactttgcttttatcaattcttcaagtcttcttcaaattcaggtaaatttctcaaatttttaatttttttttcttctcctcttgtaaagcttagtttaaggattctagatcttgttggaaatgcttaaactctattggtaagccctctaaaaatcaaaaataagattttcatgtgagctgtttgagcttaaatttttcattccttcaaggcgcagtttgtctaaatctacttgaaaaaagctgttttgagctaaattaagttgattttcagctagtcaaagtcaaggagaaccgagttgaaaaaaaaaaatatgcctcatgtgagaagaacttgtaaaaaaccttaagaatatgactgacacacaaaattcaaacgtgcaaagcttacagtgccaaagtctaaggatctagacaaggcctgtggtggaaaagttatggccactgagttactcactgtctattgaaagtgaggacccaagagactgagcctttgagctaagacctcttgtctttagttccattactcatcaccaagttgaactggttcgagatgagtattcaatatgtaacaccctacttgtttaggctcgctacagtattttccaaattattgtgttggcccttgctaatcaaagggtttaaa

SEQ ID NO: 57616 - DNA, 686 bp, Cannabis sativa
tatttagttataacttctcaattagaatataatttccttgtcccaaatgtattcttggatagaagttctactgtatatataaatatatgagctgaagttgtttcatcagctgacaaaaaataataaaaaaaaattaaaaaaagttgagtttgacttgaatattttttatatagcgtaaatgtattatattatatatttttaattaagtagctagattaagtataaaaattcaaatgatcaaaatctaatagtttaatatttttaaaattaatatttattgttaaatttatttagtaactatcaatgggtaatacttattgaaaagtgtttcattatttctcaatgaatattacctattagctattagtgggaacttttaaaaaataactaaaactaaaatttaatttgcactgtattggagttctcggaacttgtcctctgcagggagaagtatgttgattagctctgttcttatgaccatactacttactggagtcaaattttgcttcttccatcaaaggtagttcatgaaatagagaatatatgtagaagttacttatggaaaggtacaagtcaaatggttcggttaggaaacattgcttgggctaagatctgtaagccaaagtcagcaggagggattgggttcttgagtatagctgattggaacaaagctgctttaatcaaga

SEQ ID NO: 57617 - DNA, 3058 bp, Cannabis sativa
gcgtctttatttttattatattatgattaatatttgtgttaataatgacatataaaagagacactttatataaatatattatataaatttatattataagaagaaattaaaaagtattaagtttgaaatttcattcttaattaataaattaattttttaatctataattttaagaaattatcaaaatctatttcctattacaagtataaatataataaactaattaataaagtcttgatgaacacactcgatcaatttttatattcatattattatcatttcttcgaaggcggtcttgtagatgtagacattattatactctccatgaaaaacttacttcaccttaaataatctttatatgaattaagtatttgaaaaaggaacatttttttgttaatttagtatattacatgttttcaaatacaacttacacccaaaatcattgttcattagggaaagaagccgacacattcaatataatttctcaatatatatacatctccgcaaccttgttcttttttcttcttcttccacttcttcttctttaaaaagttactcatgcagtaggtttctcttcaatagtccaaacacgttttcatagttctgcgatgattggagcatttttttcctctcataagcattattattataaacaccgacactcaagggaccgccatttgtcaaaatattgataatttatttattttattttcataaaaaatatacataggcaatgatagaagtgatgaggtaattataaagagtttaatactagtggattttgaatgttactttcaattcaagttactcaatgaatgtgatctagagctataaaatttataatctaattgacgatcatgaaaaatattataattctgctgaacacacacgctcaaattctcaaattaataataacacaaatatgcatgagtcttttttatatgattagaggcacttaaaagaatgtaagaagaaaggtatagggcaatctttagccataaatttcatcctatgatcacatacgtggatagatataaatgccaagacgggctccactaaattgttatattatggaccatgtggagtcccttctgccaattttgtaaaacaaacaagtgacactgagttaggtaactcaaccttttcacaaaggcaatgatgacaatattgttgatgagtttatgtattaaagatgatgattgttttctttcattccaacaagaacaggtttcagattggaaagtactgtatatagaaaggtgtagctagcttaggtaaaggtttggtttgatatttgaattgtggcaaaccaaaccaacaaacccaagagatgactggttagtggttaaatgtggtgatgtggcaacaacaacttaatatcatatctgatataaaaatataaatgatgagtaggagaggagtatagaaagtcaaatcttgaaaaactactcttgaaagtcaacattatccgccttcaattttggccaactttattaaattaatactatttactatattttgtgcaaactagtccagcaacctattccttcttatctctggtatttttccaaaccggtgtgcttcgaaaaagtccgaaagctacgtctctctcgatcgttcttaccttctacacgtaccagagtacagtcaaatgcttattaatttcttgaacgaacactctacaaaaccatattaattcgccaccaaccaaaaaacctccacaactcctctcgattttatcacaaaacccaattagaaattaattaattctcttcattaattaatttatttatgtccacaaatgaataattaattaatacccagttctaattttattcattgggggtaatcggaatatatatcgttctactctttttcaccactagtatatctctttcattctctaactccgtttcagtatttcaatcgaacacttggaagggaataaaatttaaagatgaagacgaaaacacataacaaaagcaaattcatgaaaattatcacaacaccctttagagctttggggaaagcaagagacttatacgtacggagcatgaattcagctgagaaattgagctatgccagcaccatgggtggcccagcaggccagttcgacggcctgcctaagagtttcagcgtcagatcgtcgaggtcaacagacaccaaagacgacgactacgccgagctcgttagagcagcttccgccaggagttatggcggcagaattgacgtggatacgattctacgacaacagttgagagaagaggcagcaaaaactacactttcttctagtactactgggggagctaggggtttgcccaagtgtagcagcgtcggcatgggtaaaatcgacgaagaaaaagctgttgatcagtttggggaagagggagatggtgctaagcccaaattgatgtacccgagaagcagaagctacgccgttgctaaaagaggtcctgtgtactgaataaaataattgattatttaattttctggaatgaaattatggactattaaaagcttaattgctttagttagttagctttgttttgtttttcttttttttttttttttttaaggtaaaaattgaagattataaaggcaaaaggtataaatctttttcattacatgtatgtggtgttgctttgtgcaggactataatcctctttctatagtttcatgttatttgtaattgtcttctttgaatgtttgtttcattgtgatgatcacttaatatatttactagctaatatattcaattgcatatttttttgtcaaataagaattgttgttgaagtaataggcagggcttcataagaaaattaagaagatcgataactttttcttagggtgtcatttttacccacaattttctttgaatgaactattcctctattaataattggcttcgtgctttaattgaaagaaagaaaggaagacaaaaaatagcacaatatatatggaaattatttcaagcattgatggcaacacaacaaaaagggtttttcccttcagttttgaagtgacataaaaaaattggttttttcatttttacacttca

SEQ ID NO: 57618 - DNA, 1765 bp, Cannabis sativa
atttttttaacagtgaatatataatataacattgcatcaacataaaaacaacattattatccctttaaaaaatcacaaatcccaaatccgtaaaaaaaatccataaaaatatataaaaaaaaaaattacaattttagaaactttatataaatttttccatattatatattatagtaatattagccctttataccaatcacatcatgaaaatcaaactttagtttttctttctttttatataatatataaactataatttaaagttggcatttatatagggtaaatactatttttgagcttgtgttttgcaagaattgccaaatagactttctgttttgttaaatatgacaatttaaaccattcatttattatttaaaatggtacaaaataatgctttgaactcaatttctgttaaattaaaacttattaataacctgatcttataattagacgggttatatttttttagatttttttattctaaaaatgaactttaagttaaaaatattacaaatgaaatataattgataaaaactaaacttatgtatttttttattatttaaaaaaaaaaaatctaatttatattctaccaggataattgggacttaatcaaacaagatgtctttgaagcagtcacttcatttcttcactctggccacttacttaaggagctaaattcaacgataatcaatcttgtgccaaaaagtaaatgcccgaatgttgtaagtgattatagacatatggcctgttgtaatgtactttacaaggttgcaactaaaatgatttgtagcaggttgaagcttatactgcctgatattatagctcaaaatcaggggggattcataaaagggcaattcattgcccataatatcatggtttgccaagatttgataaggcactatgggaggaaaaatgctaaggcaaactgtatgattaaacttgatctacagaaggcatatgatacaatgaggtggagttttttagaagaaatgttacacgcttttcaattctcaaactcattcatcaagctggtaatgacttgcatcaccactcctaggttctctcttctctttaatggatccctacatgggttttttgaagcgaagagaggtcttaggcggggtgaccccatgtcaccactactttttgtgctgggaatggagtatcttagcagaataatgaagaaaataggtgatacaaaagactttcagttccatgaaagatgtgggcgattaaaaataaaccacttgacctttacggatgatgtcttgttattttgcaggggtgatttcaagagtgtctatttgatgctaaagggcctcaaattgttcttaatgactttgggattacaacctaacaagaagaaaactgcaattaattgtagtgggatgcatgagaatgagataggaaggcttgtagatgcttcgggttttcagagaagtaatctaccttttaagtatcttggagttcctatatgtgccaagagaattttatcagctgaatgttcaattctagttgagaaaatgacttcaagaatcaaagtgtggagctcaaagaacctttcttttgctggtagaactgtgttaatcaattcagtccttctatccatccatatgtattggagccaagtccttatccttcctaagaaagtgattaaagagattgagagtatctgcagaagctttctttagtcaaggagaagtaatatgaatggtccaggcaatattgcttgggagcatctgtgcaagtccaaaaaagctggtgg

SEQ ID NO: 57619 - DNA, 841 bp, Cannabis sativa
tagttagtttgtatttctaattgttcccatcgtataatagaccttgtataatttaattcatttttatgattgagattaggaaataagtgagtgagagagagagagagagagatatatataattcttagtgtaactggttgtaacacggattaagtgagtttgatgttgatctctcgttgtgagctttctatgtaatttaagagtatcaatcctctattgtattgatcgcattcatcaataaaggtctctttgatggtatttttcttcttgaaatttcgttatgttttagttttgaattccaattgttttcatcacaatttgattacaaattgttttagcaattaatttaagttttgattagttttgtgtttacttgatcgaggtcttgagagtgattacaattgctaaagtattattactgtaaaaaactaaacttagatattcgtatttatatgtgtttactgaaatttttagaaactaaatatttgagaactaaagaaataataaaatgcaaaaaataaagagatggagatttttacgtggttcaggtattaattaaccttagtccgcgagtcagtctattagcttctaagggcgtatttgatgtgtttacaatgttttgtagaaaaccctaactctgtgtccttagtttctcttgaaaaaggagaagacttacaacaatattgacagagctttggctattttagttgtaatcccccttcatatggaaatagaagggtatttataggctaagtggcgggtatggacatgcccatgacccgcctagggtttctactcaaagcccactactgggttaaattacatgcaaaaaatgagatat

SEQ ID NO: 57620 - DNA, 1317 bp, Cannabis sativa
ttaaattgaaatgaattttatttagggcataaaatcccaaaaattatatcgtatatataagaattatacgatagatagaagatccatctttatagatatcatctacatccaaaaagttgtatgctttggaagaagcttgtatagtttgggaaggggttttggttgatcagaaagaagaatctacttcaaccgatatggtcgtgactgttcccatgaagcaaatgatgtaaccttctagttatagaaagtcatagattctcatgtgcttacacctagaggtcatgctctagtctagtagttgactcttaagtgcctactactacactgcactacactcggctctacacatttatagagataacccctggcagagctaagggactttagtccttattcattatccccatcttcaccaagctaacaggaccttacttattcagggggagagtggagcctctagaagcactattaagacgaagatccttgacccctcttcattctctacatggttccaaaagtttcttcaacataggtgacaacaagcagggtagagatggaagagatcaaactccggaataagaagcaagctcgccttcctttttgttcattttgatagaggaggatggagaaagtggacaaaacagactcgcatttctcatcgaacaaataagggaaaagaatcctattgaaaatattcctaatccaccaaccccttccttcatagagtcatgtattgtaagtgatccgaacctaccgggagtgagtctcccatagaggcaagtgaatttggtgagtgtatgatgggcaactatctcctgcacttatagctgatcccttcattcactaagtcggcaacgagatagataaacaaagtcggcttgttaacccgacctcgctcctcggctcatgttggaaataaagctgctacgtactctaaaaacctttggacagaaaagaattagtaatgtaccttgcagtcagtgaatacgctgtaagcgacgcgctgataagagaagagaacaatgtctagcattgtaacgccctaataaaaggcatgttatcatgagcaaaaaattaaactttaaatcaattaaagagtgaaagtataacttgtagttatttaattttacaaatattccaaaagattacacatgtttctggatcccgtaaaaacctttgcaaaacattacaagttctttttacatgccaacctaaacagcaaaaactgagaatacaagatacatcaactattagacccaatctgcgtagtttagtgtggcccgaacatgtaccatacacttgttgggttttatgccc

SEQ ID NO: 57621 - DNA, 1240 bp, Cannabis sativa
taaagtaataaaatagtgaagtaattagttaaaatgatataagtgtaataaaatgtcatattaaaatagtgaagtgattagttaaaattacataagtgtaataataaaatgtggaaaaagttttttttaattctttttaaaagaaaaatgagtgttttaatttattgtataattttttaataaagaaaaatgagggtttttttacatcaatcaaacataatattaaatgagtgagattcatgttaaaagtcaattcaaatctcctacaatacatcacattttagtagtcatgaacccctttatatccacaaaatgcaatgagatccattttattttgaataattagcatttttatcccttaaacttttggcactacctaattttgcccctaatgtatacgacttgttaaaaattcctcttaaaatataacagttacataattatgctccttctattaggttctatttcttttatcgttaaaaataaaataccctctgaattttgaccaatacaaaatttttccccattttattaaaaaattaattttaaaattaataatattctattttttaaagcaatttcaatattctatcaatttgaaaaaaataataataattattaaaaagttggataaatattaattagttaaaaaatattaattttattaaaaaaaactaagataatttctaaaatatattttcaaactttattttatttataaacacgtatcttaagaatcaaacaaaaattattgagaatctaataaagaatttaaataagctagtattttttaaagaaaaaatcaaacttatttatatttctaaactcctatcttaacaaataaaaaaatagtcaaaattcaataaaaatatagaattattcttttaaaaaaaagttataaattaaactaaaaaaatgttatgtttacttaaagaaatctatattttttgatttattaaaaaaaaaaattattttttgataaaaataaaatatactcaagtttgtctccgtaaaatttaatattacgaaacttaaatttttaatgtatattttttttaatatctaaatgaaatttttaataaaaaataaatattttttttttatatcgattaattagttttaaaatttaaattttcttaatcattgaaaataatttttcttaagatctatattaattttataagatttatgttgaatctttctcattcttatttttaggggtacgatttgatagttgtca

SEQ ID NO: 57622 - DNA, 2023 bp, Cannabis sativa
gcataaaacccaacaatatttataacagattcaattataaatatttattcaaattattaaaaattattattttattagtttttttaattctaatatttatattaaataaaacttttattggtgttattaatataccgtacaaacctaaaaactatataggtataagtttttaagaaacctataatgggttaataagattaaacctttttccatcatcattactctcagtgttcttgctcatgagttgagataaaacaaagaacaacaatatacagtttattgtgttagcccactctaatccttgtgtgtggtagaaggtttaaaagataacaatgtggcttcttcatcacaattttaaggattcaacttatgaaaagattcgaggataccctgatatgcttcaagaggtaaatatttctttttgtctatttattttagatttaatataaatacatattgtgatcttaagaatgtggtacgatgataatcaaaaattattactccgctgcatacctaatttagtaccacaaaactaacagttcgatcaggtcagttccccatattgcaaatggctatggactttgcatctgaattaactcattgggtggagctctagggatctttgagaacctttgggacttgtctcacttcttgacataagcctttgaatctttaatcatggtcaagtaaccttgtcaaaatattttcttggataaactttgccctcgagtgtgattactgtagaacccttcatgaacttcagtaaggagtcgcgcaacttattctttcataacacatctcaacagaggtaaggaaaacccctgtctatacattactctacctagaattaaatattgtgtagccttcctcattatcttacggacttcatttttatcaattatagcgtatcgaccttcaacatcaattaacctctaactgacatagtagactagatgttgagtgttgttatactccctgatcaacatgacacttactgtgaatttggtcactgcaaggtatattcccaattcttctcgatttagaggttttgataagatggaggttgttcgagctgccttttaagttcctgaaaacatccttcagattcctcgatccacttaaactttttacttcctcataggatactaaaaaagggaacacacttggccattgattttaacacaaatctgctcagagtggctatccaaactgtgaggccttgaacttccttgatctttatcggcgacttcatattcagaagggcttgaatcttctcttggttagcttcaattacccaggaattaacagtaaatcccgagaacatacctaaactgactgcaaaagaatacttgaagtgattgaggttcatgttatatttgttgaggattttgtactttaatgccttctctcgggggtgttgttgatcgtagttatcattgtacttcctttttttcaaatttctatggttgtttttgttgttaaacgttttacaaccatggtcgaaactctttctagctaggaaagtttgaccttgttggacgggtgtattaactgcagttttcgatagtccaggacttgggttggcctttttctgaccaactatgtccactcaccaaattgcttcctcaagctttataaacctgtttgcttggtctaaatattcacccatcaaacctacaataagccttttgatgtctttccataattctcttttaggttcgattcctcctagcacagttactattcttccctctttggtaagtcccttcacttgtgtagcctcagtgataaatcgactgctgtaatccttcaaaggttttcctagaatctatttcacttcaaccaggtcttcaagtgagcggggagctatcttaaagaacagaattgggtgtaaaactttacagcaaaggcattccacgaattgaacttccctgacatttgcttaaagtaccactattgtgcagcctctgccaaggtagccaaaaaaaattctacaccttacatcaccctttactaccttcag

SEQ ID NO: 57623 - DNA, 907 bp, Cannabis sativa
attattacaagaagcatcattttaatatagggatatttatgttttcggtatacgaaaaattataatttaatttatttttatatgacagtgttacattataattattacacgcattatgtattttatcgagttttttttctttcaaaaaaatcgaaatagtttatggttgtgaaaattaagttctaaataaacaattacacacgtataaaaataaactaaaaagattaatatgtacggtgtaacttactatttgaaccttcttttcaagactataaattattagaaaaactagtaaaatacatgattataatatatctatattactgcttataaaacaaattatacatttagattatctctaatgaataatttaatttttgtgataaaattgacttaaaaaaatgagtaatgttatgcaattatttggcttaatctttgcaattatacttgctaattaattaaaaatacagcaaattcattttattttattttttttaaatatatataatatcatcaactaaataaaaaaaatgtgaaaaaccttgtaaataatataaaaagcattaattagtgttaaaataatatacaaaaaaaagtaatattaaacaaaaaaaaaagtaatattttatagcatgctaaatttaactcatattattatttgacacaacttaaatatgtactaaattttagacactttttacaacaccaataaattttatattacaataacgtaatatatgtaactcttatagtggggattttttagtctaaaatatgagtacaattttatagaaaggtcacatatagactcaatttctaataaaaaagatgatgtgttgatggatagctctagtagagctaatcttgcatgacataaacttatgagaatgtgcgaccgagacaaggt

SEQ ID NO: 57624 - DNA, 1097 bp, Cannabis sativa
tttgataggtcgtattgtattaaataataactaacactatgtttgggtaaaacaatatattgtattaattattaggataaaaaaatttaatataatataagttgtattatttaatacataacaaatgatctgtattagcttgtctataatatttataaaaagggtccgggatcaaactcaatctccgacctgaatcccgagagctggatccggatcaagactcagacccgaacccaatacctgaagtcggtattggcatcgagtttattgaaaatatattataattttacacaaccttttaatacaaattaatatcaaacatattattgtgttaaataatacaaatacaatacaatacaatatgatcatactgatcgtgaggacttgattataggacttgattattattattattattaattaattaattagcttgataattatacaattaataaacacacctatacatactcttgtccttggtgtgtatgcatggtgcttgcatgtatgggtctctaacacgtccaaattaagttctatacgtacgtgcatggatgcatgcatgctttgcatgtgccctcgctctctttatctcaacctacgtacttatatatttcaactttcacatatatgcatccatatatatatggcttggaaattaatactaggtgcaactattttttttttttttttgataaatcagtgtaattacaaaaaaaaaaaaattacacctagtattatatattcttaattagaaaaataccatgggccttaaaaaaaataatattttgggcctttattaaaaaaatataagaaattacattacaaacttcttttaacttgatgcctttaatttttaccttttttttcaaaatttattatgtttacttttgtttttcaatcatttaccaattttacccctatcacttcatgatagttttcattcttctcttattaaaattttctcccaacttttccacaaaccttcacatccatctacaaagaacacaaatatattatatttgaaattatgtcttagttatgtgagtgtgtgaggataatttgggtacaatatactcataaaaagatgtatattt

SEQ ID NO: 57625 - DNA, 3247 bp, Cannabis sativa
  modified_base (2319)..(2328): a, c, t, g, unknown or other
  modified_base (3093)..(3104): a, c, t, g, unknown or other
  modified_base (3186)..(3187): a, c, t, g, unknown or other
acagtgtaattacatggtcagacaaacatgtcaaattatgtaattacctctaattacacacaaattcaattacattgtggctttccaaacgcacccttaataagaaaaattagaaatttttttaaacattacaaaaaatatggatacctgtttaaatattctgaaataggtttttaagtaactaaatgttgtttataaaatcataatatattgttataagcttgtaaatttcagttaaaataaaaacttgtaatattataaatttttaaaataatgcgtaattttgtaatttttataaatttgtaggttaaaatttagttataaattacagccttaatttattacaaaattttacaaactatcttggtgttttggttataacctttggaaaacaaatttggtttcactaattagatagtgttggaatgatagctgaaaactttaaaatttggaagtggaaataaaaataaaataataattctctctaaataaaactaaacaaatgtcatttagacaatactatactatatgttttttttaatgaaaagatacaatttcactaacttaaatagtaaactactcggactacttggaatcatgaaatttgaataggtacaaccaatatttaactacgaaattttaaccaaatggtgagcaacaatattagcggatcgcttgactaaaattgaaactacatagtccaatactatacaatacatgtgatttgttaacaattctaggatagataatttattatatttgataccaactataaattactattaaataaattatcacaatcacatcaataaaaaataataaaaaaaaaagacaataactcacatacttctactactagaaaaatattttttatttattaattagtctaaaaagtttaccattgctgaaaaaatactaaaatattgaaatataaatagtgaaacattgttatcagtaccagtagtgtccaacactactgcagaatgatattattttaaattaaataacaatttttataataattattaaatttaatatataaaagtcgacaattaattagtatcacaatggtgttgagcaccactaacatcgcttaacacttctcaaaaccatgaatttggttattcaattagactatctccaatgaatttttgagatctatgtcacttatggtgattctctttgcagctaccatgatgaatattatgcccaataacaagaaagctatcttaacaatccaccaaaatacaactgttgaaaatatcatcactatcatcttcatcatcatcatcattaataactgaaaaaaaaaatatactaaaaacattattcgtatcggtaaagacgtattttattgtatgctataattatagcagacattttacctaatttttaaaaaaattaagaaaaatttacagtgtttaaactataattcaaacatatagttagttgtatgggtacaactgaatatttaaactctgttttcggtattataaattatttaaatcttttcaaaaattggtgaaatatctattaaaactataatataaatcgtcgtataaaaagaaattgagttatactttctttaaatactaaaaacatagatatctttaccgatagagatataagtatgatgaaataccttaacgcaattaaaatgtttggctgaagtctaagctcgaaaatcgaatgactatattagttggttttacttgataattattacgtgcctaaaaataaaatacaaagatgagaaacttaaatattcacaattttatgtttatatttatataaatatataaacctaaatctaatcaacttatatctttaattcccaatttaaattgaaattggaaattaaaaagataatgataaatttaatcagtttatgttttccgttctaaattcaaatttgaatagaaaaagataattaattatgtacattcaaattttgaaatcattagttaaaataagtttaaaataacctctttatttatgagaaaaactctaataaaaaataaataaataacgaagagatttaaagacaaattttgtagggaaaaaaaaaaatctaaaatagtatcttattaaaagaacatttactttttaatatagcaaaaattgtttttgagtagttatatatgcttaaatattccttaatattttaaaatgtgagaatttttgcttaataatgtcattatcttttgaacgtaaaaatcataaattatattgttttatattatttaaaatcttttatttttagttacctaaaaatatcggcattttaagaaattacgaggcgtttggttgggaggaatnnnnnnnnnngaataggaatgggaatgagaataggaataggaatggaataaaatttaaaatgcatgaaatttttttttaaaaaaaatttcattaaattttttttcttgttacattggaatggtcattctttttttttaaaaaaaatggaatagccattccaccaaaatagtggaaagagcattccaatgcaaccaaacaaagaaatggaataaaaattgtttccattccattccatttcattacctccaaccaaaccccacctaagaatattatcatcaacaatattattattatgaagcaaaattcaatggaaaaattctattattttaattaacaaaattaggtgatgagtctatattatatctagcatgatcttaacgaagtttcatgatttgatatatgattttttttatatatataaatggttattttttaattttttttgttttaatttctaatttttattttgattcaaggccttcttaaagggataatatatttacatatagatttacttgtagctttattttattaaagaaaaataaaaataaaaataaatatatggtagttaaacttgtagcatgattcacatgttctaccgattcactcaatactatatctattgagagcttagtttttagaaatttttattaagcatttggtatgaggtgttcaaaataatttaattaattagaataataaaaagaaaatataactatctggaaacttataactgtatttgtatttagttatgtcacttttaccagcacagtnnnnnnnnnnnntggtaaaagtaacttttactagcatatttcgcaagctgcgctgggaaagaggtcaaagttttaccagcgtacatttgcagtnnctaaaatttaacttttaccagcgcatttacgtgctaggaaaagtcatctttgccagcgct

SEQ ID NO: 57626 - DNA, 1233 bp, Cannabis sativa
gatgatgtgttagtaggtagctcccatagagccgaccgtaattcttggtacaaacttgcgagaagatgccaccgggacaagatctagtcgcatactatgcctcgcatagtcaaatgaataagcaagatcaagagaagttaataatactggtcgcgtatatatgcgatgaccaagtatatctctcttgcgactaataaagatcacttctttacataagattagtttgaatgactaatgtgtttgacacctcgttagggactcacatcttctatgttgtcaaaacatagaatgttcgactatgcgtttgagaataaacgcataaattcaagtgataggcccgaaggccaccctacgaatacaaaatatcaaagagcctgcgtgctcgtgtgttggaatatgaacatgcaactcgtggattatcaagtcgcatacatttctacacttaatacaagaacagattaaacagttcttcatttattctttaaatatttacttttattaaatattttcatttaatgtgaaacggttctaaaccgattagttatgtaattctaaatgacacttactttctatataaaagagtgatctaaatcaaataaactaagctaaaatttttgcaacaaaggactaagcagaccgagctttgtctgaaccactataattctcttattttctctctatttctactttcatttttgtccatttagtagccagtagtctgagtactcgctattctaagcgaaaactcacatatttataattgagtattctaatttattttgaatactagcattatttggtgttgtctacattcttccgataacacttccatttcttttatttttggtatgttttaattataattttgttatttttgatgatttatttttatttttctaagaatcaatctatgccattttctagctcactctcatagtgttatcatttcataaatataaaattgatttgattagatatttttatgattttaattataaaattattttaattagatatatttaattttatcttaattttcatactggaacaaatgaaattttttgaagtgattaagaaaatgtgagaagcacaagccgaactagatttctacctaaccatgctatttgtttgatcaattttctcatctccttatctttattctttttaagttatttacatttctattattttataattactaatctaatctttagttttaatttatctctctat

SEQ ID NO: 57627 - DNA, 1058 bp, Cannabis sativa
tcccaatatccatttaaattatggcgaggaaaggatttccattggatacccattacatatatatttttgaataaaaaaaatgtctcaaagagaattttttttaaaaaaaaaaacaatcataaaaattcattaaaacaacaaaacatgaatggaatagagtgtatagcaaatagagttagcaaatacaaaattagtaatcgaaaataaatggttgtcatttttttaaagcatttatgtgtgattattaatatgcatcaccacaggcattttcatgaaaactgaaatatgtagttatgatgttaaagctaatatatacatgtatcatatcgaagtgagttcagagcaaatatctatttccctctcccaccctattttcgactcaagtatgaacatttaaattcatacctgccccgccccaaaagtcaacccccgcccccgcccattaggggcgagtaaccgaacccgtgagtatacttaccatctcgtctaggtcccaaagttcaagttgagatcaaaatccaaactattaattaagaaaaaaaaaatctatttaagaaaattttaaaaatattttttttttattttcaaaacttttacaaattttattctaaattaaaaagtaaaaacaattttataaaccatatatttgaaaaatatttttaccatggttcttaagtctttagctagtgtacttccaaatttaatcaaccaaaataaccaaaaagaattagcagccataagaaaatagaaaagcaaagatgggaattacacttgtaaagaaagcaaagcctatctatttgatttttttaaaaaagaaaaatgctttctccacattttgacaattcaaaacatttcagagctcacaaatcgatttcaccttaataaatcaaaactctgagatgctaataacagtagtaccaaaacatagaactaaactcacatggactgattatggtctccccctcccattcactaaaataaaattaaatttgtatcaaaccaaaacaagactgcaaaaagaaagagcaagaaatcaacatgaggacagattcccatca

SEQ ID NO: 57628 - DNA, 1145 bp, Cannabis sativa
ccaacagccgaattggcggctacctccaccgcctcaacaaagccctcctcatatgcctcagggattaattcctccccctcctcctaataacctcccgccaccacctccgtcaagttgatctactatgttgtttgaatcccccttggttcttttgtttcttattattgtagcatagtttttatatttctatacttgtggctattaaacaatttgagagagagacattagaagagttgatatattttattttaatttctctaatgcagaacttttgacttatgtttatgtctatgttttcgtagatatcagtagttagattttggtggaaaaagaaaaactaaggaaaatgttaggaaaaaaaaagtagaaaataaacaaattctcatgtttggtgtggaatgcaaaattgtatgaaagaaaaatacattcaacaaatttttctctactaaacatgattttttatttttatttttttatttattcttcacactttttttccctacatttcttttaacttccaaattccgaatatagctccacaaaggcatgggtttcaactacttttcttcttcttctaaccgaaatcaagcttgggttagggttaagattcttcaagctttcttctcttctcagtttgcggttgtaatattagggttattagattctaggtttttgttcttgctctcttctagccacaaccacgaacacaaggcaaaacccagaaaaaatctctgacgattcaaacccagaaaactcactcaaccacccaaaaccgaagccaagaaaaaaacaaacccagaaatttcccaaaacagtcggccaagaacaaaatctcatttaaataatttaaaaattcaaatgaaattcaaatgattttttttttttgaatgaatgtgattatttaatttcgtaaaaacaaataacaaatctccaattaaactaactcccctatatctaaggagaatacttatcttatacttaaaaaaaaaataatgaattaaaaatatcggatataatcttttattttgcaattagaattagaacatttatctttttttttttttatctttctttatatataatcgactacaccatagcaaaaataaattaaaagaataataatggcaagtgtagacatacacagt

SEQ ID NO: 57629 - DNA, 561 bp, Cannabis sativa
aaaatcatttccttaattagaaaataacttccatatataaaatattctaataagtacatcacgagacaaaatcgtgtccctatttttataattggaggattatttacctttagtaatagactgttgcatttcattttcattgatcaatatacagtacttttcccaaaataaataaaaaatgagtaaataaacaaactaaaagtttatatttctattaacagaaaattataaaatttgtaacgattcagtttattttataaagtttaagaacttgtaatttagtcagaaatatataacaacgtctgtttgacatagtttttaaaaaaagttaaaaactattttttaagaaaactacaatgaaaagatatttgataagtagttaagaaatagcttattgaatattatagaaggttacctaaaaattaaatcttgtacaaccaaactttaaaaaaaaaactgttttgattaaaagattttataataaattattttatagtatttaattatttattatatattacaaaatattaaaaaaaattgaaagaaaaaatatttaaaata

SEQ ID NO: 57630 - DNA, 1014 bp, Cannabis sativa
gtggcaagatggagagtattttttatttttttttgcgtggttcacagagtcgcacataattaataatatagcaaattacaattagcggtggaacctcttcgaaccaaaatagctcatcgtctaaccgaaaaagatgttttgctaaaccataagctgtagaattcataatgcaagtcacatgggacaaaactgctcctgaaagtttaaacaattctttaaaataaaaattaaaattaaacttagaatttaacacacaacccaaatcactaacttaacattacaaataaaactaaaaaaccaacaaaatttctaaggataactagcgaaaggtatcactagctcaacaatactaaaatactaaaaaaccaacaaacatttctaagtataactagcacctaatttaaaactgctgaaaattaatatcaaagagattacatttaaaatttaacttattggtaaatttttgtaattatatatcctccacaaaataatttacaaattaataaaaataaacctctattacaatataatgaaaacaaataacgtgaaaaaacgatggtaaatcaattcatactagatataaagacttaaaaagattagaaatacttatttgttaaaagtaaaaaaaattgtgaaagtagaaattaagatcataaaatggatcacttctcttgtccattgaccataccacaaaactaccctaaacaaataggaacaaactctaaaaaatgacacaaaaaccataaaaagtacaaaagtcgtataaaagacatcaaaaccatcaaaaaataatgcaaaaactagtaaaataaaactctttaaatagctaattaatagaaacaaaaacagacattcataaaaataataaagaacataaataaagagtataattttgcaatattaaatgaaataagtaaaattatgaaaaaagatatacacataacagaaaaatacaaaaaaggaaaaaaattacaaaaataccatgggtcggcccattaaacatttatacagtcc

SEQ ID NO: 57631 - DNA, 2270 bp, Cannabis sativa
  modified_base (1924)..(1929): a, c, t, g, unknown or other
ggtctgattctaggtgtgggtgtttgagttcgggtccgagtctatgttcggctgatcctgatctgggttcgagtttaggtacgagtccgggactagctttgggtcttattctaggtgttggtgtttgagtttgggttcgagtttgtgtccagatttgtgtccagatctagacccagatcagggtgtaggttcgggtccaggtctaagttcgtgtcccgagtgtgcgtccaagtttttgtctgggtcaagatctcggtccagatctaggttcagaattttgatcccagtttgggtcttggtccgagtccaggttcgtatccggatccctatctaggtccaagtctgttttgggatcgggtcacagaattaggtccaggtccgggtctcagtttcggtctgggtacacgaccatgtccgggcatgagttccagttccagtttgggtttgaggctacttctgttttcggttctaggttgtggtccgggtcttggtcatggtcctagtctttatctagggtcctggtttggcgattcttgtttaggttctaattttgggtcccaggtcttggtctgggttcgggtttggttctttgtcttggttcttgtcctagtctgagtcctagatctagacaccgactactggtctgttcaaggcaccgttacctgaatcccgagttaggatctggatcactgtcatgggtttcggtattgttctggttcatgtatcaagtcccatttctgagtttgtgttcgggattgagactgggtgcggttctaggttccgacccaggttctatgtccctagtctggttccatgtttgggtctgaattcaggttcgggtcgggtctcgagtccaggtttgggttgggatccgagttcggctcccaattcaggtctaggtcggattagtccaggtccaggtcttgttacggttctagatctacgtcaaatttcagttatgcttccaagtccaaatcctagttccagtcccgattaacttccggttttgtttccaattttgggtaacaggttaagggttcaggtccacatttgggtttggaattgggttcaagtccttgtctgggtcttaaatccagacaccgactacgggttttgtcccagcccttgatctagatccggatcccaatctcgggtccaagtctggttccatttctggtgcccggtcacgagctgggtcctaggtccaagttcgcgtatgggtcggttactaggtctcgatcctagttctgtttcccaggtccctatccttattctgggtccaggtcccaattaatgtgtgttttagggtcccggtctatgttcgggtttgagtcctagtctgggttcgggtttaggtctctgtttgggttttgatctgggttcaggtttgggtttaggtcctggtcatggtcctagtcctagttcggttctagttccatttgtgattatgagttcgagtttggggttgagttcgggtcggagtttgagtccttgtctgagtttaggtttgggttcgcatttcagtctagggtttgatcaggctccgggtgtgggtttgcctcctgggtcttggtctaggttgggtctgtgtcccacgttccaataccgatctgtgtctggattcagttctgggtctaagtctggttcacatcctggtctcggttcgagtttggttctgtgtccgggtctagctttgggtctgattctaggtgtatgtttgagtttgggtccgagtctgtgtctgggtttgtgtacaggtctacaccccgatcgaggtctaggttcgggtctaggtccaagttcgggtcacgagtgccggtccaagtttgggtctgggtcaggatctcggtccagatctaggtctaacatttcaatcccagtttgggacttggtccgagtccaggttcgtatccggatccctatnnnnnnccaagtctgtgtttgggatcagttttgagatttaggtccaggtccgggtctcagttccggtctgggtacacgaccgtgttcggggccgatttccagtctcagttttggtttgaggcaaggtgtgtgttcggttctaggtctgggtccgggtcctggtctcggtcctagtctttttctagggtccgggtttggcgattcttgtttaggttctaatttcgtgttcgagtctcgagtctaggattcggttgggatccgggtcctggtccggttacagttctagatctatgtccaatttcagttattattccaagtctgagtcatagttccagtcccggtcaact

SEQ ID NO: 57632 - DNA, 1368 bp, Cannabis sativa
  modified_base (128)..(149): a, c, t, g, unknown or other
  modified_base (244)..(245): a, c, t, g, unknown or other
aaatttaaaaatattaaaaaaaaatttatcaaatgcatataaatttatactatagattgaaaagtgttcactacaaaaaacagttacaattagtaacaacttcttaatcacaacataaattttttgtnnnnnnnnnnnnnnnnnnnnnncaacaaaatgttacttgtgactaatacatagtatttaaatacaagttgtcacgaattatgttttagtcacattgttgtgactaaaaatacatttnntcacaacaaattgtaatttttttttactaatacatttagtcacaaaccttttagtcacaacatgaataatgttctagtcacaattttttttacttttattcacaatttttattatgacttaaaataaattttttatagtggtttgatgaattgtcaagagtgtaagttagtttttcagtactaacttgttactactctaagctctattgagttattgatttttttgttagttcaatccatattctacaaagttcattttcttcaatttctctctacttttctctatctaaagctaataaacctacccaaattatatataaaaatttgaatttaatataatgtaattcaaattatattcaattcttatattttgtgcttatatattcgtttggtagtaaatttacatacttttcgcaaagaaaatgcttaaaacctcaatttattattttaaaattaaaaagatgcttaaaacctcaattgatatgtggttcctgaaactcgttatatatagtggatacttgcaaatataggaattaatgtttgcacaaattaatgaagagctaataatagcttatatgattcaaacatgtcaaaaaaacaccccttaaatttatggtacttatgtttccttccctattttattgtaatttctttgtactctgctattttattaattcaaattaactataaattcactttttaaatctataaatataacttgatttccatttactaattataactgttttcattcactataaataagaactttttgtgtcaatactattcaacaataataaaaacttttaaatcaattatcatcatcatctccaataattttcaattaataaaatctctaaaaatgtctctaaatcacaaagcttcaataaaagttttgttggtgggacaaatattgatggtgatgatgatgataatgattgctagcacaacttccgaaccattcccaggcaaaaagtcatctcatcgtaaacattctcacaataaacattctcactttgacttcctcgatacccacaatgccattcgagcagaggttggcgttggcccaatgacgtggaataagaccttagttgcttatgcgagaaactatgcaaactcaatg

SEQ ID NO: 57633 - DNA, 1195 bp, Cannabis sativa
ctgaattcagcgctatgaaaatccaaactttgggcagagaatgagtgaggttcgaaggagagagagagaggagtgaagagtaaatgaattttttaggttttctttttattttcttttaatttttaattttttttcatttcaatcacatataacccaatccaaaatataatcagcccccatatccactacaagacaaataaccacttagggaaaaagacctatttaccctttagataaattaaaatgagtaaaaactcccaagggtaaactagttatttaccaaaccccgaaaattccaacacctccaatacccaaaaatgacaccccgaaaataatattctaaacatataaacgcaactctctaaaggcccaacgtcgctttccacaacttccgaacacaacacagaaattgaaatatttacgtaaataacataataacatataagaacttaaatatatttccacaatatgcattttataaatattaattaaatcccatacataaccttaattgaatagtaattcaaaatgataatcttaggcggtctttacaattatccccccgttaacaggatttcgtctccgaaatctaacctgaacaactctggatgttgagtcctcatatcagactctaattcccaagtggcttcctccactttactattcctccagggcaccttaaccaaagctatggttttacttcgaaagaccttttctttcctatccagaatttccactggttgctcgtcataagataggtccggttgtaactccaatgcctcataacttaggacatgcattggatcagacacgtactttctcaacatggaaacatggaatacattgtgcacagctgacaatgatggaggtaaggctaaccgataagccacctgtccaactttttcaagtattttaaaaggtcctatgaacctaggacttagcttacctttctttctaaagcgcccggttcctttcattggggacactcgtagaaagacagggtctccaggttggaatgtaacatctcggcgttttgggtctgcataacttttctgcctgctctgcgaagcaagcattcgaggtttaatcttatctattgcctcacttgtcttctggaccaactcagggcccaagtattttcgttctcctgtttcgtcccaatggataggggatcgacatttccttccatagagca

SEQ ID NO: 57634 - DNA, 1601 bp, Cannabis sativa
  modified_base (1412)..(1431): a, c, t, g, unknown or other
taacacagcttggtgtggagcatatgaacccggcatgactttttcgatatccatcttatctgctaaagtttttgggtgaagttttggttggtgggctgcttgatgatgatacttcactgtcaccattctgatatctgatgtttgctgctaggcatttcatggatgaagaagtaacagagcttatgtcagcaacttccccactagactttacatttcttatgttgttttcgccattatgccttctcttgctgccttgatttgctccatctaaaactgttttgttttcatctgacttatctggttgtgcacaaactccatcagagaagacaaaattaggtatgtttttcctttttacatggcaaacatggatcttcattccatagcatacagagatagctttaatctcaccttcaatgttagctgtcgtagacgagattcaacccaacctttccacactctcaaatcatcaccattttcagcattgatgtctatttggagataatttttatatgtttcgaaaaagggaaatctctcaaaaagtgtatcccacattgccttgttcgactccatagccttcaagtgaaattataaaaacacacaagttttcaagatcccacagtgaacatatatcaattccaccacaatataatcactaaaaatataatgatcataccacacagatatcactcccatgacataatttgtaaagtacttgatgagacattgtagcttgaattcattgaaggataagctggagtaattattggcattagatgatatctatctttattttaggatcccaaacttgaagcacaaacatccttcttcaatcatacaaagcataaccgggttgggccaccgctattgtacactctgaagtatcgggatactaacatgctaagcaatgcattatagcattaggatataattggaaaattcgagcaacaagcaaagcctatgccaccaagatcctgcaatctggccataattaaagaaaaaaactcgataactaaagtctagcataataaaagatcatactaggttataccaagatttaggaaggcattttgtgattcctatacctttcatagacaaaagtaagaattttaatcttgatatcctcaaccatatcatctatcgtaaccatttcttctttttggtcgtcttttccgtcaccagagagcttaaaatctgtttgtaaattagccaaaagattccaactttgatcagagtaactcggaagtgtgggtgacccgtaaatcttgaatttatcttgaatagcgttttggagctcaaagcattactagactagagagacacattatatatttaaaacaactaaataggttgttaagttcggtatacatagacaaagggcatcagtatcttaaaaagaaataataataataatnnnnnnnnnnnnnnnnnnnntaataataataataatgaggaggaggaggtcatggttacatattttttttttcataatcatgtatattatagttatttaagatgaattgtaaattttaaaaaaattttgagtagtttacaatgtcaaaaatatgatttacatattgtgttgcacatgtgaatgttttttc

SEQ ID NO: 57635 - DNA, 1199 bp, Cannabis sativa
aaataaaggaagagagaagaaagtaagagcctaaaattttatatatagaaaagataagtagatcctacacgatcctactaataaatcaacaaataacaagctacattcacccagacaatataaaatgtgaacctcacaagtttcgattgtgtaaatgctaaatagactggagttacagaagatgtagttggacgcagaaaaagactgtatcgtattcatttaagatatggagatctgttcaaaggagaaaagacacaatttttatgaatactaaacttattcaaaagagaaaaaaagaatggtaaatagtgcactttataaagaaatcaaagaaagagatattatggccatattatattgtctggaataacatttaaactgtaaaaccaaatatgataaattatataacaaaagaaagaagctggaagactaaggaaaattacacaatcttatatacattcccatttggccttgcagagaaacgaactacctccatgggtccacccataagcaactgtaaagtcagagtttgtttaagcaatattgcatttacatagaaaaatgatataaaattaagaaatatagtcttaacagattccaatattaaaatgcacacatgaaaagcagtcagaaggatagcttgcttttcttgacgctagccatcagggacctaaaaggcaagagcaacttgcatgttctgaataaacgcaaaaaaaaaaatgatagaatgatcagtgagaaaaattttcaaatgaaaagaataaagaaccaatcttaaataaacaagtgcacacacagatatcatacccatgaattcgcacagaaacaataatcttctccaacattacagatttggagactggggaatgtgaatgcaatcaaaacagttgtagatgataaaacttaaggtttaattgacggtaaacatgtagtcaaaactgatacatttaaaatggtatctcttcgtaataaccacatctttgattggacaaatatttgattttgataatttgtggcttgaatcaatgcttaattggtctatggacagtgcaccttagttcgagtcaaaaatggtgattgaaatcgtgaaattgcaaatagcgactgaaattagcgagatatataaaaaatttctctcaaagtgagtgtagctacgataaaccacaaagatcgtgagaaagacgattcagtatttctat

SEQ ID NO: 57636 - DNA, 2561 bp, Cannabis sativa
gatccaatatccacccaatgcagactagatcaaagagtggtattcggaaacccaaagcttaccttgcaacaagacatcccctacccgaatcactcttacctactgaaccaagaaacataaaagaagctcttaaaaattccaaatggcttgttgctatgacatctgaatttcaggctctcaagagacaagaaacttggacattagttccatacaatccatcaatgcatgtcattgataacaagtgggttcacagaataaagttgaatgctgatggttctttggacaaatacaagtcaaggttagttgcaaagcaaaaggatatcttatcttcaaactccgggaattgattatgaagatacatttagtccggttgtcaaaccaaccattgttcgcattgtcttaagcattgctgtcccatcaaattggccagtgaaacaactagatgtcagcaatgcttttctctatggtaaccttgaagaaacattgtttatgaaacaaccacaagggtttgtagatcctgaacatccaaatcacgtttgtcatcttcacaaggccttatacggactgaaacaagcccctcgggcatggaatggccgacttaaaagcaccttacttaagtggggttttcaagcctcaaggtctgacaacaacctattcatctatggctcgggcaactcattagtttacctattggtgtacgttgatgatatattgatcacaggaccgaattcttccctaatttctcagctcatatctgatctcaacagggaattttcactcaaggacatgggttctgtccattattttttggggttggagatatatagagatcatactggtatgtaccttactcaaagcaagtacataacagacattctaactcgtcttcacatggaaggagccaagtcatgtcgtaatcctacaagctctacaaccaaacttagtctcactgatggcgaacctctagaagatatcactctttacagaagtaccctgggggctttacaatatctcagccttacaagaaccgatgttgcatacattatcaataaacttagtcaatttcttcatgcacccacaacaagcattgggaagcatgtaagcggctgctacgatatctcaaagggacgataaccgattgtttatggctctcaccatcagattcgatgactcttcatggctatagtgacactgattgggcgagttgtctgatgatcaacgttccacgggaggctatgtcatgttcttgggcaataatcttgtatcttggtccgccaaaaagcagcaagtggttgctcgttcctatactgaaagtgaattttgagcattagctaatgctgctactgaaattaagtggatcacttccctactgtctgagctacagatctcaattaatcaaccacctgttctatgggttgataatcaaagtccgagatcaaatactttcacgacaacgttcagttcgttatgtaccttcattagatcaagtagccgatgctttgacaaaaccattgtctacagatagatttttgtacttaaagaacaaacttcacttagctacttccaagtttcgtttgagaggggatataaacctattaactacttagttagttaaacggttctgttagttagtagttaaatgtagtttgttgtaaaatctgttaggcatttctttgtatcttgatatgtactttacactataaataaagaggtaaaagccaaagtgcaacatcacttgctgcgaatcctgtgtttcatgcccgaagcaaacacattgaaattgatctacattttgtccgagatcaaatactttcagttcgttatgtaccttcattagatcaagtagccgatgctttgacaaaaccattgtctacagatagattttcgtacttaaagaacgaacttcacttagctacttccaagtttcgtttgagaggggatataaacctattaactaattagttagttaaacagttatgttagttagtacttaaatgtagtgtgttataaaatctgttaggcatttctttgtatcttgatttgtactttacactataaataaagaggtaaaagccaactgttgagttgagctttcttggcattattttctctctttctctttactttccctctgtttttctggtttgtactatctggtatgtaccattcaacaagctgtcattgcaaagctttacagtatccagtaagctcatgaatctggagacttatatggaacctagacacatgattcatacttaaagtaattattaaaaaagattcacattgatattcttggaccatgtgatgggcgtcacgggcctaacccattagggaatttgctaggtgccatgcgtatcctatgcagaaatgcggaaaactactacaaaaaaaattgacttttaatcacaacaatagttgtgatagttgactaaaaataaaaaatgttgtgaccaaaagttttagtcacaattttttttatgacgagattgtgactaaaaagttcgtgagtaaaaattttagtcacaataaatataaaattgtgactaaaagtcacttttagt

SEQ ID NO: 57637 - DNA, 1564 bp, Cannabis sativa
  modified_base (1225)..(1229): a, c, t, g, unknown or other
ttatatattaattaaaattcactttaatggacataacttgtaattaattatataggtataatattttaccctacaaagattttattatatttatataattaattaggataatatataatattaaattcacttaatttgccccacgtggagttatgatgatttaatttaatagtgttatcacaaattttaatttagataaatttatttcctcattttcctaaataaaatattttattaaatctatcgtaaagttcatgtaattttattagatttaaaatttaacccacagaaaattttagatttagtaaaatttttattttcatcatgtttctacattgataaaacatgaattcattaaagcctcaatttttataacatctaaatttgtaatcctattcttacaactatttcatccaactctaaatacgctgaaatcactagcaaaatttttgagcttaggagtgacaatttcaaaatctggaaggaacgagttcttctccaccttgcttgcattgacacggactatggaataaggaaagccaaaccagctgttgtcactgaaactagcactgctgctgagattgcactacgtgaaaagtgagaacaatccaatcgtctctgcatcatgttcatcatgtctaaaattcttttgggaatgtgtgggtcggcggacacacctaaaaaggtgaaagattttatcaaagtgatggatgagcaatttgacacttcggataaatctttattcaacaacctcatccaagagttctcatccacaaaactcaccggtgttaaaggagtttgagaacacatttcaaagatgagggatatcactgctcatttgaagaagcttgatgttatcattcttgataccttcctggttcattacattcttcacaatcttcctccataatatgggcatttcaaaattttctacaacacacataaggaaaaatggagcatcaatgaattgatgaccatgtgtgcttaagaggaagctatgctcctacaagagcaaggagaaagtgctcacctgaccactcaacccaagaaatgcaaactattcaagaagaataagggaaaaaagcacatggctccccaggctgccataaagaagaaatgcaaaccatcaaatgtttcttttgtaaacaaaatggacatgcaaaaaaggagtgcgaccagttcaagaaatggatggacggtaaaggtaatctaatttccttagtannnnntgaatctaatatggctaatgttaatcttaacacatggtgaattgactccgattcaacaattcacatacaaattccttgcaggatattcaaaatctaaggaagctagtggcaagtgagcaaaacatcttatttggaaacaagatgggctcacgagtggaagctattggaacatgcaatttaattttaagtaatggttttattttggaattagaaatgacttctatgtaccaagtttctctagaaacttgatttcagtttcaagacttatactctttggtttatcctttacatttttagacaaatattttaaattatataataaatctgaatgtgtt

SEQ ID NO: 57638 - DNA, 1210 bp, Cannabis sativa
gatggtttctagctaccaccgctaagcacatactttctgatcccacccttacatcacaattcaattttatccaatcttgaggtggcggcttccaggtccccctcaaggatggtgtagggcaaggtaagaaagtaacatgaagctctacataagaattataaatctggtcaatacatttcaaaacatccggatgagagttgttatgtataaaatcattccgcactttccagatggtttcgacaacaatcgaagcattaggtatcagtgatatctaacactaccgaagtgacacgtatatatatcatgtcatagttattaaattaaattacgtgagacttgatacttaattttactaataacgatatgacattttagagggtgttagacactactagtatttggcactattggtgtttagcaccacctaaaagtgatagataaatgctaaaaggcaccagtagtacctacacattcttatatgtgtcaatatcgctattggtccaactaagtatcaggtccatatagtttaatataataatttttagagagtatcgctagccaatcgcaagatgacaagtctagaggtactaagtacaactggtgtctaataacaatactcagaagtgataccttatgattggttagtgatattctataaaagtaattacaataaattatataagattcgatacgtatttaattacactaataacgatataactccttaaaaagtactaaacactaccgatacattttaagatttctcttaattaatatgtatatgattatatagacacatgattcacactattgctagggcttactaatataattaatacttatatagagcatatggccattcaagagaatattttatagatatgtatatttaatgtgtaaaggatgaattagttgtacggattggcctgtgtggtagtaaatatttagatataatttccaatttttcattaattaagtttgttgagaaaataaagtaacaaaactaactactatttaaaaaaagattcagtctttcagaaatgtgtatctacttggttggtgggtactatataatatacatatcacatatatatttagggttattttatttatagaaaattttatttacactccaaaaagttttaaagacactttattttaataatttttattttatttaaaattaatatctttaattatactaattttt

SEQ ID NO: 57639 - DNA, 918 bp, Cannabis sativa
gcttaatggaactatattattatatagtatgcatgtgttgtctttttagctgtgctctgataggttggcgcggtatagtcacgaaatctgaaatttatttgaaaataattgagtatgaaatgactaaattacccttgtgagggtgtatgtgagtatttaagacctaggggcaaaatggtcttttaaccatatttaatttacatttagtgaaaatttatttttgaggaataaaggatgatttttctggttgcatctctctctcaccctaaccctctcttgaaaattcttgaagaattggtgtgaattgcttgaaatttgttgttgattggagctttggagttgagaattcttgagcttggagttgaggtagattcttgctaagtttatgtgaaattattgattggattcttgttgaaattgttatggtaaaaacatgcttgggttgtttgatcttggttatgaatgttttgtgaaatggatgttaaatcttgataatttgagtatgttaatctcttgattttagttgttgaacatggattttgattatagggtattttctagtattgaatcatgtgtttttgagatattttcatggctggaaatggtttgagttgttggaaatgaactcttgttcaagagcttaatattgccatgattgtgcatgaattttgcgatttttatgcaatctgaattggggatttattgttggattttaaagcatgattatatgtttaaaatccctagtgtttgctagcaactctggtttatgatttgggagttttagttttgaatttgtatggctttggttgaagtttaagctaaaaattcgtggaaagcttgctggtttttgggttctgcacccagatgtcgcggcatgcactggagcatgccgcagcccgcccctgttggttgaacttg

SEQ ID NO: 57640 - DNA, 2067 bp, Cannabis sativa
gttacattagaaaaacaagagaaaaatgtagaatttttgtaattttttctcctacattaatttttttataaatttgtatggtcacaataattaaactaacgctaatatcatcaaaatatatttaaaatcttgtataatgacaataattaaactaacactaatatcatctaaatatatttaaaaatctatatagtaacaataattaggttaacgctaataatcatctaaatatatttataaatctatatagtaacaataaattgagatatatacacactcattaacaaggcaactgttgtcgctccgcttcggctttcacataatgaatcaaccgatcatacataatatttatctcgtcatttgtatatgaaatggagaacttatcctgtaaaggtatatattaattagcaaagactatatattatcatatgctatcacaactagaaaagggtctttctcttcggtttttaggtcagtttgtcttcagtttttataaaaattcgctaccaaagttatttgaggtgatggcgtatgtttaaaaatagcgaagacgtaagggggccctatgtataatatttttgttaaataaattgaaacaaaatatcaataaagtgatcacttttgtgtaaattaatttatttaaaatatagagataatagtgtgtacataatccatgcatttattaacgaacccaaaggtgagttggtatttagccgagtttcatacatacctgtggtgataaatgtgtgacaattgtaagattttttgtgtgaattatatgttagtctaaagattacatcttgtttgacataatttattgtcaatatttgatcgctacaataagattaccacttacaattaatattactatctaaagagttgatattaatgatgtgcttggtatcttgagatgggattaaccattatttgaatttattgttttatttttttaagagcatgtaaatttattaattgtattgttctttttcagttgttgcttttgtatatgctaaccttaattcggttccagtccttaatggtagtaactttaaagactggaaggagaatattttccttgttcttggctgcatggatcttgaccttaccttaaggatgaatcggccggcttctcttacggatgtcagtacctccgagcaaaggaagatttataagaagtgagatcgttcaaatcccgtgagtcttatgatcattaagtgcggtatacctgaggcttttaggggtgcgatgtctgaggaggtcattggaggtcaccgatgccacaacttttcttgctgaaattgagaaacgctttgcaaaaagtaatcaagcgaaaactagtatcttttagaggaacttagggctaggaaaatataagggagtatattatggaaatgtgtcaccttgcttcaaagttaaaggcacttatgcttaagcatttggatgacttgctttgtgcatttagtgcttatctctcttcctccacaattcagtcaattcaaggtcagttacaactttcaaagggagaagtggactcttaatgagcttattttattttgtgttcaagaggaagaaagattgaaataagagaagacttaaagtgctcatttggcaagaacctctaaagataagggaaagcaaagaaagaatgaggttgctaaggataagggtcatgtacataagaaacaaattcaagccaacaacgataatggttgtttctattacaacatgaggacatgtgaagaaggaatgtgctaagtacattgatggcgagataagaaaggtatatttcttactttggtctattttgaggtaaatttagctttagtacccagaaacacttggtagttagattttggtgctactactaacatcagtgtttcaatgtagggtgcctgagttaccaaaagccaagtgatgttgaaagaaggatttatgtgagaaatggaaagttagtgaatgttgaagcaataagatattttaggttgttgttaagtactggttactatttggacttaatagatacttttgttgtaccataatttcggtagaatttggtttttatttctt

SEQ ID NO: 57641 - DNA, 1361 bp, Cannabis sativa
  modified_base (26)..(36): a, c, t, g, unknown or other
tattttcactttttcaattttaaaannnnnnnnnnnattaaaaaagtgttaccaaacggtacctatattacgaaaaaaggtaccgaaaaatatacacaattctatataattttataaatatttacaaataatctcataatcacattatataataaaaataaacataaatgtttacgattttaacatgttgattattttcaattcatttttttttaaaaaatgcataaagctaaatataaaaatatacaagtcaatatttatattttgatgtattactaaaataatatatttactaaaatttaatacaaagttatatatacaaatatatttaaaaattttgtttatgttttataaacaacgtatatgcatgtttattaaatatttgattattattaatatttataatgctattattaatttaatatgtttattatgataatgtttcaatagaatagaatcaatattatttatgcattaaaagtttataaataagtttaaaaataaaatatttatgtttattttgttttaagaaacaaaactataaccaaatgtgaaattatatataaatattatgtttatattttatattgataatgtttatatattattaatctaatatattttatatatagctttataaacaaaatgtgtatgtttattttattttactttttttattgtaagaaaaaatatatatgtttattgtttatttatatagattgtatagaaaattaaaattatgtttatttatctaatataaaatgtataattaaatgtaaataaattattttgtattatatagtgtaataaaactatataatgtataaaaaactataaatttctcaatatagcaggttgggataatgaagaatttaaggttttatttattttttactaaaatatgatttaagtttggtcattttttatatttcttttatttttaatataaattattttatgatatttgttatgtcgtgtataatttaatttctaaaactcatatttaatttttagataaattgtttactaaattttttttatcaagaaattgactttttcatcgagaaattgattttttttactaagaaactaattttttcattagaaaactagtttttattttatagaagtaaaatttatatatgagtttttaaattttactcattcagtgatgatcggtcaaagcgaaattcacccaaaatctttcattaagaaactaattttttaatcaagaaattggtttcttcatcaagaaattaattttttcatcaataaactaaattttttcgtcaataaactaattttgatcatatagaattgaaatttatatacgatttttaaagttttttatgctatttttt

SEQ ID NO: 57642 - DNA, 1405 bp, Cannabis sativa
gcaaaccgccccgatttccgaaatgcaatgagaaacaggaacacaggtaccactgaaggcacctccttcacatgtaagtccttcacagcagtctttcaattcaatgtgagcacaatattcaccaggtatgtaacacctatttggagttggattcataaaaatggctacatccattattcgaccaaggcacccaacaaccatagtggtcatcatcatcactacaattattgacttcattatattatatataatatatatgaaagatatatagaaaagaaagagattattagaactatatgtgtttgtgtaagagagaaagaaagtatgtatgtagtagtgtggaggagaagagaagccacaagtcttacttttataccaccaaaattgattattaaattatttaattattcatatatatataggtattatgataaaattagttacatttttatatttattcctgctataaattattttcaaaataattacattaaaaaattttaaaaaattaagcttagaatattattttgtattgttttaaaaaataaaatctaattttacaaaacataggccaaaaaaaaaaaaatgaaaatggattatatatgatattttatttatttgtgtatttatgttgttatataaatatgtgagattaaatacattaagtatatatttattttatataaaatgtggttatttaatgaaatctttagtttaacgatgatttttaaatttttgcgttaactttaacagaatatcctattacttaataaaatattatttattaattttataatattattatatatttaaaaaataaaattatatagatattttatataaagaattttcaatttaaatttaaatatttttaattatatttttaaatttattagtttaactttaaattaaaataaaatgaaaaattatgtagatattttatataaaaaaaatttaaatttgaaatatcataaatatttttaaccatatttttaactttattattattatttattttatattttaaattgaaatggttgtaataatgaattgattgatttatgttttagttatggtaaaccgattcacacattattttttgtaaagtttgcgaataaaaaaacttttatatctagtttacaaatccaatatatatagacatacccaaatttggttatgtgagttttgattaagaatataataaatcacaatatatgcattattggatactttacctaattaattttttttaaaaaaatttaaaaaatacgtatatatataatcacatttaaatgacacatcaatgtatcaatagttaaaaaaatattttaaagatcaaaatctcaaactctatttcaaaaattataaaaaaaaatacattatctaattaaaaaaaattaaacat

SEQ ID NO: 57643 - DNA, 1153 bp, Cannabis sativa
aaaaacaatatagtgcaataacatattttttttttttaaaagtgtttagttttaataaacatgttagttgttacaatatagaagtgtttatattttaatttttttaaagatatatatttttaaataataaatatatattgacgttattgactaaacgtacacactttataaatttagctgtataattttcttgtaaattaatttttaataaaataaatatttatgttttcaaaaaaaaaaaaataaaaataaatatttatgtgaaaaataataaatatatatgtttattattaaccagtttaagaattagttagaaatacatatatcaattttctatgatcaaataaataaatggttagcttcaattaatttgaattttgaataataatataaatattatacaattattatatgattttatttatctcttttgaatatatattatatatatggtaagttgtattaataatagacataacacttactaaaaaaaaatagatataacacattatttataataatagtacgtattttatattagattatgtacgtagataagtatttttgtaaattatttaaaattactttaaaataaataaaaaatatctattacaaatacaatatattatcacatatatattaaataagatataatttctgtaagagaaatactaagccacatcttaagaagctagctaggtgccaatcaccataaaaaggtgacaaacccctatatatttgtacaatttaatagtctcacattttttttatttaataaataatataataaatcgataatcaattataatgtatcacattgatatggtgttaagtaggaggagtggcaaaacgtgtcaacgtgtcgtgttcgtgtcatatttcatgtcagccgcttttatatttcgtgtcagatgtgttgacccgttttttgactcatgtctaattttctcaaccctaactcgacccgtaaagaatcgtgtttgtgttcgtctcaacttattgcgacccgttttgccattattaaagctggagtcataaagaaaaattatagatttaaattccattaaaaaaattatatacaattatatattatataatttgttatatataataaaaattaaaatttttaaaatattttcaatttcatgttaaa

SEQ ID NO: 57644 - DNA, 1107 bp, Cannabis sativa
tatttttgtaaatttccctagaatttttctataattttctctttatttaacatgccatataagtacaaagtacaaacaatgtgggtgagttgagttgaattcccggcccattcctcgaccactcaatattgtccttggatataagaacagtacgctcaattccaataaaatgggcctactcatctacatatatttctattgggccatggattttatttacgaaaatttgcataagccacccattatcccatctaatttacaattttaacacaaactcatttactctattgtttgtttttgtaaaagttttataacgtttttattggaataatattctccttttcctttatattttttccaccctcttttctctcttttctcttaaacttcaaaaataatttttaatcactttattattcggatgagcctaaaaaaatattattgtggcctattgttcaataggaacatttcaagatatggggtgcatatgtttttgctatttttaggcaaaaaaaaaaaatttggttactaatacagtgattagttactgttttttaatttttttaaaaaaatttagttaatattcattttagaattttgttaattgaattatattatattataccataatatattagcttttaaaataacataaaggtatataaaaataatagttgattatattacaagacaactcattagtttcgaaaataatttttaaagttacataaatatattttaaattataatttatcataatataacttaaaaataaccaattaattactaagatatgtataaaaataaattttagaggtaactaaaatacatcttaaattatataatatataaaaaaaaaaaaaagctttttatataaaggtaactaattggtttcttctgtaatcaaaaaattactttttaaaaacgccaaaaattaaaaaaactaaaaaatgttaaaaaatatgagatgctttaaatttggttattgtaaattgaatgaaaaaaaatatatattattgtacacttctcttttaaaattcggcaaatatatgtacactgttatatatatcatcatgcatggagcaaacgtcaaaaaaaaaaaaaaaa

SEQ ID NO: 57645 - DNA, 800 bp, Cannabis sativa
  modified_base (27)..(40): a, c, t, g, unknown or other
taggatgttaatcaaacatacttggtnnnnnnnnnnnnnnctggtaaaataattccaacaacagcctgccttggagtttttccttccatgatgccttattaaatcctggcagatcataatgctgtgagcaataaacctgccaaacacaaatccctcctgattttgtgctgcaagctcaggcaagatgactttgaatcaggaacagattagcttagttgcaactttgtagataatattacagcatgcaataggtctgaaatcactaactgaattaggacacttacatttgggaatgagtgtttaaatagtagtgttattaatttttgagagtatgacctgaatgcaagaaagagagcatagcctcacaaatgttatcaccaattaaatcccagttgtcttggaaaaagcagctagtaaatccatctggcccaggagccttgattccaggaattgcaaaaacagccttcttgacttcatccttagaatactccttcatgaagaattctgcctgagtcttggaaacaagaggaccaagtttcataacccttgccttaaccttgcacctatcttccattttaaaaccaagcaagctgtaataaaatgaaaggaggcctcagaaatttctcctggcttatttgttcttactctcttctggtcttctatagatagaatgctatttgctcttctcctttctttgatactagcatgaaaaatagttgtattgtcatctccatttttgacccaacttatcttggctttttgatacagaaatgagctgagacccttcaaaagctgaccat

SEQ ID NO: 57646 - DNA, 1166 bp, Cannabis sativa
ttacaggaaaaatgtaaccattgaatagtcaccctatttcataatactctcccttggatgtcaataattataataattaccttattaaaaaaatcttgcccgaaaacctaataggaaaaaattttgaccaaggaaaaaagagtgcagtatgaattaactctcccttattcaggcattcgttgagattttctaatcaacaaattccaatcttgtgaaccatcttctcaaataccgatgttagtggtgcgtttgtgaataagtctagaagattgacacttttaatatgtttgacaccaatatgcattctcttgaaatgtattatgaagaatttggtgaaatgtattttaattctatctccttcaatgtactatccttttagttgagcgatgcaagcagtataattatcttcatagagaattgctggtattgatacttttttattaagtgtaattcatatgtttcttaaatatgttatgtcatgatctcactcccaaatattttctacttgctacttaaagtgcaagtatgtgagcatgatttaaagttgcctcagtaaaaactttgttaagaaaatctagtgaacaaaacctgagctaaggaaaaaagagtacaacgtgaatatgtctccggtctccccctcatgcacatatgatcaataattatttttatgataacatacctcataagattattgtatcacttttaaaatatcattgtatgttatgattatatatttactatactcttctagagtatgtgtggagttctaattatgaatgaggggttcccggagcatcaatatgtatccaactaattgaattattcatgcatgtgtatatacaatactgctcatacaaaaatttaaaattttaagtaatatgaatataacacaatattaatgataatataaatttttatttgcgataatgatgttacttcaagaccatttatttgcttcattcttgttgtataattttaatttccatatcaaataatcatatatctataattcttgatgcatataaagtattaaatttttcaatatacaaaaagaattaaaagtttttcttctatcatttataatataataaaaaatacttcaagtgtctattacaatgtataatttatgaatttatattaaactatttttcaaataataatttact

SEQ ID NO: 57647 - DNA, 1229 bp, Cannabis sativa
aaaaaaaaaaaaaacaaatgcagcaacccttttcacaacacttacagcaattactttagcaaccctgactaacaacatatgtaaaaaaattgcagaaagccttttcacaacacttacagcaactgctttagcaaccctgactaacaaccatttgtaaaaaaaaaaaaattaaatgcagaaacccttttcacaataattacagcaactatatgtacaaagaacaaagaaagaaattcagcaaccttgataccaatacttccaacaacagtatttttttttttaaaaaaaaaaaacaaaagattgaatacaacaactattttgacaacacctacagaaacacttccaacaaccctatgtaaatagaaataattataaaatacagtaatcaatttagcaactcttgcagtattacttatagcaactttctaataattgattacagcaaaccttatagcaatatgtgcagaaacactatagcaactatatatttacaactttaacatcaactcatatgcacaaaatataacaaaaacaattcattaagtgaaacaatcaaattgaaccgtgtgaaccatattcaaagttaagaacaagatgaaaaatgaacaaagtttaacacccaaattcatatttactcataatgttaataaaagagaattttaagctttcaattacctcaattagaatttagtatggctgtaataatccttcaacttaaatttaatgacctctactgatattatttgaagggatagaaagttttttttccaatagatctaagttttcctcaaattgttgaaattcttgccaactttaatctaatcgaagaaaaattagaaggttgaacatttgattctttggatttgtcgagagagaaagatagcctattttaaattcagtagctccggcaataaatattaaaatcttgccggagccaaagagatgatgtcgtgtgaattgtgaagctttagaatagcaggtattttggaatagcagatttttttctaaaatagcaagttttttttaagaaagtgtcttatatttacaaataaaatatcatttaactgtataaatagaataaatttttgtacacggtatatttgaaaaatatttcagcgacccgtgtacatctaacaacagccctgttttttttttttttttttttgaaatcaatgagaaaataagtgcatgtttgacatcataattaaatttttttttttatttttaaa

SEQ ID NO: 57648 - DNA, 962 bp, Cannabis sativa
tttttttaaactttttttttttttgtattttcttttattaaatacaattttttttattaagaaaaaaattccttttttttgaacataaacatttttttttgtatttttttttattaaatgcaaatttcttttattaagaaaaagaaatcttttttttttcgtattttttttattaaacacaaatttcttttattaagtaaaaaaaatacaaaattcttttttttttaatctaaaattttatttagtgtttattttttattaaatacatattttttttattgagcaaaaaaaatacaattttttttgttataccctttaagtgtcgatttataaccgagaccaaaggatcctttagtctcgattataaaccgacactaatactcaatctgtatatatatgtctatatttttaacttcttttggtctcggttatacttttagtgtcggtctactaactgagaccaaagagttggggtggtttttaatgtcaattttttaaaaaaggcgtccatcaaaccgacactaaaagtctattttgtagtagtgccatgatattaaacctaaacaacataaagtatatagagaaagataaataagtaaataagtgcacataaaagactaacaataaacatatagaaccaatcaaaatgtaactgccaacccacatcacaaacacaaaacaaaaagaaaactgccacaacgtggcaaaaacagttaccatactcactaaaaacactaacaaataaaaaatatttgaaaaaatgattaaaaaaaaagatcaaaaacaaaaaagtaaaaaatcaaaatacaaaaatcataagaaaaaaattaaagataacaaatactattatactataaagaaaatctattatgcaaaaaaattaaaaaaaaccggtttcattaaaaaatcattaataaaatctgaaatgcatgcaatttataaaaactaaaacaaagaacaaa

SEQ ID NO: 57649 - DNA, 1457 bp, Cannabis sativa
gctatacctatacatgataaaaaataaaatttaaaacttgcatcaattgttacaattatatgtattaagagaatatgacccttaatttatattgataagaagtaataacatgcacataaataaacgcatgctacatacacaatttatacaccaaaatcttaactcaaagaatgtggtactttactatttttttacaaaagttgaccacatttaaaataaatacgatttgttatagcaaagtaatatgtcatggaacatatgaatgaagaaaaatattacaacaaatgggagctaagattctcaaatatattactattctaatgttgcaaatttaggtggcgtttggtgataaaataaaaatagagtgggaatggtaataggaagagtataaataaatttttattcttttgattgataaagaccatggaataagaattactatgtttattattgtatggaatggaatagaacttttaatattttcaccaaatttggttataaaagtaaatcagaataaataatattatttggtatttattttatttggcattacaatagtgctactcccaaacattattttgtatttattttatttagcatatgcactttgtcaattaacaccaatagcataaggaaaaaaagaaaaatacaagcttaaatgttgttcactattatttgaatttaaaacaaggtgcttttttggggattaattgtgataaagatcaaagaacagatttttatagaaaaagaatgaatacaaaccattacaacaatagtttaaattggaagtggaacaacctccaatatataaaaatcttatcttaccaagagcaaatttttaaaaaactcacttctagaaaaaaattaaagatcataaacatcaacaataaaatttttaaaaacaagacaattgagatgtgtgtacccattaatgattgatgaaactagtaatgaatattgttttagcacttttaatttgcaaactatgttagagaacccattgcagccgagactttcttatgcgaccatgaacttgatttctatatagaccgaatactacccatggtgcaaataaaaagttaaaactttatctccgtaaaaaggtagagatgtgaaaagaaactttatcaatgctactgagtaaagtatccaatatattacatttgaataatatattcaattgtatcaatatatacatatctatatatatatcacatggaagaaatactataaattaattacatacaattaaaatttgtatatatacaaatagatcaaataatcaaaaacattagaagaatatatatcatcatcataatcatcattacaagatttgagacaagataaaaaagaattgagaaatttgcggctaaacccccttatgtttatatttgtaaacacttaacccccttatgttattttttggtggtaatactatcttatgtttacttctgttg

SEQ ID NO: 57650 - DNA, 2398 bp, Cannabis sativa
agtggtacttaatccaattccctgtgggatcgacctcacctgtgtgagatttactacttgattgcgtatacttgcgtagcgtttaaaaatatagcaacaagaatccaaccccaactcaactcaattcataaagaaataaaaacttataattacatgaaaacctaattcataaacttgaaaattttaaagggaaaagaacttaacttagcttggctatcaaagaccttgatttctaagttaaaatcctccaagtacagatgaaaataaaaaaaaaaaaaattgggctaacagagagagcaagagagatagatatatgttttcttgatttttctatttaatacttaataatctaattgattttatctaaccttaactttatctcaaaaaagactaaagaaatactagaaattccacaaacactcactaaccaacaaaaacaagtaaatgactaatttgcccctttacttaaccataaagaaatctaaatacttaggggtaaaatagtccaaaaccataacccgactaaatctgacattctaaatgtctaactatactacctcgctaattaaagatactctaccgtaaatatgtgactcaaattggccaaattatcgcattctactgttactaagcaaaaacaatatgaaaaatataaaatttcatatataacatacataatacacctagaattcaatatatctccattaatacaaaaaaaataattatttaaagcttattttttataagaagtcctaattatctgctaattcacatataaagctaagcgatcattataattatcccctattttatccttgaaatctaacatgaacaactctggatactgagccttcatattggactctaactcttaggtggcttcctccaccttaattactgtttctctaaagtaccttgaccattgttatggttttgtttcgaagaactttgtcattcctatcaaggatctgtactggtagctagatggtaagctaccaatcctactttctcaagaatcttagaaggccttgtaaatatagggcatagcttgcctttttcccaaaatgcttaacccatttcgttggagatacccgtaggacgacatgatctcccacctaaaattctatatctctgtgcttcagatctgcataacttttctgcctgctttgagaagcaatcatttatccttgatcttctctataaatcattggtccgttgaactgattccggacctatgtattttctctgtctgatttcatcccaataaattggagatctacatttcctgccacaacatctcatagggaggcatccctattgtactctgatagctattgttgtaagaaaactctatcaatggtagatacttactccagcagccttcaaaatccatcacatacatatcctttaaaatctgaattatactctcagactatccatctgtctgaggatgaaaagttgtgctgaacatcagctttgtacccatggctcgttggagacttatccaaaagatggaagttaactttagatctctatttgaaacaatggacttaagagctccaggaagtcgtactatttcttttacatagagttttacatagtgatctgctgaatacattgtttttactagcagaaaatgtcttgatttggtaaaccgacccacaattatccatatggaatcgaacatacccacggtcataggtaatccaaccacaaaatctatggtgacatcctcccatttccactcaagaagtgtcaaaggctgcaacaaccctgcaggtctttgatgtttagtcttaatctactgacaagtcaagcatctagtcacatattccaccacatcatttttcatactgcaccaccaatggtagggttttaaatcttgatacatcttagtggtactaagatgtaatgaatagggagtggtatgagcttcatcaagaatctcatttctaagtttggtactactcgaaacgcaaactcaggttttacaaagtaacattttgttacccaacacagtgaattctttagcttgaccagctaagaatccatttcggatcttcaccaattctggatctaccaattgagcatttctaattctctctaacaagtctgattgtagtgtcaaattttaagtctaccaaccacaaattcaatacttgatttgaccatatccactgctaattaagaggaaatcataatcgtgttggaaacctccaggccctttcttgcttagggtatccaccaccacattggccatctcgagatgataaagaatttcataatcgtagtctttaactaactctaaccatcgcctctatttcatattcaaatctttctgagtaaagaaaaattaaaggctcttatgattgatatagatttcacacttttctccgta

SEQ ID NO: 57651 - DNA, 1036 bp, Cannabis sativa
taatagatgttcattcattaacaatttaacatcatagaatctcgaaagataagtattattgtaagtcttttattcttagtaacgatcaccccaattgtgactgctaagagtagggctttcaaagtatgaaacactggtggaagcttataagatagaatggccttgactctcacctaaacgggacaacgccggattctcatcttgattgaataaaagattgctaaaatagtatccattttagatgagttgacaactctattaactagagatatatttgactctgcctaaacgagacacttatattgttgagttgaaaaccttggaaattatttaggatacgtatattttgtattttcacatagcattcctacttggtaaatgcttaataatttttgaatgtgtatgattttgtattgaaccttatttgatttcgatttattgatatttgtagtacctaatatgactatgaacaacccgattgtgtcattattgattgacaacaagctctctgaagctaactttatctaatagaaagagaacattaatgttgctctcataggtgaaaactcccagtttgtgttaactaaataagctcctgagcaaccaggtcagaatgcaactaaggctgttaagaaaaagttcgagcgttggcagaatgctaacaataaagctcaatactttatgttgtctagcatggttgataccttgaagacaaggtttgcaaacactctcatgactgcagaaatcatgaactagttaattgaattgtttgggatggcgtcagatcaagctcgttttgaggcgaccaagaactttatcaatacatgaatgaaacctcatcagaacgtgcatgatcacctacttctgatggctagttacttccaggaacctgagaatcaaggagctatcattgatcaggaaactcaagtgattttgatcttgaatagttcaactccagcttttctgccctttactgtaaattatgtcatgaacaagtttgtaatatccgctaactccgaaagggtatttttgtaat

SEQ ID NO: 57652 - DNA, 1075 bp, Cannabis sativa
taaaataatttccaacaagactatactaaatcaaacaaggactggttgatttagggaaggtcagaacaaaatatcgataatcatgttgattttgggactagggttttaaccttaaataagttcaagcattgcttgaacttgatcaatctcagaagttagtatacagagattcttggaacaccaaccaatgatggatgcattatttcttcatcatcttcattcttttaattcgaagtaactaggtagaatttgtggtatagttcctccacatgaaaaggtctccacaaacgtcatttctagaaagttgttcactcgcagaagccagtccctgaaggagtcttgtggaatgatagtcaggtcaggaagggtattcccagatggccatcatgtccacttcgagtctagccttcaggatagctagcttcgttgcgggatagaggtgtagttggctagttgtccctcctagaatggtagtcctatccggaagcatatcaatgagtgtccttgttctgtgggtccgaaagcttctatgtttccaaaggctctaatacttaagttaacatggagactatgctcaaagaggagttggttaagttagttacttctaactaatttaacaacctcatttcttgtagccactaactttaggatcttgatcctaaggttataaatactaccttgacttgttattttcaagacacgagattgagagctcagttcagattggaattgagagtttgatagagaaaagattgagaggtagggagagaggtacagaagagaaaagaaaagagaagagagattgggtttgggttttgtaaggagaatcttctgcgagaatcttctgcatatgtatctatgtcaatattagttcaatattagttagtaatattagttagttgatcttaggtcaatagatcttaatcctgatatggttaggtttgatctcaactgtattatttatgttcttggagtttttcgttaaagctgtctaatggattggcctaatacttacatcttgtgaacatggtagtgcaattgagtgggagctctaatcatagatatgaaatctata

SEQ ID NO: 57653 - DNA, 2572 bp, Cannabis sativa
  modified_base (32)..(42): a, c, t, g, unknown or other
atatatataaaaaaatctttaaacataaaaannnnnnnnnnnttttacaaaaaatagtgtcttatgtaattatcctataaaataaagggagaatacggaagattggtctgcaccgcaaagctgagcatttagaatagggtcgagagagaactagtttgattcattttctacctaaggaagcataaaagtagctatgaactcatactaaatggatttaatattgtaattattaatggttaaactatattatatataccctttatttaaaagtaatataatatatatacaaaaaatggtttataattttttaaattagtgattatattaacatatatttgacttaatattaaattataatataaagtcataataattagaagtgacattttcttctgccatttcttctaccatttgaaaaaaaaaaaaaaaaactaatgaaagccacttaagtactaaatggaactaggtaatgccattaatgtgtgtatcggcaaacttaattgtagaccatagaattgttagttttacgcattaactgactatatagctagctctcaatttaatattggtatttattgatagataatattaagatcatgtcatctcacaaaatattatagcactctagtctctactctagcaatgctcttcttatttgccccttaaaaaatgtcttaaacaatattagtaggaatgcatgaaaatgatggcacactattagtattagtggcatatttatgttgaggcaacttcaaaacaagtcaagatcgtatatttgtattttctgtgcaacttttcggcttagcatgtgaggatgaataagccggcaactcctcttaaacaagtgggcttattatttatttgttgtctctcgtcacaccaatatatctatctattcttttctctcatatattttttggtccgttcactaaggataagcaaatattttctacagccaatggaaaattgagtgctccttataacactagtgtctcaatcgatcttccccaattattccaatgtaatttagcatacttgaagatgatgccctaactagctagtctgtcttatgttttgggaaattgttggagggtatactacaagatagagcatctcgctcaaagggtgtttgcatgtgtttttagtttttatttttcaaaattatgatttcaaaagtaagaattgaaaatatttttttttgtcattttaaaaatttaatagtatttaatacaagttttttaaaactattttttagttttttttttactaaaaaaataagtttaatattctataccataccatgacatgaaaaatcttaccccgagcctgacccgaacctggaccctgacccgaacccaaacacgaactaggactcggaactagacctagacccagaccccagacctggatccagacccgaacaccgaacctagacccaaactcggcctcgaacctagatccggacccgaataccgaacctccaacccgaacctcgaacccaaactctagactcgaacccagtcctggaaccaaacaccaaacccggacccaaacccaaacctagacccgaacctaaatgccggacccggacccaaacccagatccagacctaaacaccgaaccctgaaccacgaacctagaacctaagacccggaccccaaactccaaccctggacccgaaccccaaatcccagaccctaaacccagatccaaatccatacccgggggatccatttcattttactaactatattattaaaaaccagtagacaatcaaaagatatcatggttataatgttgcacattcaatagcaatactctaaagttatttcaataataagctgcatcacatgaatatttctttaatttgctaaacttcttggtgtgctcattaattcattacaatatacatcaattattaactaccaaaccgtacgtatgaaacgatatatatataaaaagagacattggcctcattaatgaaaacaaagtgcaaccagctaataacctatggatttgacaagaaataagtttatttaggtttgcatcttctgtatagctcgtgatcctttgtgagcctattgactattcttttactacatatatataaattttcaattttaattatctttttagaagtgttgggttggaaaggaagtgttgactattctttccaagtagtactaccacaagtctatactctactactacgttaatcacttcactcccacccttttaatttcatctatatatattaacatttgttttccacattgagaaaacacaataatagtaacacaaacatgagaattgcttcatcattactcctcattctatgtatagtaatactactactcaatggagtgcgtagtagtgatcccacatttccccaaagaaaaacaattgaaataataataggaggcggcggcggcggtggcggtgacggtggcggttatgctcccgctcccgctcccgacaccgaagactgtccccctcctcctccaccacctctttgtgagccaccggagtcgcctcaaccaccgcctccgccgcatccgccgcctccgccacc

SEQ ID NO: 57654 - DNA, 980 bp, Cannabis sativa
  modified_base (50)..(60): a, c, t, g, unknown or other
atataatttatttatgtatgaaaacgtaaaatatatatttgtatatattnnnnnnnnnnnaaatatattttatgtatgaaagttatctcaaatctggaacatctcacaagaaatgggttggtttgggttatatagaactataatgtgtccaacccataaccaacccttaattatatggcttatcacttttcagcccaatgaaccatgacttactcttaacattaccctttactataaaaaatgggttgggttgaccgggttgaatggtttggcccatattttgtgcacccctaagagctgggattgagaaattttattaagcaacattatcaataatgttggctcaggttagtgagttaatgagtgttaagggattatactatggatgacttactatgattatttccttgtagctcttgagattgatatctctaattctaattatcaataaagattggcgacaatgctttcaaactggagtatgaccaagttcacattgaacttaggatcagaaccaatataattttcgtgtattgttgtgtctgaaagctatctagatttatttgtgttatttttctagtttaatgtgtttgctggtttttagtttttgatttgtttgttttgatttaacttttatttgtttaagtgtgatcttgaagctggaattacaaaagttaatttccatgtatcagagctaaatttcctacaaatcagagcttggttcttcaatcatcaagggaaattcaaagatcacttgcttcctcaccaagaactcatcaagaattcatcaaggaattctacaagaacacaaattgaaggaggatgtcgatggctaggttcgaactagagaaattcgatggattatttatgtcacttttgtgatagattttttttacttaaatatttgtattatttatttatttattttttaaaatttaggcacaacccacgcgatctttcttaatgggtattacccatga

SEQ ID NO: 57655 - DNA, 1504 bp, Cannabis sativa
acatctcccattagagatggtctacaaatattcctatatatatttgttaattataaatatattaaaataataataaaaattaaatatagcactaaatataataattttataatttaaactattaaaaaatgtgaaactaaaactatacataattatttatagattgtgatataaaaatttaagtatttataagtaaatatttaaattctaattttaattattattttatatatctatttgtaatatatggttgaaaaattaaataaatataattgaaactataaaatatacatataatttagtaattaatttttttttgaacaaggggatttttattcaaaaacaaaactatacaaccaaagctggataaaataccagcagcaaccaacaatgcagattcagatcacggcctgcaaaaaacagcagcagccacaacctaccaattccttacagcatgaagtaaataatttgtctttctgccctctttgaaggagcctaaacataaaattctcagctttaccaagtttctcacagctttgctaagcttacaaggggtagcacaagttaggttgtatagacaatcatttctatttaaccaaatctagtacatagtagcagcaatcacatcatttatcactctgttttggaggctttgctgagttgtcgaacacctgtggcagagatctttgacagagatcggccaatgtatttgcccgagccattctttaactttgacagccacctgtttggagaagggacaatcaaaaaagacatggttatgagtttcctctgtttgatcacaaacaggacaattaacatttagaattggcacacatcttttaagcatgttacgggtaagaagctggctgttaacaacttgccaataaataaacctatgttttggcaacacaagtttatcccacactgcaccagcataactaactctgttctattgtaatactttgaggcactaaacttctttccaatgacaacaaggctcagactagatttacttgttgacacccttatgttcagcaacttcttgaagtaccaactagtatcctgcttagattggtagctccaaattgattgacctttaagatagatcgagttaatccatttcacccacaaattgtcttgtttactcgatatagcccaaagatactttgctatcaaagccttattccactttttcccttctcgaaaccctattccacctaacttcttgggaagacacaccttctcccaagaagctaggtgcaatttgcttctattctccttcttgccctagagaaactcccgaaaacttttgccatgacatcatcaagtttcgggggattatgaagatggtcatccagtaatttcgaatcccaagcagaactgagtgaattaattgagctctacctgtaaacgaaagatttctgcttgcccaacagtttagattcttatttactttatccagaatcacaccacaatttggcgccttccatttagtagttcgaag

SEQ ID NO: 57656 - DNA, 937 bp, Cannabis sativa
  modified_base (889)..(890): a, c, t, g, unknown or other
aatgttcaacaaaaactacgtgacatcttaaatttttttttgcctagcttatctattttatggaaatttcatattttcttaaaaaaaaaaatacacatatatttatattatcaatcaaatctcataaatacaattaataatgtcttttcatttttctaactctcacatatatataatactcaataataaataaaattaatgatgtcttttcatttttataactcttaaacatatagtactcattattattaacattactaggaaattaagccgcgctttgcgcggtgttgctcaatttttgtaatctctatatatataaatattatattagtattgagtgatatactttaaaatataaaattttggtgtgtgtattataaaaataaaataatagtattgaaattagaaatataattttttattttaaaatatatagaaaaatagtgatttggtggaattaacaaaaaaaaaattgcatgtattgttataataaaataaatagaaaaaaataattatttttgatgaattttataagcttgtcttatgattaataatgtagttttttaaaagactatttagattttttttttaataaaaaattagaaatttaactactatttataaaaattctgacattatttcatggtgatgttggagtgcacagagatgagtatagattataggatgataactataaaaaaaatcaccaaaacattatttatttttaaaaattaattaggcaacattcaaaaaaaaatatataatttcaaaaatttaataaactacttttatttgttatttttttttatattaactaaaattcaaataaaactgtatgtatagtatcaataaatatatgaaaagtttcataaatatatatatatatatnnaacactttttaatgggtaatactcattgataggaactaaaaaaaatt

SEQ ID NO: 57657 - DNA, 968 bp, Cannabis sativa
agatcctggtaaaataacttccaacaggcccctcttccatctttgtacttccaacttacactctttgattcttttatttaggaaaattccctgagtgagtagtcctttccccaacgccaaagcacttcaccacaagtgtttattttatcaataataccatttggttcagcactattccaacaactcttaacaatttcaaaaacaaaggctctttcaaccaagaattttcaaatcgaaagacatgactcctagcaaccaccacttcattaaccaacaccaaattcaaaggagtatgatctgaagtagacacctctaaattaaaaagtttggctaaaggaaagaaatctaaccaagattgattcaccaacgctcgatcaattctaacctccacccgatctgccgtgcctcgactacgctcccaagtgtacgggtagccatacaactcaagatcatgtaaaccacaatccaccaaagtatcattgaagacctccactaaccacctcggataaggatgaccacctttcttgtcatcttgggaagtaacattgttaaggtcacctataatacaccaaggcaaactagacttacttttcaactcccttattaaatcccaagttctttttcgtaaattcctattcggctcaccatataaccccatcaatcgccaatgaccttgatcacatccacaaattactacatcaatataggacaccccatagtccaaaacttgaacatcctcctcatccttccacaaaagagcaacacccccactcttcccctgacaatcaattgcaagtgcaccttcaaacccaatcgccacacgtacccgttcaaccatatccttcttagcaagagtttcacacaaaaataaataattgggcttcttttggaccacaagatccttcaagaattgttgagcccatgggttcccaagcccatgaattttccaagatataatactcatgatt

SEQ ID NO: 57658 - DNA, 659 bp, Cannabis sativa
taagggcaacaaggtagaaaaacgaggcaaaaatcttaaccatatggttatttcatattctgttaaccacagttaaattattaattttatatactgtggtatagttcctcaaatgaaaatatctccatatgtttagttatgaaagttagttgtctctcgaaagtatgttcccagatagctaatttgtccatcgggaaaaaatcttatggaatgatagttaccatctggaagggcgttctcggacgacaatcatgaccactccgagtatagtctttggctagttgttccttctggaagagtgttctggatagtcgacttcaattgactctattcctatctggaagtcccttcagcattcccttcagtcttttgtcaagaagcgtatatctcatccagaagcaccttgtcttgtgctggcgtggagaatctattacgaggaatttgttaagtttgttacgttgtaactaacttaacaacttgtcggttacaaccaccgaccttattcggatcattatcttgaacctatatataccaccaatatttatcattttgttagatttgatgagttttaagaggagactttgagtttgagagagaaaaagattgagaggtagaagagagaggtgtagagaaaatagagagattgagtttgtgttttg

SEQ ID NO: 57659 - DNA, 1170 bp, Cannabis sativa
gttttctcactaaaatttgagcttgtagcattaattttaagtgaaatgagaggttagaagtaggggtgggcaatatctaatccaacagaaccaaaccgatccaatccaatccaatccaatccaatgacaaaaaattagatatccaactataattggattggattggatgttgaaagttagattggattggatcggttattggatatcagtctcaaaatttaattaaaaacggatccaatctagttacatttatatatattaaaaatattatttttatttatttatataataaaaaatatcaaaaaataaaaaatatattaattatatttttagtgaccttttttttgttgatttgtaatagcgtttggttggaggtaataaaatggaaaggaagcaattgtcattctattcctttatttggttgcatattaaagtattgaaatgtcattctaatggaatgacctttctactattttggtggaatgactattctattttgaatggaaggaaagaccattccgatgcatgatgagaaaaaatttaataattttttatgcattttaaattttattttattccactcctatttttatttccattcccattcatattcctatgttttcatcctcccaaccaaacaccaccttagttatattgtgtatttatttacatgatgttttgttctattttagtacttgttaatgctgttgttttagttatttcaatcttttagttgtgttacacttgtaacgatgtattaaacttaaataaatagtgatatttcaattttacatatatttttttaatttttttatgttaatattaaaaattaagtgtgtaattggacatgtaatttaaaaaccaaagattagattggattgcattttaaggtatactttgatttaattggatgaagattttccaaatccaattattaattaaattggattagatgagaataaaaatgttgaattagatcgaatattcaacctggcctagttagaaagtttaaatgtcaaaaactcaaaaatgtgtattcaattatgcccctcaaaattgtgccatatacttattgattttaaaggtctagaaaattgaaacaaaaaacctttcgaaattattctaaaaaaagtcccacaaaaagactagtgtgttcataacatgacaatc

SEQ ID NO: 57660 - DNA, 1152 bp, Cannabis sativa
  modified_base (403)..(406): a, c, t, g, unknown or other
tatcgatttcaccaacatatcgtcaacataaacttccttgttttcccctatttgatttgcgaacatttcatttactagtcgctgatatgttgcaccagcgttcttcagtccgaatgacacgaccttataacaatagagtcccatgttggttacgaagcttgtatattcttgatctgggacatacattaaaatctcgttatatcaagaatatgcatcgataaaagacataagctcgtgcccaacagttgcatccactaactggtcattcctgggaagtggaaaacagtctttcgggtttcgggcacgcggcacgcctccttattcattattcagatcagagaaatcaatacaagttctccgaattccgtttggtttcgcgatgagaacaggattggctatccannnnggataaaatacctcgcgtataaaaccgttgactagcaacttgtcaacttcctgttttagtgcccctttcctctcgaattccaagggcatccttttttgtctcttcgctaggtagttgggattaacattcaagtgatggaaaataatcttagggtcaatccctatcatatctccatgactcctggcgaattgattctggttcgccttaaaaaagcatattaattgctatttgagctgctcgtccaggttcttcccaatctacacacatttggtgggattccctaggtcaagaataacctcctccaatccttcaattggttttagtaggtttctttatcttgaactcgaggatcaagatcttcatccttcttcttgttttctcctgccacgtagccttcctatgctacagctctatgcgataacaatagcgagctagcatctagtcgccacgcaccacccccatgccctctggggtttggaactttaaagacaagtgtttgattgagctgattgcccctagtccgatcagtgctgggcgacccaacaatatgttgtaggctgagggcaggtcgacaactaagaagtcttgcataatagtagtagttagaggtgcctcgcctacggttaatgcgagctcaattatgccaaggatggcgatgctaactctggtgaatccgtagagattcaccatacaaggccttaacttggccttttcgagccccattttctttaaagtctccttataaa

SEQ ID NO: 57661 - DNA, 656 bp, Cannabis sativa
cataataataaattaaattataaataattattttttatattatttataattaaattatatagcacttaatataatattaaccatgcgtgtcttaaacgtagcttttttctagtcattatatatataaaaatatgtataaaagaatttataaataataagtttatgtgatattttataactttttctttctatttttatttttattttttgagactttcacattttgtttaaggaacaaacacacaaattacattaattatataaacaacttaaaattatgtaactgccaaaaagtttctattataccaattaattaattattttttgttacataactagttttttaattaactcttaagtgaccttttgatttactgactgttgttttgattgtaataataactatttgatatatataaaatattttaattgtattaattattgtaatttaatagtagtttgtcaaaatgatattttaatagtttaacttaatatatattaattgattttaaatcacctatagcattaatttttttttttcattctattttcactattaaataaattatataatatatatatataaaatgtctacaagaaatgtaacttttaccagcgtatttcgcaaactgcgctggcaaagagatcaaagtttt

SEQ ID NO: 57662 - DNA, 1100 bp, Cannabis sativa
tataccaagagttatatatgttgcatcaaaaattaccaaaaaaattgaaagagttatagatgtattgagctacataaaagaagtagatggtagttatccaaatgcttgaattacttataggatttcgctaactattcctgtcactgttgcgcacacagaatagagtttttttaaactgatcttgatcaaatcttttttccgttcaatcatgtctaaagaaagattaagtggtttaattatgttatctattcaaaaggatatgattgcaaaacctgaccatgcaaatttaattattacttttaaattaaaaaatgcaagacatataatatttcagtaatatattgaattttataagtatatgtaacgatttattagtttaaaatatatttattttacttagtatttgaattttattaaaaattacacttttatatatataatgtattatatttttttaataaaatatatatacataaaagtaggttccattttttttttaattttatcaaaatggtcttggctcgttttttgtttgtaacacttttcttttttttttattttattaaatatttttattgaattctaaatgatccattaatagatgtgtactccatcaaaataataatgtttagattgcagtaaacaaaatcaaacaatattattattattattatgagaaagaccattgtggaagagggaagcaaaatgatccatttgatgcttcttcaaaactaaaccaacctcaatgccaccacttccatctccacattccgccattgaaatggcaccattctctatagaaaccacaacaaattttttaggacgaccccatccaaaatctgtattgtaatattgcggaagagaatataaaaccagaaagtgttttattgaattgaaattgaataagtaaaatacaaaggggaaaggtatatatataaggggacccgattcctataaaccaggaaataacaaacagacaccagaaatatctattaaccacctaaaatatctactaacctataaactgactaaaacaaccatgttcagtacatataacagagtagacagagtatagacagagtatagtgtaattcttgtta

SEQ ID NO: 57663 - DNA, 1939 bp, Cannabis sativa
cacatctctacttttagagaattgctaaggacactactctcatgtttagcatctttattagtgtcatattgctattggtgtaattaaatagcggatcctatataactttaaaaaaaataaattttagagaatattgctaactaattataaagtaacacctataaaaagtgttgggcaccaggtgcctagtaatactcctccttttgttcaaacaaagccttttcctcaagtacttctaatgaataactataactaactttttattttaaatgatagatgtacaccaaccagattgagatattggttaaaatgtattaacccaaaaatataagagcaatgctatcatgggctataatcaatgaaagagcaaggtatcaaccgcaaaaagaaaaaagaactatgttttaagggacattgaaatctcgataataaagttattgttaatgtgtagaaagatagtatcatacatatataagatgcatgtggacaagttgttttaagttatatccttcaacaaaaaaataataataatacttggtgtccttaaaaagctatgtactattattggtgcatatattatttaaaatgaaatgataatcataagaacatatttgtattctattgggttgaattgtatttgtgatttaggaaccgggtgaggcggaagaagactttgcaggtgatgacatagcaaatatcctaaagaaattttatggtggtaggaatccaagtccaccatgtgtgcctagagaaataggattcaaaggccttaaagctccagaattacccttttggctctcacaacaggacctcgattactttgttgaaaagttcaaacaaaagggcttcactggaggattgaattattatcgagctttaaacttgtaagttaattttctactctactctactctacacattttgtttgttaattgatcattttaatacaaaatgttgttttgattatggtttttttgttattgaaggacttgggagctgacagcagcatggagtggagtacaagtgaaagtaccaaccaagttcatagttggagacttggacataacttatcacttccctggtgccaaagaatacattaatggagatgggtttaagaaagatgttccatttttgcaagatgtggttgtaatggaaggagtggctcattttatcaaccaagaaaagccagaggaagttaccactcatatttatgacttcattaagaagttttgatttgatacctgctcattttcaccttctactaccccaccaaccttatttatgattttttctttgatccactttatggttttatgtgttttcttgcttgtattgttggtactctctactctgttttcaactcttgaattaaataaaaacatgttccttattattatattcaaaatgtagccattgaatgccaccaattaatggtggtaagtagattccacatggtggtaatgtgctgtggtgttggggtcatataggcctcttaatggttcagagtgataagacccacaactaggcattagatagggtccttagattgacatgcagtgtttcagcactgccaattgtcaacatgttcttattttttaaaaaaatataaaattaaattaaataaagaatgataataatttgagttttttgaaatcttcccaattaccgtttcatttgcatttaattttctaagtttaaattttgagaataaaactctccaatctattgaactagcagcaaatttaaggtgtcatggaaaattttttttaaagaaatacttttgcaatattttcgttttatatattgtgaaacttggagattgaacattataaactgacatataaaactaaggttttaaatatatgtgattgtacaattaattaattaaataataataacttttttactacagattgtatgactctgttagtatggcttt

SEQ ID NO: 57664 - DNA, 1247 bp, Cannabis sativa
  modified_base (341)..(368): a, c, t, g, unknown or other
tgctattgcacccttaggattacaatgtatgaatcgagggaattactatctatatcgctataggtgggatgtgctattgtgcccttaggattacaatgtatgaatcaatgcttggcagaactcaagtgttggacagcctagggtgttgtacaacctaggctaggcgtgtgagagaatgaagaagagagagagtctaacacttagagagtttgaggtttttagcttagaggcaacttaagcaacttaggttttcagctagaggttaaggcctttataaaggacaaaactaggtagtgtcgaaagtataggggacaaaaatactactactactactaataatnnnnnnnnnnnnnnnnnnnnnnnnnnnnataataataataataaagaataaaaggctaatctagcttgtctctttctctctccatggcgaagaagaaaagggtacctagaaagccaatcacgagattgtcggagcaaattttgggtgagaaactggcgataggagttgaggatggaggagcttcggtcggggacaaagtaatggatgtatttgtgaacaccattcaaatagaagagactgttgtcgatggagatacggagaaggctctatgtgctgatgaagatgccatagctgaaagaagcttaaattgggcagaggaagtagatcgtgaagagaattttcatgcaagtgctcagactcaatggaagaaattcaccaatggtaagtcattctattctgaccttaatctttcttttggttaagaatggattgaaaattggtaaagtagatattgaggaagtgaagattgaagaggcacactagagttcggttgtgatctgtatggttcttagagccaatgtccctgcaccagtttttgagggttttattcaaagaatttggggccatctaggcattgctcagatttttaaaatgacaatagggcttacaacagtgaattttaatgatgatactactcgggatcaagtgttgaaacttggcatgatttaatttgataggaagtcgattatagtgaggccttggacagctgatcttgatatggttcgattagtaaaatctgtgctgttatggattaggctccatggtcttggcctgcaatactgggctagcaagactcttagtgctcttgttagcacaattgggactcctattatggtagacaaatttaccaaagataggactcgtatccaatttgcaaaagtattggttgaaatagatatttcggaaa

SEQ ID NO: 57665 - DNA, 1299 bp, Cannabis sativa
tacataattaaaaacctaataaaatattaaattaattacaaaatattaattttacttaaaaataaaacttaaattattcctacaaaagattgaaactttattttatttataaacacgtatcttaaaaaattaaactaaaattattaagaatctaataaataatttaaataaattaagatattctgaagtaaaatcagacttatctatatttatgaaatcatattttaacaaataaagaaaaataattaaatattcaataaagatataagattattttttttttaaaaaaaagttagaaattaaactaaaaaattgttatgtttacttaaacaaatctactttatttttagataaacaaaacagactcaaatttgttccgataaaatttagtttttaaaaaattaaatttttaatatctaaatgaatttttgaataaaaaataataattttttaaatcccttaattagttttaaaattttaattttttaatcatttaaaataactttttcttaagatctaaattaatttttttaaaatttactaaaaaaatgttgaatctttctcatttttattttgagggtatgatttaataattgtcaaaatttagggagaaaaaattgttaatttataaagacacgtcagtatttaaacagaataataggacgaaacttaacagaaggaataaatttctatacatgtaaaagtttaggggttcttagcaagtcgtatattttagggagtgaaatcaatattgtcgaaagtttaagggacaaaatcagtattatcgaaagtttagggcgtaaaattgctatttattcctaaaaatttgaaaagtaaaaatagttttatagaatatgactttggaaaatattttttacttctctaattttaaaaacaaaaattgattaaaaaagtattagaaaatgtatcctatatttcggacaattttcaaataatattaaaccatttatttaataagctattggcaaaaaagtgtgctaaaaatgtatctttgctttgctaagactccttgagccggagcacttcattttggttttcctcagttcatcgagccctttcgtccaatttctgaagttgtttctccatcttagacatgccatgcgatccttgcccttacacacattttttttttcttctggagagtggggttttaaaaaactgagtttcgattgtgccctctggaatagcgaaaaaataacaaatctgagaattgcagtaaatgaacttataatgcaaccttcctttgagctcatgtgttttgggctacaaatagaaagt

SEQ ID NO: 57666 - DNA, 4506 bp, Cannabis sativa
  modified_base (1873)..(1876): a, c, t, g, unknown or other
agatttaaaataaaagaagattagaaaatatcaaaggaataagatggaaaaaaaaaagataaaaaaaaaatctcacaaaaaaagatgatataaaaaatagagaaattgtgcaataaaataaagctaaacttcaaacttgaattcaactatgttctgattagattttaaaaaaaattaaaacataaaagttctagatctctcttttatctttccagaatatcttgaatcgtctaattttgagcaatgtcgagagagttatggacaaaatactatcagtcgatgcaacaaaaaattcactgccccttataatcctaaggagaatagaatggctcattgtgttgttgggaaaaatcctcaaggtatagcatctggatttatcttgcatatcaaactcattagtaaaacattaataaaatttaaaaataaataaataaataaattagtactaaaaagataaaaatttgaaacaacaaaattaatactaaaactgagaagaaaaaccaacagttcagaacccactagctttcaagaagctatgaaaagtaaagatgatgcatcatggttgcaggccatcaagaagagatgcagtctcttaaaaagaacagaacctagattattgtgaataaactagagttctacaagtttgtaggatgtaaatggcttttcaagcacaaagaaggttaagggaatgaacctgccagagtcaaagcaaggttagttgccaaggggttcactcagaaggaaggcatcgattacaataagattttctctctagtggtcaagcaagcttcaatcagagccatgatggcaaaggcagcaagcatggacctagagattgaatagatggatgtaaggacaactttcttacatagcgaattggaagaggtatatgcaacatcctgaaagctttggcaatgggatcccagattaggtatgcctactcaagaagtctctttacgctcttaagcaagcacctaggcaatggaatttgaggtttgacaactatatgcataatatttgatacactaaaagcaagtatgactcatgtgtgtatttcaataatcggcctatttgttactctatgttgatgatatactgatctttagcaaagcaaggtcagagattgacaagcttataaaaggaaactcagtgatgagtttgagatgaaagatctgggcaaattagaagacctaagcctaacatgataatactttctcaagctgcctacgtacaaaaaatattgaataagtttggcatggtcaagtgaaaaccaattgcaacaccttttgctcaacacttcaagttgtctgcatctcagtcaccaaaaatagatgcagaaagagccaagatgagcaaggttccctatgcaagttatgttgggaccctcatgtactctatgttctgttcaagacctgacttagctcatgttatgggtgtggtcagcaggtacattccagaccttggccctgaacattagaaagcactaaaatggacaatgaggtacctgcaaggtagtctgcacactgaaattatgttcagttataaagagaactagttcaaggaagaaataaacgtggacccaaattttgcggcaaacctagacactagaaggatcctaacagggtttgtgttcactgctcttaggggctgcatcagctggaaatctaacctacaaaagtagtagccttgtcatcaacagaagttgaatacatggttgttaagccatcaaagaagttatatggctaaaggggttaataaaggaattaggtttttaatttgaggatatcacagtttactatggcaatcagagtgttttgcatctcatgaaaaaaccaatatttcatgagaggtcaaagcacattgatatcaagtnnnncttcataagggacattgtgtcatctaagcaggtacaagtgaagaaaataagcacacatgataaccctgctgatatttaagactgtatagagacaagtttaggcactgcctaaacttgctaagcatttaggatagttaatgtcctcaatcatttctggaaggatcaagtgagtctaattaggtggaattgttgagattaaactcacttaatctgtcaagtcagtagttctatcttgacatttatcaaactgaagaaagctgcaattagttataatagttagctttgacactaacttaaaaagagccccaccaacacctacaaatacacgtgtcttaactctctcatatcaactcaaggctcatactccagaattcagagtcaagtttagtttgagagtccaaaatcacagtgagtgtatatatggagagatgtaattgtagtatcactcttgaagtgatttatctcaatgtgagatattttttttttacaattgttcactgtgttgagttgtaatcttggacatatctgattgtgtactactgaccattcttaatcaataaagattcatgattcattcattctcgagctaagttgattcttgcttaattgtgtgttcttgaatatcactacatttgtaacgacagtgttttgagggtgatctttcaccaccttcataaactttagaaatatttgttgcataagtatgcaatatttagaatttgtatgatacaaactcaatcttgtgtttcaaatattacattgttcatatgtgagtataaatttatcacacaaaacatggagaaaagggcgatatgcgcataattcaaaatatataatattttcttttctttcaaaaggtactaaaactgtaagatgatgagagattctcatctgccaaatgcctaatataatttgcattggaaagcaaaccttatggctaattttcaatagcctgcgtatttgaggtccatcccagtagaaaattacaggtcaagaagtattcaaataatcatggagttttgccattgtcagaactcagaatacagtaaccaaagttgagactgtctcaaaggaaactggataagcatctttatccctaaaataataaagtaagggctacctatcattttcctctcttgtagcccccaccttgccttttttatatgatatgtgataatatagaatataaaagccttaaatatttctgccaagctctcaagttatggtatatttatatgtttttttaaggagacatttaggtgatcaacaaagcttaaaaggcatatatatttctttcaagagagcatgagctgatttcataaagatatgaatccgattccttctaattatgtccactgaacattgggaatattgcattgattgtgagaggcatagagagagtgagaattagatgcccataatcccattattgagattccccccttccccctttaattctctaatgcaagaattaaaacttataattaagtagttaactaaatgattaggctattaattaggggattaataatcatgaactttaagaaaattaagctacacaaatcattttcaagtgtagcatattgaaagtcaaaaagatagaaaagaagcaccaagtgacacagtgtacattattattgagtgtgatggctctaaacttggttcagcacaccaaaccaatgccagatattatcagtgccaacccaccattacatcccatgttcatttgtttatcttcatgtctagaatcaaaacacttgttccccaatttatcaacaccaaacccatattgattaattctcactattattactaaaatcactaacttattaacacctagtacagaacctcgcacagtatatattatcattcttttgcaaattttacatgttagtttgacaaaatatctctaatatagcttgtaaaatcatacttgaaggaagtaatttaacatgtaacacttcatctcattattagctttcaaaaagtaattttaatagtagtcttatacagtctgcatgaagaaagccacgtgtctcaaagccaaaaaaccatgctagcataaacaaattaattaaaaaaaaaaaacaagaaccaaaaagaaaaaagaaggaaaggaaagaaaaaagaaagaactgagcaagaaaccttagttgcatttcgtaacaatctataaacatatgaaaatgtaaatctctatcagttaaacttacacagataaaaaaaatagcttattacttagtaataattaaaagtaaattaagaaacaaaacagaaaagaaaattatacaattaattgaggaaattaaagagaagaagtttggttcaaatatcaactttacaggcattagcagtgagaagaggaacttggcccataacacctttcttgaaacccaccaaaacatcacacttaacataaaccccgtaatgagcagtcttaatggccccagctttccatctaagcctccccaacagaaccaccctcaaccccaaaaccccataaccctcgtccaccgccaacccattcaacacctccaccgacaccggaacctcctgtccgccgcccagcaccggagaaagcgccaccgtgctcttcctcgcgtggtagagcggcggcagcgacacctgcg

SEQ ID NO: 57667 - DNA, 628 bp, Cannabis sativa
tgattaaaaataaaaaaggtgtaataaattataaattattattttatgttgtgactaaaaatttcgtgtctaaatatatattagtcacaaaaatcataatttattttttattttttatttttaaaataattattttttttattttttaaaatatttatatatgtggactaataaaattgtgctacgtgtacattgtgtccaggtagacattccaccataacaattaacaactaaaaatagatggaaatgttaaattgctaacataacacaagtttagggaattttacctctaaaattttagaattggggattacttacaaaaacctaaccacttaaaaaagttataccgcaaataactcttaatttctagcaaattaaaaagcaacaacattagaattaattttgtaattaataaatccatagccagctaggtatttgtgtgtgtatctccatttaatctaccattaatattatatgttggtcacttggtgaggtgggtgagcaaaagtcaagtactgagtcacactttatttgtatattttccattagaaatggtttataataataaacaatgaccttctttaattaatttcttgcaaataattaacaaagactatatttacctttc

SEQ ID NO: 57668 - DNA, 1126 bp, Cannabis sativa
ctagtgtaccaagcatacagtatggacaagccaatcaaaccttgtactatgccaatgagtttcaagcattttgttgcgcctctctataattgcacgtggtagttgtctttttagcatatctgaacttagttcgaagcaagcatccatgtcttctctaggatgtctagtattcccacgaagaaaagcaactcagtctcaactccatctcggtctactaatccattttagaagactaactagctcaatgacatcttattccagcattcagaccatctcaatccttccacaggcctataataggataggcctaggccaaccaggttcacctcccaatgagataaacttggctctgataccaattgtcacggggttacattttcaggcagcggaacacccgtgtggcaccttgacttttctaagccaaggtcatccttccaactatctgagtaataatgggctcatttttcacgcaaccgtatgccttgtacacacttccatctctcaaataactcctatcgagtcatgctcacaagcatccatgatttcatccatgaatcgaagctctctagccaagatacttgcactgtccatatgttcctactatgataaggaaaatcccagcactaacactcacttagtcactcgtgaccaaggtagcatgtgtggcaagatgccaacactaagctgacgtgccaacgcttctaatcatgccccattcgatactgtctgaataatatccctcatcgcccaaggactctcaaatgtccacggtccaatcctcaaggcaccatgcctctacacatgttggtaggccctcgagacaagccaccaaactagtagcatatacgtttgacctctatctctttctaacatggtgcatctgtcccatgcgcgtatgcaagctagcccacgaatgactacatgtgtcatctcgtgtcgagactcatggctaaggcacaccacaacgtctcttggaggtttaggccataatctctactagtggcataccgataagccaatggaaacatacctactaacctctggcagcattcttagacgtactaccaggtcggcctgatattgtccatgagcattccaactcatggagacatatcagtcccatcgt

SEQ ID NO: 57669 - DNA, 913 bp, Cannabis sativa
  modified_base (62)..(62): a, c, t, g, unknown or other
cctatggcttatggtatacttggtcatttaattactctagtgcaagtaacttactttagtangatgctgaagcatttttttttctaatggctttttctataggaagtcttttggctcctacacatagatttcatttatctaagaaaaaatttcaactattccaaaaaagataatagctcaaaacaaattccttaggatcaataatgagaggtttcatgtatgcccttgtatgcatatatcagacaccttctattgagttggagtaatgattaagtatcatattaaataggaaaggaacattggaagacaatcaaacaaatcttaagtttaataagaggaactatatgttagttgataaggctggtatttaatactcttagactacaccaaatcaggtttctagacttgcatgaatgctagaaagtctactgatgagatattgattactctggaggcactactacaatttagacttttagtgacatgacaattagactctaaaggttcggtattagtatcctacaatgtgggtcactaaaaatatgaagtgtcactaaagggtaattccataatttatataattttttttttgaaaaaataacattattgacctatagtgacacgctagtcaactgggtaaatgtatcccaacatgtttggcgcgtcactaaaagttatttgcttaattatttttttaaaaaatgatcagcacttggaaaatgttcccaaacataattaataataataaatggcctattttttgaacaaaaaaaagtagcatattttaccctctctctttctcgtcttaatgaaaaaaaatctagtttcaaaaaaaatgaaaaaagaaaccctaattttttttcacagaattctctctttctctcattgctaaattaaaatataaagttttttt

SEQ ID NO: 57670 - DNA, 633 bp, Cannabis sativa
taattttcttacaactctctaatcctataatatttcattggttgccgaaaacctcggtcaacaggtaaatacatgtgagagattcaaattgcttttggcttggtatggtgtcgcttcaggtcaaaatataaatttccaaaagtctattgtttgttccaacctaaatgtttatgtatctggtaaaatgacatgcttggttcgcttcgttttatgggagagtgtcatgaaaaatatttgggccttcttggttagattgttcgctggtcaaaataaatcactgttgtttaattctgtacgagagctgatctagaattaattcaatggttggaagtcaaaatctttttctatggcaggtagagagattctggttaaagttgttattcaaacttgttatcctgatttttgctcacctggcgtggcatgtccacgtggcaagaattaataccatgtgggagtacaactagccaacaagaaggccaagctatctactcagcacttcaacaaacgaggagtttcagtacttaggtgggataacaaagtgacgaactagccacctcaaggggggtggtcggccacccatggccagctctatggctagcataggctggctagcttttgcgcatcatatgacca

SEQ ID NO: 57671 - DNA, 814 bp, Cannabis sativa
aaagaatccacacgtagactctattgaaaagactcaaagatgtcgcacctctatctccatggctagttataggtgatttcaataaaatcctatcaaataacaataaattgggtggtgctttgcacaatgaaacacaaatggaacactttagacatgctcttgacatatgccacttgaatgaacagccttatgagggagaccccttcactttggtaaaaggaagacacacggtggacactatcaaagaaaggttagattggtgctttgccaacgaccatttgaactcgatgtttgatcttatcactactcaacatttgaactactacagttctaatcatagagctttattggttaatgttaacttagaagatggtgtcattcagcagcaacaaagacggaataggttcaaattcgagcaagtatggatacaacatgaagaggcagcgaacataatatagcaacaatggctgactacagtcttgggcactgtcattgatagctttttggacaaattgaaggcttgtgcttcttccttacaacaatgacacacctttaaatttggtaatttgaagaaacaaatctcacatatgcagtaacaagtcacaagattaaataatgctactgctagaactgcacctctcatagtagaacataaaaaaatctgagaacatccttaatatcttttggcacaagaagagatgtattggcagcaaagatctcgtaagaattggcttcaaagtggtgattaaaatacaaattttttccatgctcatgcttcatcgcccaaggcaaggaaaaaatttattttctcttg

SEQ ID NO: 57672 - DNA, 754 bp, Cannabis sativa
aagacagaattatgtttattaattatttatcaactctgtttgtgtgttgtgtgcttttgctttggtttggttagatttgctatgtataataaagctacatatttgtggatttgatccctttaattaataatttgtttattaattatttacttgctttccaattttcttatttgctttggtttggttagatttgctatgtataataaagctacatataatgtattgtttgtggtcatgcatgtatgtgtgcatgtacaagcatgtttctattttaaaatatttgagcatcaactaaaattacattagtattattattaactatttgtttatttacttttgtacccttaatatatatatatatatataaatattacttttagtaactaatttattattcgtattaaattaaatatatcaaagtttgttaagtgttaaatgatagaaaaaaaaaaaaaaattcatgctaattaacaaataaaattttatcactcatgtgactgcattatatgtattcgcatcatttttcacggtagatgaatatttaaaatattcaaactcttttaagtattcataattaattaataatagaaattggtgaatatatatacctcttgcttgaaactaatcaccactaaataaatgaacccttacaaattgacatcataaaaaaatactataaaattaaaaatttgataatttaaataaagaaaaaactgtaaatatgaataatttgatccaagtcaagactttgtcc

SEQ ID NO: 57673 - DNA, 1462 bp, Cannabis sativa
acactcccggaggcaactttcttctcgctattttccatcaacttcttcaagcgatgaagtaaaaccgcaattaggttgtataccatgacactagacattgaatatatcaatgatgaagtaaaacttaaactcttgtttatgtgctgagattagacgctaagcaaaaatatcacagttcggttgtatatcaaccagcatacacataatcgtattgaatttaacttactctaaaaatcaactcagctaagaacaatttacagaaagaaaaccctaataccaatgaaaaatagcaatatccacaatcacaatcatatatagagataaagggaaaaaaaagtttcatactaccggggaaagggattcgtagatcgagaacgcagagagctcgatcttcctgagaaagtcttcgaccttgaagcatggacaattgacagggctctgtggtccatgattgagaagcgtaataggattcagaagatgaaagcttccagcgaggacatttaggggattgaaaaacagccggagcacctccttctctgtagaccgtcaaacaagtcgacgattctccgaaagtgcaattcgccatggcaagaagtagaagccatatggaggagagtaaatgaaaattgaagagtgcaatcattgaattaaaataaattcataaaagagaaaccgttaaatgatttcttgtgtttataataacatagcgattgatgatgagtgaagaagaagatttgatcttctttccttttccctccaaaattcctctccttattcttttcttctactccaacggccaccaacggtacagaaatgggtaataacatttggaagtggaaatttttctgtaggggtgggctcccaattggaaaatttacataagaaattatagtaaatttcctcaaataatagtactatgttaataaattttcccattttaaaacttgtagtaaaatgacacttttttcttttaagattatttattatttgtattatttttttcatattttttttagaattagaaacaaattacttaaagattatgttatatctatattagttttgttataattttttttatttgaaagctatatcgattttttaaatgtgttatttggttcatgagatcatttatttatttattggatttataaattcatccaaatctttatcacattgatattcttgtttattgtattgtcaacacagtgaaatgtaatcgagattgtgtgattaaatgtattcttatgatttatcagtatacatgatttaactgataggatgatttacaatgtagtttacttgcaccttagataagtgttatatcctttacagggcattagttaaagtaagcttgggttgggtatatggagtatgcattggaagagaccgatattaaacttgaataagatataataaacttaccgtaatattgtttaacgcccaaatgtgacttccacta

SEQ ID NO: 57674 - DNA, 1279 bp, Cannabis sativa
taggatgttaatcaaacatacttagtagtaaatctagatcctggtaaaatattttcaacaggttgcgattggatatcctctcttatcttatagcaaagttaacgcacttgaaaattttggggaaaataccaaattatatttttgatgaattgttgaaatttcttaaatttgcatttccgaaggataacaaaattcttgcaacacactatgaggcaaagaagaaattaggtaaattaggccaagggtacgaatcaatttatgtgtgcgtgaataattgttgcttattttacaatgagcatgcattcaaagatttctgcccagtgtgttggaccagtagatgggttaatgatgagaacacaaggggaaaaaaattagcgcataaggtgatgcgttactttatgttgactcctcgattgaaaatattatatagttcaagacgtacagctaaagagattgtttggcatcgtactgggcgcatgaaagaaaatggtgttatgcgccatcctgtcaattccgctgcatgcaaaaactttgatagcagacatcttaattttgcaagagatctgcgaaatgttcgattaggtttagctgctgatggatttaatccttttgacaacatgatccaattgtataatatgtggcatgtagtgttggcaaattacaatatgccaccgtggatgtgtatgaaggataacaatttcttgttggctctccttattcctggacctaaatcaccaggtaaggatatggatatatttttgaggccactagtagatgagctgaacgaattgcggactaacgggattgaaacaagagatgctacaaacaattcaatgttcaagttacgcgcagctcttctttggacagttaatgattttcctgcctgcagtagcttgtctggatgaagtggccagggatataaagcttgtcctacatgcaacgacgatactagttccattcgagtgattggtaagacctcttatgttggccatagacatttcttgccatcaaatcactgtatgagaaagggccgcaaatttgatggaaatgttgagaagagacttcttccaagatgatttacttgttctgacatattagaacaagtgaatgtgttaccacaacaagctatgggaaatcgaaaaagaagtgagactgaaagtaattggaagaaaaaaagcattttttatgaacttgagtattggagtacaaatgagttcaaacacaacttagatgtgatgcatgtggaaaagaatgtttgtgatagtatccttggcaccct

SEQ ID NO: 57675 - DNA, 851 bp, Cannabis sativa
ataaatcacttcaaatttcttatattgataactaatttgattgtaaagggttttatttagggcacaaaacccaacacatacctctttttgtaagttctactttcgtaggaatccattgattgaacacacgccaaatgaaatttttcatttttggggtgagtttagagctccaaataaacttccaccaagcttttaaaagagatttgttcgaacattcagcaagatctaggtgaagaaatcttattttataaccactggccaccgaatactgaccatgattgttcaaactccatgatagccaatcgggtcttgaagttatggggattataccaagcacccaaggtatctcatctttatgaaaccaactataaacttcattgactttccaatttccttcatcattaatcaacttgtctaaagtggtaccttcagggagcatagcttttgatcggagagagaaagggattcctcttggaagccaagcatcttcattgattcgaatagtacaactgtttccaacacaccaccgagagcctttaagtaagatctccctaccccaaagaatgcttcgccacactgtagacccgtagtgacctaaactagcttccgtaaaggtaccatgaggaaaatatagagctttaatcaccctagtcattaaacaagctggctcggtcatcaacttccagccttgcttagccaacattggttggttaaaatcttctagatcccgaaagccaatgcctccttgctccttaagtctacacaatttcttccaattaccccaatggagcttgtgtttattggaagtagagccccaccaaaaccgagcaatcatactctctatatccttg

SEQ ID NO: 57676 - DNA, 1408 bp, Cannabis sativa
catcgtattagagaattcatatttagggtgttaatgaaacatacatgttagtaaatttagatcctgataaaataaattccaacaaagaatattttactattagagttttactaatttgaggttttaaagttagacataaataattatatataaaagatgtgatgattaaattatacaagtgtgtatacaattatttgtgttatgtcacctagtttcttgaaactagttagtaattaactaattatttgtgttatgcacatttcatttaatatttatgcattttttaaaaaaatttatcctaattctactgaaattttgacagcataacaactttaattggaggtttctaaaaattttaagcatacctaaaataacaaacaaaataaataaaacaatacaaaacaaacaaaataacataacaatacaaaatttagccacccatctgaccgcagtacatgtattcgcagaacctacatcactatggttgaatatataaaatatttaaactcaactaacatgcacattattacacccacccgattgtagtataatatatcgcagagtttacttcattacagataaatatttaagatattcaaactccactaagtatacattcataattaattaataacaaaaagttagtgaatgtatatacctataccaagttaaaacccaatcaacaccaaatttttcaaaaccttgaaaattagctcacaacctataatataatgaaatataataaaattaaaatttatttatttaattacttactaattataaaaaaaattaactagttactagttagtaaattatatatttttaaaaattttacgtatacatacatatataattaattatatcttacactaataaaattttaaaaactttatttctaaactcattaattctcttctatctcattctcattcacaatacatatatatatatatacatacatatatattacttaaaatgtatacaatacaattacaatatttatataaataatatacacaatatatatacacacaatacatatatataaacacatatttaataaacaaacacaaaatacacatatatatactatgttttacggtttatatttttaccttatgttgcgatattttgcacacgtaagtgcacgtatcgtttcaagtagtaaactcaccaggagtgaggtcgatcccacaaggagtgtagttaagtagttaaaattaaacttttacttatacttggctaaataaaaattaagaaagaatttaaaataagaaaactaataatgggcaattattaaagaaagttgacagttaataagaactagggcttcgatttcaattgtttctattgcttatggcctaatatgattattttcctattattaatttctatgcaatagcaggtt

SEQ ID NO: 57677 - DNA, 662 bp, Cannabis sativa
atacatgaaagataatactcgccaaataatgaggatctatcgtcatgattcatatatttgttatttagcaaagataattattgagcttaagcaatatatttatttaaatgttgaccttggagaatattaaaatattttgttcacactatatataattaattataattgattggtttgatttatcaaattaatattttatttttggacaaaatattatgattgatggtcatcattatgttacttagtcaatttaattttctaaatgattgtgaaaatattatagcaattaactgtgactgagactttaatagaatgtctcacctatataaatatagggtcttggtcctcaagctcactactcgttatgtgaaacacagtaaatccatctaaaaagagtagtgagagcttggaaagccccgattacccccacatcaattagagtttcttttttgcaaatcaaagcttatgttggattgaagctcaaacatcaatgactggaggtatttcgatcctaagtgtatatgttcgtttatttcacattttatatacacattcatatattttattttacatataaaatttctaacaattaatttcttctgtaagtgatggtgtaggctcctcttgctcaaatggttggggtgagtttgggtaatgtggac

SEQ ID NO: 57678 - DNA, 882 bp, Cannabis sativa
tcacttatatttggtgttgcactagttaatactaaatatggttttttattttaaccacaatactaaaatttacgtaaaaaaaatatatttattgttaagatatatattttttaataaaataaaatatattttaatgttaaatattacatatatacaaagaagctataaaatattaatatcataaataaaataaagaataaaaaaagaaagatgcagttgctatagtattattgcatatgtatgtactatagctgcaactagagctgtaagtatgggtcagattttttgacacgacatgagctcgggagtaggaatgtacatcaatcgatcaaatccaatgataatcaaccgatccaattacaacccagtgccaaacattaaaaatagcatctcaaaaatccttttggagaagttacaaatcttaatttcttcaaaaatgactttttatttttttatctaaacaccactagaagagtttttttaattttaaaagttaaaaaaaaaaacactatgagataattaatctaaggatatgatatgagtagtagatagtgtaattggtaattaattagcctaaatttcggattattgagaggtgacatggtgctcataatgtcatacaatctttttcatattctcaatctctaaactcatcatttcatttccttaagttttcttaaaaatatatatatatgatcaagaaaaatctcaacagcaaatattggaaacctatttattataaaaataaattaattaattaagaactaattttgattattgtctgttggtggcgatgaatgtagatgatataactattgtcatgtgatgatgagtatgagaattatatttttaattttcctttaaaaagatttttgatgaatt

SEQ ID NO: 57679 - DNA, 1318 bp, Cannabis sativa
atgaccaatactcagcattttagtaaaatgtgattattaataataagtaattaagtattattaatattaatttttttttaaaaaaaaaaaattgaatagtttcagattctgggttacaacctgacaaaaaaaaaaactacatatccacacccgaacccgaaacccgttttaggttttttcaggttgaacccgacccggttacacgggttttcacatggtcggttttttggcagcgggtcggggcgggtgttcaggtttttcgggtgtgcaggtctaaatgtgcagccctagtatgtcattttactaggttaattaatagcttcgagcaatgtatgaaatggctataaactaaagacaaacgaaagtaagtgaaaattttgtttaacaaattatatgttatcagcaatatcgattttaaaaatgttattttaactacattgttagtgtttgtaaaagaaaaaagatttgcttgattaagtgtaatttttatgagattgaaaaattgaattattttcttcagatagttttttaaaaaagccgcacacaaattgacaacaataaaaggtggtgtacctttttgaaagtagtaaaaaacaaacatgcatgacacactaaaggccagagtttacacaattttaaaattcaattaagttgtcctgcttagtcacacttagaaatggccatgattagcctgaatgttttaatcataccttgaacataaatgttaaagatcatgtggaattgggtatagaagacatcgtaggaagttaactgctatggtactataatagaatgctgtaaaaatataaaaaatttattttttgtaacataaaagtgtaaaaatataaagtgtaaaaaaatttacagaaaaaaaagtagtttgtgtaatttttttttttttgtaaagatatctcttaaatgttattcctatgttcattcttttcgaaattcaaattttactctttcatcgacaaagtcattgtgttattactagggctgttttctgatttgattaggaaaattgacattgtttataattgcattttaatcttattttaattttccttttgggaaagtataaataaaacaaaactaacaaattacagaatctttttttaggtagattggtccatcgtatttaacagttacactatagtacatttaacaattagactatagtatatataatgaaatgatgctatataggaagagatgcttacctgttattggaaacatacaggaaaataagtgtagggatgtcatgaatacactgaaattttagacgattgcaataaattattcaaaaaaattgtcttcc

SEQ ID NO: 57680 - DNA, 923 bp, Cannabis sativa
  modified_base (30)..(32): a, c, t, g, unknown or other
actataaaaaactgctacttttagttacannnaattttttagtcataatataatttcttttttactaagtgtgacttttagccacaacaaaatgttatttgtgactaaaacatagtatttagttgtcactaatttatttttagacacaacaaatattgtgactaaaaataaatttagtcaccaaatatgtaatttttgtgactaatacttttagtcataacataagaataataatttatatttaatcacaatttttttatttttaaccataagttttgttatgactaaacactagcacgcctctgctcagtcacattgtgttgctcctcgaccaagtcatcataaacatggtacgtgcatcaactcagcgttctacacgcttgacggtctgtcttcagctagtacttcatgaaaaatatagggagtatttcgctcaatagtcaattattattttaatcttttattattgtttaaatttaatatttaaattttagcatttattattcattaatcttttagactccaaggtgatctataactgttaatgccttgttcttatttcttctttcaagtttctttctaacatctatctctgtttcaggattatatttggacaaactcgatttatttttatattcaattcaagtctcatcaatatgataaagctatagcagaataggttattgccgaacctaaaggctgaaccattatatataaaaattggtcgtattatttactctattattctttattaatacctgtcgtattgacgtcttactcgtagttttgaacattttcagtcatcaatattttatatgtaatcactacataaaaacaaaagcaaaattaatgtgtcaataattaatgatgatcttgatatagctgactatataatttaaaaaacaaggttgactaaatttact

SEQ ID NO: 57681 - DNA, 868 bp, Cannabis sativa
  modified_base (282)..(282): a, c, t, g, unknown or other
gagcttgtccagtaccaccgatactaaaaatgcatctccctacttgcctaagaaactgtattgaccgctactatgaattttccctcgtgacatgacaattagagcactcaatagtaaatagagtaaaataactataatgatacaagtatacgtaagagctaaaaatagcattgtgttaaaaaaattcatccaatatatgagctactctaccaattaaaatatttcattaattttttttttattttacatcacacatatacattatattatacatcatagatnaagttctttaaaataaataccaaaatcctcattttttaattaatatatatatatattattcatttcagatatatatattattaatacttacaaattttggcatataaaaaatgttaaattctaagactattaataaaatatatttagagaaataaataatattttataatgtaaaacacgaataataaatttcaaaaaaactttaaagtgaaggaatttaaaagatatgatatcatatatctagtttggttttaaaatgttttaaagaatctctattttataacatctcatgtgaacaattttaatagttaacatttttttatataataattattaacttaaaacatgtaaaattttatattaaatttgaaattctatattttataatttccaatttattaattaattaaatacaaaatagtaaagttgatactaaaatagataatctatagctacaaaccaagattatgtaactacaaacaaaatatgcacaaaataaatgtatagtaatagtgcaactatagtatacacaaaatataatacattaaaaactctatttaaggatactaaatcaaaaaataatctc

SEQ ID NO: 57682 - DNA, 1362 bp, Cannabis sativa
  modified_base (414)..(431): a, c, t, g, unknown or other
tataatctatttgttagggattttgacttataaagattttctaactttttctataactcagacggacatgtttcattcaatacactatactttaatttagaagtcttatctaaatgaatagcgttgactcagaaatctggactagacttctaagccaccccacctgactcgctagattggcgaaaatgaaatagttgttaagtaattataagagagacacaataaatttataatagttcactccctgtatcgcgacagtaatagagctacgtctactttgagtttttattgctcattggtattataaaaatagggtaagtggcaaaggctccaatttctaaagagagaaactagagagagaagctctgaccttgtgggtactattctgaaagtgaaaaatgagctaagggagcnnnnnnnnnnnnnnnnnnggaggcccacaaaaatagaaaaaaaatacaaatttgatttttttcaactgtagatgatgatctaatggtgaaaactagcttctaatggtgatagtcatttttcagagctcgcagcacctgctacggccggtaacctggagcttatttggtaactcttttgggggttaaatttggtatcgatagctttagaattgcgattgaagtgtgagatgtgacctaatagagaatttcattagcttcaaaagtcaagttgaatcgtatcaatcagatcaatattgagttagttatggcaattttactaaaggaagttcatgaccaaatgcctaggttgacatccagcgcccaggttgacatatgacgtcaacctagacattgggtaagtgtaaaaacgtgcaaaggatgtactttatgatgactaagtgattttttttatatcacttagtctatttatgtgttttggcaaagctggtcactagttctcagagatgttattctgcggaaatgggagactcaaaactcttcatttctgagtgagtttcccaagttgaaaatgaaaaatgcaaagttataaatttgacttcatggatcttagttaccgtgaaaaactagatggacggtttaatagaataatgatcaaataagcagaacctaacgaactaagtcatttgtcaacctaggcattgggtactcattctcgagctcttgggatcttgttttgatacttccaaggttcttaaacttgaggatgaggtctcctagcttatttttaaccatttcagattcattcgttgaattatatttggtatttgagcaatcaaaagtagcgcaccaggttgattatcaacctggacgctgggcctagcaagaggtcaacctgggcactgggccctatttccaggggctcgggtttgtagtttttaccctaagtttt

SEQ ID NO: 57683 - DNA, 672 bp, Cannabis sativa
gtgtggaagatggaggcctctttttttttttggtgtttacagtataaaagaaaaaaaaaaggccaagacactataaaagttatttctgccgtgtattagtatttttgtaaggattgggccaaaagtcagtatttttgtaagtttccctttatgaaataataacatagaatttatcagataagtcttcctttaaaaattttatttgagttttttcgtaatataattttgtaattatttatttattgagttcttctcaattaatagattgtacttattacattttgacagtagcaaatttatcgattgggagttagtaggttatagagccatcaaaggcgatttcattgtttaaatttttctactttagaagagagatttaaaagttagactaaatagtttaacttcgataaatggtgactttggttttctcaagaagcttcaaaggtaagttttatttttttcatgccagatattaatttcttaatttttctcaatattattttttcaacccaattagagaggtttattcagttttgcgttatctagtaacagctatcaacaaaggaatggtgttttaatgagttggggtgatgtttgaggatgttatagctttatcgtctaaattctcaggggcagttttgtcccatttggctcgcgataagaattctgcag

SEQ ID NO: 57684 - DNA, 1211 bp, Cannabis sativa
gatacctcaaacctattctcgagaagtccctaccccgaggaaccaatgggagagggtggtctatgggcctaaagagcacccaaggaaccaagagaggcctaggagtcacccctctaatagggttcgctacaacaataatcgaccgctccaagccaatgaacaagttctacctagtcattatataggacgtgatgactcccacactgtccgtctaaggcggagtggtggaagaaactctaggaacaagaatggtgaccgtggaagaaacggtggaaggacaccccaacgtagggagtggcaaccctgggaccaacacggccaaccatgagagggtgatgatttccgaagaaatagtaggtccagggggagaagagacgaccccaaagtcaatagtgattactatccaaactacaccaacgatcacgatgatggtgaagctgaaagtcaggtcaataaccaaccaaatcctgagctggggggttatcaagccagagggtcgtatgcccttaatatgcaacatcaacctgagaatacgcctcaaaggggtaggaatgaccaagtaccacccctggtcgatggaagggctgatagtcaaaatgcaggaggaaggccaagaaccctatcagtttttgaacgggtaggcctccgagggggtagagagcttcaagatgccctcaataaaaatagggaaaactacggttccaacatagtaaatccacctgagtcaattcaaagagaccatgcgaatgctggcgttaatgtcgctcaacccccagcagccacagatttggtgatccaggatcagttggacgagttaacctgattggtagaggaccttactacaccaaaactcacggatttagagctagaaaggagggagggtctgccttctcccaaacgatcaatgacctccttatttcagcaaaattcgaaatgcccacttgcaagtacacgggtagtgaagacctcctaactcatgttgagaacttcaaaatccaaatggaccttcaagggatcagggatgacctcaggtgtcgaatcttccctgcaaccctcacaaacacggcgcaacaatggcttgcgaaactacccccagggaggatcacttcttgggatgagtttgaagggttattccatacccaattctcttcagcccgaaagataccagtagagttgggtgacttggtcaccatcaagcagaagcccgatga

SEQ ID NO: 57685 - DNA, 1274 bp, Cannabis sativa
  modified_base (218)..(219): a, c, t, g, unknown or other
  modified_base (1246)..(1247): a, c, t, g, unknown or other
tagtaaaatattaatttgtaaatttatgctttaataaaatattaaaattgggagaattaaggagagaagagaaaaatagttttggagtgattttagaccgccgcgtcaccgcctcatacttctcctttattatatatatatatatatatatagatttttatgacttttaagatgtattttagaaaataattaatttattaaataataattaatgtgtnntattttaatttttatgtagtttaaatttttatatatttaaactattataaactttattttttttattaggggattctctagctgccccgtccctgtgcctattaggggattctccgtcccatttccaagacgagaaataagcggggatggaaattaaaatccttaacatggatggggacgggaggagcactccctaccaattttctgctcagtgtgcatccctggccagtcttgctcgaaagaaattataaaaggtaataatcatgttcctcctatactgcgatctaggaatattatgcaaaatttgagttctaaattttctaacccagaaagttagtcaaagtagggatgttaagattgaattagaagatatagaaaaaaatatttcttattgaaactcttccattatttattatgttcttggaacgaaccattccttgtcaattttggaagcttttgcaaggcaaatgtggaaatcaaaaggtgtagataaagtggtatgctttttcatagcgtgtttatcatttgttttgattgattgaatgttcgagatgaggttttaaatggtggctatatttgcattgacaagaaaccttgggatgcaacaaaagattttaagaaagaggatgtctataagattccaacctagcttcgtttaaataacttggaattaaagtactagggagagagatccttattcaaaattattgatcagttgaggaagcctttgatgattgataatgttacaaagttcagagaaaaactcaactatcccaaagtgttggtggaaagtatctttaactattacaaactgcacttttggagaaaaagtcaagatttaagcattgattataaactgagacaaatgaattttggtgtcattttaaaaccgatacttaaagtgtacatatatatttttttctttagtgtcagtttaaaactgagactaacaggtataagtgtttgttttaaaccgacactaagggctcgtttggaacgtcgtataaggtcgtattgtattgtattnnattatattgaattgtattttatgcaat

SEQ ID NO: 57686 - DNA, 791 bp, Cannabis sativa
  modified_base (44)..(45): a, c, t, g, unknown or other
taaggtttattaaactttatgtgtgtttatttacattgttttannaattcatattaggatattaaacaacatacatggttgtaaatctagatcctggtaaaataattccaacagtttctttatcaagaaactggacttgattatatagaagtaaaatttatatacaaaattttaagttttttacccattcggggacgatcggtcagagcgaaactcaccaaaggtccttcatcaagaaactgattttttttttatcaagaaactagttttttcattaggaaactggttatgattatatagaagtaaaatttatatatgagtttttaagttttttttttatgatatttctttttatctaagatgatttattccatatttttaaggtttttttttttaaaaaaaaaaaaatatatcacatttgctacaattaagtttgcatgacatacatatcaatatttttattttttttttctatatttttgtaaatagcctaaatgaaaatgacactaattaatacaaggtctaagttgaagaatacttctttttttattcattaataaaaaattccctcatattatatttcattaaaatgtattcacttttgtgagtggattgccaaatatagcatcaccctccacttaattctagcacataatttatattaatttatgggatataatgggaacatcatctataaaagtgggtatatattaaagaatataaaaaaagtaaaaactaaaaaaagtaaagtaaaatggatatattgttataaaataatataaagtagatga

SEQ ID NO: 57687 - DNA, 1616 bp, Cannabis sativa
tcaaattacatacatgtaaggactcgagctctattccagtccatcccttctcggaatcataatgctttagacgccatgtctcaatttgaccggtagaagaagttaataccattccacgtcgaatgtgatgtcgcgctgtggagactgaaccattttttgactcccattttctctttgatcgattggtagtattctttaatgctctttcctaaagaaataaaataaaaacaaaattattagtgaaattcttccaacactgtaataataaaatttaagagaaatcaataaaaaataaaaataaaaataaaatatatatttccaaacttcagttgaaccaattggtacgtacttatacctatgaacaaataaacaatgataaaacatgtaaatattattgaaagtcaagagaaattatacatggtaagtactaagtagtttataaaatgaaccttaagtaccatgatgactcatgatccatgatacatctacgcatatgggtcattaggtatatatcctagagttttattacgtaagaaattgagtatgaacttaagttaaaattagatagaataaaagaaaataaatttaatgtacaaaaaatacattctacctgatgcaattcattcgtgattatacaatactaaactcaaatataactgcacttatatattagaattacttaacacttgaatgaatctttaaataaatggacaaaacaaaatatcgacaataatagtctaagatttcatcaaaataatataaaattagaatagactcaatccactttacacaaataatttttcttactaatattatgatatccaaataatactagccaataaatcaatggtaaaacagatcagtaacaaagccaaccaggaaaaatagtgtaagatcacatcaaagtaatgtggagttagagtagactcaatccactctacataaatctttcttcttactaatattatcaactccaaacaatagtagctaatattgagtagtaaaacaaaaacaataatatatagccaactaaataacagtataaatacataaataataagtcatgccacacactattatcataatacaaatattataataaaaaagataccttaaattcaagagaataccaacgatcacacaaaattatccaatcctcttgctggtcctcctttaagtctggatgtcgtttgtttttggccatctcaacatcattttctcctccaatttctttaaaatataaatgtagcttgtacttgtgacccttccaagcttttctcatttgttcatcaatacatttttttgttgtctcatcattcaagttgatgtcaaaatgttcctattaaataaataatattaaatacaaaatattctaaatataaatgtaaatattgtgaaataattaacttaccaaaagatattgtcgtaatggagctctcacatcttcagggaccattctccactctttataatgaaatgtaccatgatttcgaataatgaatccaatctcattattaaatttttcagcattagtacagattggttgacgacactctgcatcaaaagttaccgataactttcctgtcgatgatgccttagctatagttgtagttgac

SEQ ID NO: 57688 - DNA, 1116 bp, Cannabis sativa
gtaaaataatttccaacaaccaggtctttgattataccccttcgccactaatcgagccttgtatctttggaatgacccatcaacatttctcttttctctgtaaacccatttattttcaatgacgttcatatcggcggtccttcgaaccatcttccaggttttatttcgaattagaacacaaatttcttctttcatagcagcattccatccattgtgtctcaatgcctcttcaagtgaacatggttctgatcttattttctcccattttgcactccttagataagtctttggtttgaaaactctggctttggctcgagtgatcatgggatgtgttggttgtatatttttagcacctcctgcctcagctgaaatatctggttcagcagtaggcatttcgatttcagctgctcttgaatcaggattggcaggaacaatgtttggagctggaaactcagtcatactttcaggggggttagtcatctcaaaatgatcaaaataaccactaccacgtacctgacttgtgctagcagaagttgaggacagaggtgatgcaggtggtgactggtgctgagaattgtttcccccgtgaacatcatcagctgaaggacctggtgtgaatgtttgtgaaggtgagtttagaacagatgcagaccaataagggacagtgacagacacaagagtttcaacgtgatgagtgttcaaaaaaccatgacgaaaaggaaactcatgttcattaaacactacatgctgagagatgtaaagcctgccaatgctacttaaacatttatatcctttttgactatcactatatccaagattgacacactttgtggaatgaaattgaaacttgtgtgattgataagggcgaagacaaggaaagcatgctgaaccaaagactttgagaaatctatagtcgggttgtttggaaaatacaagctcataaggcgttttgtttccaagaatagaagtgggcaatctattaataagatatactgacgtttgaaaggcatcccaccaataattttggggaacacttgcttgagcaaggagggtaaggcccatctcgacaatgtgtcgatgtttacgttcagctcgaccattttgagctgaagtatg

SEQ ID NO: 57689 - DNA, 982 bp, Cannabis sativa
aaaaaaatgttttagggtattttactttccttctttgtgatccttttaaatttgtgttactcaagagattcatggagctttttatcatccctaaaaatgtttctatatattttatgttttagatttatacatatatatagatgagttttgatttttttttttattgtgattatatgtttgtgtttctctgatttgtgagctttggttcttcaaattttacttgttatttctcaatgtgtgtttctaatttggatatttgattcattaagcctttggtttcatctagattgtgcattcaaagtcttggaaatatgcagtatataaacatttacaagtaggaaaaaggacgacagtggcttggtaatccccctctcactctttttttctctatttgcaggttgatttgtcgaggcactcaacttggcttctggtcatgcatgctcgattgaaggcaaaaaagaacaaggttagggccttctcttgaagactttgatgagcttgatgatcatcttcttggtagtgtttcatttcaccttttatatgtgtgtgtgtatatatgtacacaatcttttgggctcttagtttactgggtgtttgtttttctcatgttgattgtagatgttatttgggttttctatagtttctatatgaatataagattgttgggtttgattttttttttcccagaaattgaatatttgatgtttaaaactcttatttccatgtagatttgttttacttggattcattttctttgaaatttttagaaaagaaattgaattatttataagattgactaatgagtagttagtttttctaatgtggaccataacttgaacattctcttcatcccagaggtagctttaacattttcaatttttagtatataaattgttgttttggaactcataatttgattaagtttttcatctagatatatagtttgataaatatgatttgtcacacttttagtttgaatctt

SEQ ID NO: 57690 - DNA, 1102 bp, Cannabis sativa
aaagagagagttttgagttctgaggttccaatctccaaagctcatactttagattcacattcagtttagagagagagagagtccaagattatagtgactgtgtgtggagagatgtaaagggagtatcactcttgaagtgatatcccttaatgtgaggcatttctttgtaatactttactgtgttgagttgtaatcttggactcattctattgtatactactgactattcttatttaataaagatccatcattcatccattttagaactaagttttctttgtctattttcaattaagttcaataagttttagttttatgattgattttagttttgaattgtgtttcttggacattgttactgttgtaacagcctgttttaagagtgaggattcaccacaccatatgtaaagatattggtacgtagaaccaacacaaattttaaggtgataatatttaaatcccaaaaaattattactgggattggaatcatctagcaaccatgtgtaagatgaaaatgtaaacataattttataaaagttgctttgacataattatgcattattttacattttattgtatctaattgggatctattcatttgatgcgctatactttatatctaaatataaatttggtactatgtgcattcaataatagtgttgtaaatttgtgcgtgtcgtgctggcctgccttatatttatccatactttatttttaaaaaaacaaaaaaataggttttgtcgtgtcgtgcatagaaaaatatgattcgttaagtgtcgtgcaaacattttcaaaggataggcccgacacgacccgtaggtcatgtattttcaacgttaaacaaattggctctattttgttaaatgcgcctaagcctcgcatccttatgttatgttgccaaatcattttcaaaaagtgttgctaaagaggttgtacatttgtctgccttttgaaggcgttgagtgaaccaagtttgcagtgtggacttgatgaattcagcaaaagtagttattggatatttattgaatgtttttgtcacactgttgaagcttttgacatattgctggtcattatgttttaccgatcacctggacaataagga

SEQ ID NO: 57691 - DNA, 846 bp, Cannabis sativa
aagaacactttgctggtgcagagcaccaagaacttagaacaaaccagatgagttctttactggtgcagagcaccaagaaccagaacagagattttgtgaaaaagagagtaatgatgtagtaaaaccacaccctctcaacatgactaagtctttattatataggcactcaaagttgttacaatataacagaaacaaacagaaaagaggctaacaactttaatagacacaaaataacggtattaactaccgtgactgtttacaaaatggtctttcattcaatttcaaaatgaaatagtcatttttcactaaaataatggaatgactttttaatactttaatatgcaaccaaataaaagaatagaatgaaaattgtttactttccattccattcattacctccaaccaaacgtcaccttaattttcaagtctctcgaaataaaatttcccttttattattattattttcatattgtactaactctattaatttcatattgtggtagttttagatttttgtaaactgaaattttttattcaattagactaacttgatctcaatgatgatagaaacatcactcgcgacattaaagccaaaaaatacaatcagcatttaaatgagaagctcttgcaatttgatgagcaactcgattagtggatcattttataaaatttaacgaaacattactaaagaattcaaaagatatttgcaatcttccacaacacctccaaacatagataacatcaccttaggactacaaaatcttggactaatgccagacaatcgatcttgatgctactgaccattagtaaatttcgtttcaaccacgacaacacctccatttgagc

SEQ ID NO: 57692 - DNA, 838 bp, Cannabis sativa
  modified_base (231)..(238): a, c, t, g, unknown or other
ttaaaacaagtaaagtgggtatacaatgtaattttttcaattatattcctctccagacttcgacccacactcagttgaacgacaccatcacacttgggctttgtgtgatatttatggtcattgttggactaacttcccactccctcttctcatgaaatattcggctactattatatgaatacaacacaatataatatgggtttgtttggtacgttgtattaggtcgtattnnnnnnnnttatattatattatattgaattagattatatattatatttttatataatactatgttaaactttaatttataataaaatattatatatttgggtgcttataaaagttattataccacatatagttttgtataaaaatattgcatgaagtacaattcaatatcatattatacaatacaatatagtgtaatgcggtataccaaataaaccctatacgaacattttaactctttttacttttaattggtccaaataagctctatataggatgaggaagaatgcactcgcgccctacatcagaattaagttataaatatatttatgtacagttcaacatcactttctgaggctatgttaatttgtcatcccacattttttttttgtttggaaaaaggttacaatatagcacggtttttgtgtgtatattactcaaacttggtaatatttttgctaataatccaaacttggtaatttgatataatgagtttggaggaattatcatatgttggatgggtttaaaatagtaaatgttaggggtatattgagaaatacctcttttatttatcaattaaccaaaactacctctaattttatatttaatt

SEQ ID NO: 57693 - DNA, 1061 bp, Cannabis sativa
gtcagattgaatgtatttaaaatcaacctggaaatatctaactctataaatatttttaatttataacccaatcctactaattaggctatgggctgtgttgggttattaaattgaggaatgtctcttttttgtatcaattaaccaaaaatacatctatattagatttgattgaaatatacccaattttacaagtgcattacctaatatacccttcacacaagtctcctccatagccattaacacccccaacgggactccaaattctgccatctatcatcatcaacatattatggagtcttcatactaattaaaaaccttaaagtaataagcatgaacatcgtgataaataattaaagcaaaattgataaacaaaataaataaagaaaatattgtacactcagttcaaatccaacactcggttccatttttattttattttttctttttgaaaggttggtgttggcaataggcttgcacttccaaaacaaattctctaccaatcttctttgaaaccatcaaccatagcaactcatggagaacaacaacagtccgtgtctcaggttgatcaatgttcagaggatgataaaatgattgcaaagcctacgaaggataacagtgaagctcatggagcttcctataggcagagatggctgagaagcttttagagaaaattaaaaagaatatcaggttagaacataaataaagatggtgaatggaaggggtataatgggaataaaaactgaaaaagaaggtataagcgagagaatttaaaactaaaggtaaaaataagaaagcctaacttaaaaagggtatcagattaaatttcctcattttagaattaaaacattcaacataaccataagttttaaaattattacatttatccataaactcatagataaccctaaattttagttgaccttaggaaatataaaaaaatttgggcccttcttaataaaataggtgtatttttgaaacactaaaaattttatatgtatttttaaaaatatttttttagctcctaagttgagtgggcccacgcggatgtagcccatcttaac

SEQ ID NO: 57694 - DNA, 1306 bp, Cannabis sativa
gtccttcctgcctaaaacgatgatatcattctttgctttcaatgtcgcctaatgattcctcttcatgagggccttctcctctcgggcttcatcacgaagagcctcaatctggtcctctgactccctaagcttcctcacgaccttgtccatgctgccaaactctgacacggtgaacccttgatcgatcaaagtcctggaaagtcgaccggccttcgaagaattctaagcaatcataaaagataaggttagaacttcaaaaataaaagcataaaagaggcgtggaaaattgacacttaatgcagtcaaggcaacgctcatgtcttggatctggtaaacggggttggaagaagcacatgctgcatacctcttggtgggaagttgggctaaagcaacagccaaatgactcaccatctctaaggccaacggagccaggttaggccccataaagcatttaaaccagcctatcatgggatccaaatttaaatcccagacatccccggtattttcgcctcgaaagggaccatcttgggcctcccttagccacttctttagggccttcgcttcagcatctcccctggataattccctcacagtgtaattatgcttggcaatgcagagctggaccctttctttcttaggatgtgcaggagtcaaaataatgcctggaggcacaaaatactcgtcgacctcagaaaaaatccccgagtcaacactagggctaggggtgttaaccttcttcagcttcttcaacggctctggctaagtaacgacgcatttatgctttcggtcgagaagaggaaccacctcttattcctcttcatcaattaagagcacctcctggttcttgagggcttcgacaacaagtccccccggagtcacacttaccctaaagtgctcagacatgtctgactcagggttgtaagtttgggcgagggcgtctaaaaggtcctccatgagtttcgcttttcaaaataagcaagaaatcataatgacaaaaaattacaagtgaaagtatagtgcagcaagactagtcctaccctagtgatctaatgctgcccttgtacagtcataaattaaaaagttggtgttttcatcccctaaaaagctatttgaggaaaggaaccaattcgaggttatgtagcaggaatgatccaaaagaattggtacagaaggaccaaagtccatctgggaccaacccaaataatgacttaaattggagaaataaaaacatttagcattatcgccccaccaggaatggggcattcgaaaactatataatattttatcaaattccactagccttaag

SEQ ID NO: 57695 - DNA, 621 bp, Cannabis sativa
  modified_base (431)..(439): a, c, t, g, unknown or other
agcactagccagttactcactgaccttaggaagcaactggttcatgtaatgggcctgcatctctttgcccttcttcacctctggaagcaccagcaaaggtggagtaggtgctcgagactccccgagactccttggacttagcagcttttggggtagagaggtttgtagcagttagctcctcggaatgatcaatgacctcaccagcaggcctcttttcctttgaagaggacccctcactgcctttagacttttgggccggaggagaggcgctagagtttctgcctattttcttcttcagagcgtcaaacatctgccaagacatgtctgtacagaacgaaaaacaaaatggttagagaaaacagacatccgaaacataaggcataatagtcaagtagctcaaaaataagacaaagtagtatgcaaggtgactnnnnnnnnnagactcaaaagtccatcatcacctaacatcgctcttatttcagacataacagctttcccttattcgaacacaggaggggatagtcgaataggtgaaatgggatcccttatgcaaatcgcatgttaaacaggcctgggcggggccagaagtttcttcttcctcttcagcggagtcacctgctc

SEQ ID NO: 57696 - DNA, 2408 bp, Cannabis sativa
caattctggtttttcgagtgttgtccatacgttattgggaaactttctttgtacccaaatgttggcattccaaggcttctgaattggcctaaattaccaaatgataaggattctcagatgaagatagataacatgaacaacctcgtgttcaatcggtcattgaaaggggtacatgttttgtttttttactttttttatattgttgttttactgttgttttgatatatgtctgttatattttatgttttcattttttttttgttattttatttttcagatttatgtgcataatttttttggttgttgttgttgcagttaaaattacgaaacatctctccacatctattgagagagtgagtttgaagcttgatgactactttttcggtgacactactccggatgttattaaatttaaagttaaaggtgtatccaagtctgttggtgaacctgacttgatgggtgctttttcatcatctgctcatgagcatgtctcccgacatgagtatgaggaattgaaaaaaaatatctttgttgttgttagccagcatgagattcttatgaaatcttttactgaaatgaacaagaagctggacattcttattgaggtgttttcatatttttctaagtcacttttaaaaattttcttttggtattttttcagtcctcccatcctgctcatactcacactagaactcagtttgatgatgctcttcgcacttctgaaaaatgatgatgatgaagagtctatttcagaggaaaatgatgatgctaaaaatgaggatgacaaatgagatgatgatcatgaggatggaactgatgatgatgatgatgaggatcttgatgaagctggagttggtgttgggcaggatgaggctactattggagatgatcgtaatgatggaggtgttgttgttgccgaagttgtttcaaatgatgatgatactggcaaagtggatttttcttccatagatgccaacattgatgatgccaagaagactgaccatttggaagctcttgtagatgttaattaggtatatttttttattccactttcttgtgtttttgttgttttgttattttttatgttgttttaatattttgtcactgttgtttttattgtcagtctgaaaaacatcaaattgatgatgagaaaattgatgttgatgcaactattgtatctgttgttaatgcggtggagaaattggtttgttttatatttttctctttttttagtgtgtttctgtattattttattgttgtgtttactagtgtttttattgttattgtttataaatataacaaatcattgtcttatttttttttcagatggtttcctcaaatcttgtttctggttctgctgagaattctgagaagaataatcttgaaatggttgtttttcaagagactcctattttacgtccttagaagagggatcggaagaaaggagcagttttgaagtctctatacattgagcttgcttctggtgcttccaaatcaggttcatcttttgtttctcctgatgagtctgtttacaaggtggttaaatatgtgggtggtttgtgccccttgaacgacaagattggtgaacttttcgatccccaattggagtctgagtttgacatttggcttggtacatggcttagaaagcaaaaatctaagtaagtttgtttaggtgttttcaattcaatatttgttttttttttctatttttttttttttttgtgtttgttgtctgattttttttttttttgtacaattcattgcgttctggcaggtataataacaactgccaaagaggcgtgcaagcctttttctgtaattttaccctattatttctctatgttagaatttagaggccttcgcaatgaatctaagtttagcacgatggaaccgtttccgattattgttgttgatggtttacccgagcaggtcacatcgtaagttttgtccatcatgttcaatgtcattttcttattttgtaaagttatgttttgttatgtgatttttttcattttctgatgttttattggtgtttttatggtgttttttttttgttattgttgtatagtgattgtggtttatttgtaacatcttttgttgagtattttattgatggcaaattcatcccatcctctgattttgatacggaagttcaccgcgattgtttggctgtgtcattttatcattatggcatcaaaaaataacttgagaacattgaaagtgaatctaaggccctcctagccttccgaagaaataataagtgcttttcaatcagattgtgcttgtttttaatttttagcagtttttatgtagttttttggaacaaacattggtgttcttttatgtttttaagttttttgtagacaatatgtaatctttatttctttattttttttttttagtttttg

SEQ ID NO: 57697 - DNA, 514 bp, Cannabis sativa
gcacacaaggtgtaactttgtcactgatttctcttgacgcgtcatttcgattggggaagctctccacagtgctcaggacctcaaagaaaagaggcccaagttggtagatcggagttgtctccttcgttgacggtacaccatctttaatgcagtcaaaatcttggtcctttgttttggacgttaaagcttcgttttcttatgtcaaaaacaatcctacggtcccttaaactcatatataacccttggcccaagaacaagcttaaacacgtttgaatttgcgtccgtttcaagtcgtaccttcgaagcttcaacaatggtgaaactcaaaacagtgacctctgacccttatataatgttaaaaggcttccgtaggtcgcacataagtggtctcaaacatccactttcacccaggttgcaatccactccaagaacgaaaaaatttttaatatatcgtatacaccgtactctctctctctctctctctccctccctccccctctctctctctctctct

SEQ ID NO: 57698 - DNA, 1190 bp, Cannabis sativa
gagaacactttctcctcccctgtgttaaatcaagatgaccttcagcatgctaaaactcttcaaaatgatctggatgttgctctttataaggaggaagtcttttggaaacaacgttcacgtgcttcctggctgaaggctggcgataaaaacactaaatacttccaccatagagcttcctctaggcatagacataataccattagctacattacattgtctaatggcttggtcatccaagatttcaaccttgtttgtcaccatttcagagaattttatacctccctctcctcttttcagggaagtgattccactgccattcattttattcttcaagggatttcttgttctcttaatactgcccaataccaatttcttagtcaaccttttacttctgatgaagttcaatcgactttgtctcaattgcctggtgacaaagctcctggttctgatgggcttaatgcacaattttatcaaaagaattggaccaccgtgggaaatagtttttgtgctgcagttcttaatgttcttaacaatcattctgacatctcttcaattaatgaaaccattttggttctgattcccaaaaagcagaatgcttctcttcttaaggactttaggccgattagcctttgtacaactatctataaggttatagctaaggctattgctaataggctcaagttggttctgatgacttgatttctaataatcaaagtgcttttcttagtgaccggattatctttcataatgtgctcattgcaaatgaggtcattcaagccatccttactaaattcgggtttccatctactattgtttctcttattcttaagtgtctttcctctgtttctttcaagatatctattaataatgttcttttaccttctttttttctcccacctaagagaggaattttataggcaaggggatccactttccccatacctttttctcctagttgctgagggtctttctgcagctgttcgtgccaagtctagacttactagttttaaaggtatctctatctgtagatccgcaccttccatttctcaccttcttttcgctgatgatagtcttctgttcactactacttctcataataattgtagtattattaaagatattctttctctttaccataatgctacaggtcaatcggttaacttctccaaatcttccatccttttttcgcc

SEQ ID NO: 57699 - DNA, 825 bp, Cannabis sativa
tgggaaggaaatttttatgtttttaattttttgtttttttaattttggttttatgggtagaattaaggtttatttttatttttatttttatttttggatgactgtatcaacgttatcgatgataaacttatgctgaactctttgatattatttagtatgtgtgaaaaacttttagattgtgtgcttaacctgttatgcttgcttttgatattgtgatatgaattatgtgttgttttacttattcaatatatattgtgattttatgtgcctatgtagacttggtttgttttggttgatattgaaataactagaacttgtatgattaatttttgtatgattaatttattaaggcaaaatcctaaatctttgttgtgtagaaatgattaaggcaatttttttttaatcgtttgagccaaaaagctaacattaatacattatcctttgttgttctattttgagcctaattgtttccaatttttattctctattaaaaacaaaatgcatatttatccttgattatgagccatggacttaaataattatccttaccctattttgcaccataaacataggttgttgtatactaaatgaaaaatatgatgtaagtgggaggagaagtttttttgagaattatatttggaaaggatgtatgtgcatagagttatgatccaagtatattacgttaaaaagttctattgttataaagaaatatatatacagatttgaagagaaaaattcttaatgtgaaaaaaaataatagcaagagataaatttgataggattataactttaattgtgtgaacaagaggcatcaaataaaaaaaa

SEQ ID NO: 57700 - DNA, 529 bp, Cannabis sativa
ccgtcgggaaggtctacattagcgatgagttttagttgtcgcctattttgcccattttgcgacggtcgtatatgcgacgattatataaacagacacgaatactttaaacgactatttaaaaacgtcgggaaaaattatttttgtagtggtatcaatctctttcccatacataaaatataacttgtgggggtaacaacattgtatatttctcattaatttaatctccagtaatcttgtgccacatgtcattatacacgccatgtcactcttatcgaaatttaggtcaacaggtatcaaattgactcaaagtatgtaaaaaattatgtcaaaaattactatggaaaacatttacttcaaacctaattagttgaccctttaaaggaaaaaaaagcatatatttgcacataatatttttttcttgaaaaattttaattaatagaaataataatttttaggaaagaaaataatcttaaaatcataattcatatgcttagctaaggatccacataagtaaggacattatagaatg

SEQ ID NO: 57701 - DNA, 814 bp, Cannabis sativa
  modified_base (46)..(68): a, c, t, g, unknown or other
tacaatacatacaaaaagaggtatatttcaattaaatataaaattnnnnnnnnnnnnnnnnnnnnnnntaataaaagtggtatttttcaacatagccctatttttcctttacaaaagatcttatattttcaaaagtgtcattttatataaatgttttgtaaaaatatcatattttgaatggtacctctcaaagcaaaagctggatttattctcatatatttgaggtaggtagataaagatgtagtggatttttggattgtttttcagtatcctttttcatttctaacaaaattataagtaagaattatccaaagcaaaaaaaaaaaaaagaaagaaagaaagaaaaaaaagaaaacaagcgcctacttgggcatgatccttgctcagagcacaatttagtgcccaagtagtggttttgatcctgtctgttttatttcaactcccttcctcagtagtacaagttagggatgtttgcggtgcgggtggtgcagtttttgaccatttttttcaaattaacccgtacatacagtttttctgattttccaaaccgcacccgcaccgcgaaactaaaaacctgtaaaaaccgcaccgcaaaaaatagtgcggtgcggtgtggtttttgtagtttatgcggtttgaactatcaataattaattaaactattacaaatacaacaaactttgagcaaaacttgtcaaaataccataaggcttgaatataaatatgacaaaaagaaaattaagtgtcaataatacaataattagtggactttgagttgaacattcacatactggacctaaataaatataaaaat

SEQ ID NO: 57702 - DNA, 701 bp, Cannabis sativa
tttttttactttgatgaactgaatagaagagaaagataagaaaaattatgaagattggacatgaaaagtcagagaaaggcagagggtccaaaatgggaagggttagcatgtgagccagaaaaagagggaacctactttcctctttcccccttcttataattattattattattaattaatgactaatttagttcttaaatatttaaatttaatttttgtaaataaatatttaaatttaatttttgaatgttttaatatttaagttatattttttaaattttggtaagtattggtggttaagtgtctagtcattattttcttatggttaattagaatttttgttctcttatttgacatgtatcatattatgttcctaaactattcgtgttattaaaaatttctcagaacaattaaaattatttgatttaaagatttttatctaatttcattcaatattgttaatattacgattgttcatgtactaaatcgtgcctaattttaatatgtattgaattacgtctctaaattttcatccatgtgagactttctttagtaaaattagactaaaatacttaaatccaacaatctcaatagtttgagaagaaaattttttatttggtacatgtcaaaatttggagtacaaaaatctaaattaacctttttttttatgggtataattaaattaatctttaaataaaaaa

SEQ ID NO: 57703 - DNA, 1221 bp, Cannabis sativa
tacttcttcttttaggctagtgctcgctctttgtctaatagccatcgcttttgttgaactagtcagaatttgggatcaatatttaggacgtgtgaaatgacaggaggatcaattccgaccatatcctcatgtgaccaggtaaagacgtctaggtttgatctcagaaattttgttaattctgattttacttcgagcaacaaaccctttccaacatttagcttgttggccgggatatctggatcgatctcaatctcttctaattcttctacaggtccaacattactgtttgggtccccaagtcgatgatccacaccttcatcctcatcttgggaagctccctacatggaaatatttttcccttgtctgtgctctggctggaggatacttccttcttagccttggccattgcaaggttataacattctcgagtagtctgctggtttcctctcagacaccctacccaattctttgtttgaaacttcaggcaagagtggaatgtcgatgtgacagcctttaaggcatacaaggctggacgacctaacattacgttaaaggttgaagaaacatttaagacgaggaattgtgccatgatagtcatgctcgttggagcttgcctaaaagtgaggggtaagcgaatttgtcctagaggtgtgactccttggcccgagaaaccatagacaggcaggaaacatgaggttagatccttgagctggagtcccatcttttcataggtagtcttgaacaagatattggaagaggctacattatcaatcatggttctggccaccattttgttagctatctggacctccacgaccaacggctggttgtgtggaaacctgattttggcagcgtcctcatcgttgaaggtgatggtaggtcctcctgtccgttggattttaggcttcctttcttctacggccaggatcacttcttcttgctcgtgctccgttttttgggcatacctctcccgagctttgcccgaatctctaactatgtgcgggcctccaatgatgacttgcaaatgtccatctaccggtggaggtagcaagtcttggttattatcatccttctgattttgatcggccttgacgtacttctgtaaatgcgtgttgtttttccttatcaagaattcaatttcccgcttcaaattgttgcattcgttggtgtcatggtcgtagtatccatgaaatcgataaaactttgtcatgtctctcttgt

SEQ ID NO: 57704 - DNA, 3700 bp, Cannabis sativa
ttgtatgtcaacttctatgtgagagaactgcctcaacggagctgtgaaccccattgaaagttgtctgaagctgattagtgaaggtaccatgagtgcgccttcctatataaatttggatttactcgactattatacttagtttgtatagtgtgtattatacactaagtgtcttaccagtcatcatgtcttgtcttttaatgcgtagtgagattgatgccttgccttgtacatttgaagtcctatggtttctcgttaatgtgcgagacaacagtttgtacatctatatctcgcgtaagaccttgcagtcggcaagttgtaaatatactctgtcaattccacatttaataagttattttataaatttcatgtaattgccccttaaaaagctatttttaataaaaagtactttgcaatgattacaaaaggtatttttgtcataaccccttttggaaaaatgtatgccctctgattttggcagtttttttggtttcgaggtacattaacattaaatgaccaacctttccacttctatttcaaattctttttgctggatcaagtatctctctgatctaacagaaactaacccaagagtataaaatagaaaaaagaaacaacctttgtattatttcttccattttagagactttgagaatttttaagattctttgttgaaaaaccatcatcaattttgcttaaatacttgcatgccatctttgtcattaacattttttctacaagtttcatccgatttaaatttcaacttcaagcactccgagatattttcactacgttcagagattcgcatattgcagagctattcatcgtcccaaactcgaacttcgaacagtaagtggattttcttttaaatatgtcatatgtttattatgttgtatttctaggtttaacgactacctaatttattcatatcgttgtcatctcatttggttttagtaatttttaggcagaactgtatctgggtagatattagggtttagacagttcgtaggttttctaaaatttccaattcaccatcttctggtttgataaatttcttccaagaattgggattgctttcttgtggcagcaatgtcccaatctggttcagaagtttatcgtccacaagatttagaaattgagtttcctaccaaaattggcatcccttacaaacccaaaatttcaaaacccacatccaaattaaagataaacgatgaaaggattagggaacacttagtaaaaatccatcaagaatacaatgctagtcgccatagggacttcttgcaagaaatcagtgaaggcaaacgtcgtttcttacgagaagcagcttggcccgaacctcccaatgtgccttctattcctttggctaaacctctattttttttaccaaaagtcacaattgcttttgaaccacgtgacttggagtttgaaataatgtctcccaagccatgtaaatcaaagattccccaggatcctaatgtcaccttcgaggctgagttcatagaatcgaaggtgcgaactatctcaggctacgtaggtgattcactaacgacttatggaattgagcacgagtgagaatgtcgggtcaagtcagtatgagctggtgagtttagctgttacccacctgtgcgtcttacaagcaagacatctgaggagacctgtggcgagaccagtacaagtgggtcgactggtataggcgcttggagccttgagcacatcaaggcaggggaaataatccccctctgtgattatttcaaggattttgtagaccacctcgggcttgccccattttaactaaatcctgtctcctatagaatccttttaagtttgagggttatgtacaaaattctaaattgggagtgccctactcccgtggaaatagagtatctttactccgttaaagccgttccagcgaggaagaatgctgcaggaggcttttattatcttgacactcactccggcgagcccaaaattattgtggatttggcaaacaaaacatccttcaaggaaaacttcttctgaacaactagcctctccccaattgggaaaacctcttttcgtataattcgtaagtgatttctcgcattagactttaaaattaattcatgtctttttattctaagttatctaactaatttttttttgccagctgtcttgaaaagacctatccccactcttgagacggccgagcgacaaaagcttttgctaactcttccctacgatcttaagtcatgcgattttcttctaagcgaactcaatctgatgtctgtgggcctcttgactgacaaggagtttacttgtgattacaagtgtcctaagtattcttcttggtagcaagttcttgtcccttgacaaaggagaaagctcgggatcacgtggctcgggcactgtatcttcagaacaccgtccctcaggaagctagtgagggagcatctggaattaatcaatgtggttggtcacccacactgcttagggctgagcgtaccactctaggtacattccaagatagccactttaatttttatatttggaaccctctccttgtagatcacataacccataggtttgacaactggtaccctagattccatgtctatattaactgtaatgatttgtactacggtatagtcgagcaatatggtaccatgatagatagggaaagtcacatagatgcgagttgggatttagtagaaccacttgttgattattcctttgatatattcaagatcacaggttgtagggattttaatggatattatggtccttctaccccatcttctagtcataccttgtcttctagtaactatagtaaattccttaggctgaaaattataccctaaactcctctttttcgttatttataattagtgctaacacttttctcttgactcacagacatggatgttatgcagaggaaagggaagaaaagagcgaccaactcaggtgctccttcagatatcgaggtggagcctcttaagagataaaggaaaaccactactcatagaaagaagaaaagctcttagtctactgaccttgaggttcataagactatgattcaggatcaaactcttcctccggtaactgcaagtaccaacgagccttcccccaaaacaactgatgcctctgcctcctcatgtcaggccattgaaacattatctcagaggcaggaaagactggctcagagttcgtccaagagtttggagccgcttgttggcccaactcaaggctctccttccccatgattgggatttaatcaatcatggcgattgggaaggaatgcttacgaggggtttgtctcataccctcttggtaagtttattgccttagtatgtatacatattttatttcttttcttcttcccccttgttttttagacatccttgtttatgaatattcaggcgtctttcatctctttttcctctcagcgatgagttatagaaaggataaaatacttacagagcgaggtcaaaaactcactaggccaacgtgaggtcgtagtcaagaaatggaacgatggtcaataggaaattaatcacctcattaaagaagccgagaggatgaagaagagtcttgaagatgctgagaaagcaacaaatgccaaaactgatgaatgcgaggaactcaaaggggtgctcgaggggaaagaggctgagaccaaatattgatgcaacatgtggccttcgtaccatttatcgagccttgatgg

SEQ ID NO: 57705 - DNA, 5257 bp, Cannabis sativa
aacttattgaacattggtacctgttaagacctttaagagtttactatcatcattgaatgaaatttgagactgttattcttttgagagtgaaggtggaatttttggaacttaatcctccaaaataataataaaaaaattatggctaactattggttaagttagttgaaactgagctatttagctcttttaattttcaatcataacaatttgttatcttgtatgagctatagttataaatagcacctcagtcctatttcattttatatggcttgtactgtgaatgttagagagagagagagagagagagagagttctttgtgactaagaactcgaagggtgtgtacataaggttaagaagaactgcgactgttggtgtgtgtactgagagctctttagatctctaccatcagagtttgtaagttcaattttttatattggattagtgatgatggctctcagctggagtatggctagggatcaattcaatctctaagaccataaccaggataaattcttgtctttcttattgctttttaattttctatttaggttagatacattaatttatttgtatgagtgtttatttgattgtgtttgatctaagtaggtattagatgaatctaattgttgtgtatgaatttctaacaaattagtaaaaatactgtttattttgattcttgcaagtgaagtaataaattacttatctaatgatattcaccaatctaattcagattacatataagtaaacacgtcataaattcattgtaaaaaaatgaatttcccatttttttcctcaattcatgattaactaatgtaaggtagaattaatcttaattatgattatcaaattagactcttagaatcgtggagaaattcgctagctatgcctcaagacaccctaacccataatcgattgatcttaaatatgaaatcacattgtgtgaaagagcaatattgtatttgtactaattgttcacatattctatatattatataatatataaaatagtttgcaattacataacatgtcttctaacctaactagtctatattgagtatatcactcttataaatattttcctttggggacctaacaagcccatttcatctttgtggccaatacacacgtacacaaggattaatggaaagccaataagaacatgcaatattcttatttctttcttttctttctttaattattattaatattaattttattattaaggttttgtgaaattgacatgtacctgattaaactgcaatgtgtatctgaaggtttgttccttctagttctattctagccatactcaaaggcctaactttcataacttttttgagtgttacaactcacatagtcatcacatggatgttacataataatcacacatatatggaaaacaaaagaaaaaaatgacctataagctatgagtatgtatagcatgtacaatttttatatatatagataaaaattaattgcaaagaatggcatgaatgatgggttttaatttattcatcattatttgataaatatatataatccaagtttgagtagatatttctaaatttttgaccaaaaataaatcatcatcatcatcaactcatatatatatatattgagtttaatttgtacattaatttgataaactttctatttgtaaacatttatcagtgttgtgatttggtaattggctaatcactgatgacaccccttgacctaccaaaacaagcaaagccataaatataaatatatttatatgataattgattttaatttatatatcaattcttggctactggaatatattagtgggttttaagctttaattgccttttaagaacattgctaaagaaattgatcccctcccattataacaaccaccagcatgattagatatttgtgggcctttaatctcacattatacaaagtgattagaccttcacacatttttgtgttatatatatatataaattaaacttaattaattagctataatatgttcatgggatttagttttaatgacatttgcagggggttacacttacataatgagtgaaccaaaattttctgcttatgagattgatatgctttattaaaatgtaattattattattattaacctttttttttcttcattcttctaggataagtaataggggtaataaaaaaaaggagaaattaataaaaagagaggtttcgattagagtcccaactcccaagtaattaatttgaacagaattaaccaactcagaagtttgtaattgatttacttttccgatgtaattttccaacttatatctacaatatatatgctcatcttttttgagcaaagagtttcaataagaaatttaattatgtacacatatatatatataccaaatttcttattagataatattataagtgcaaaagtttcttgtaattaatatgaattgatcattcatatatatatatatagatcatttgtcaataagataacgtttgcacgttactaaaacgtacgtatatatatatatgaaacaattttaaaggtctaaaaacctaatagctacattacataaattatagttattaattaagatattgcttctttctttctttctttacttgtttacatatattatataatttttcttatatgaaaacaattcatataattaatatatatttcccaattcagaaaaaacctatattatataatttttttttatatgaaaccatttcatgatcatataattaatatatttcccaattcagaataaacctatcaaacccaagaaaaattaatcaaacactcaaaaccacatatctatataacatctaacactgtgaaatatcacagcaaacataataatataattagcatcaataaattaatatcaacacaaaattataaaatcaaaaaaacaaaaacttgcactcttttttcctctattaatttcatttcaatatagataaacaatatatatatatataaaattaattaatccactaattaattgaaattccaacagaacattaataatcaaaaacaaaaccccataaaaaataataatgaaaactcttcatcttcatcttcaacatcatcatcatcatgaacacaacacttatacacttacacttacacacatatataatatttatatatataggtttaattaatattattacatatgaaaatgatgaagatcatagaccattggatgaagaaggagaagaagaagaatcacaaactacctcatggtgatgatgagaagtagtagtagaaggggtttgatcaggttcccttctatgaaaattcctgtgacaaccacatgcggcgcacgttagtgcagctgtggtaccttcaacaccactggccatgaattctctgcagccgtccacagcgtaacctcctacacccgccgcatgattcttctgacactctccatatctcacgctcatcaccactcccatgcttctagaaacttcttctcttctcaccacaacttgcctcttcctcatcaccaccaccacgattataatcaatttaatttatctaatatatatatatatatatatatatagatatatatagttctattatatctatgtatctaagagagaaagagaaatgagaagagattaattggttttggtggtttatggtactcaagctagctagtacttagccctaaccctagatctatatttatagcatgtaatgattttttatttttttaaaaaaagagagactaattaattaatagttatataattggaccaaagaaggggaaaagggcacagtctacgaatgaccaaccttttactgtattattattgatattattattattattagtaaaagggtaaaaatttgattaattactttagaatttactaccatttaactcggaaatattctttatgaattgaccgtccaactaccccacaaactcattatttttatttatatatattgttttagtagataaaagacgattcttctttcaaataaggcaaaatctctaaataagggagttgagttcagattaaatttagcaaacaatattaatgatattctattaggcaaaaacattagcctccaatgttacaactgtaatataaaattaaatattaaatctaaaacaatttatttaataaccaactataggattaagacatcatctttaaatagtgttagacactactgctagtaccttatagcaatactcgcacaacaccaatcgatataattcgttattagtaatttcttataatatttattaaatcaaaatatctagaacacgatattaaaatacacccaataataatataaggcactccttaattagcattttttgtaaagaaaatgttccttaattaaggtgttaaacatcacaaaaagtagcgtattattatatgtaacaagctaataatagttacatgtacaacatattaatatgatgttagacaacttaaagtattcatttgcatttctcataaagaaaaaagatgtttctactttcaaagtgattgatttaatatagaatattgtaaaaccagctaagctagctatagatatatgtatatatttatttaattaattaataataataagttgatagtaaaggtaggttttgtggggtgcagtgatacgatgtcaacaacaattgtctagtttattgacctaaatacagaaaattcgatagctaagcttgccaacccccatgatcaccataagattctataccacttactcacttctcttcttcttcttcttctttattattattattattataaatattacataataagagaacatacttaatctgattgcatgcactcaaaacctttccatttctatctaatatatttattaactgattgctacttctactttggactttccaaccccgtgatcatcatatatatatatatatgttacactactatcaattcatatatacttttatataaattaaattaatctacttttaattatttgtgcaatatatatatatgatcatgatcgtgatatatatatatttattaataatattaagattatatattagtgcgtacttatttttgagaaattaatatgagctgataatgttgtattttacttgattagatgaagagaaacaaaaagggatataggtgtgtgatatgagtagaataataaaatggtccctattagctttttcttcttcctaattggtcattaatagtacttcaacattttgtatgcgatttatatatatatatatatat

SEQ ID NO: 57706 - DNA, 674 bp, Cannabis sativa
aagcagcaagatttgtggaattcaagaaacacaaaattatcattagtgagctgcgatacactaactaaatttttagttattgcaggcacatgaagaacagatttaagcttaatattggtagaattagatgcaggtaattgagccaaaccaatattagagatgagtaacttcttaccgtctccaacagcaagtccctctgtgccaggatatgggatagccgattcgagatgatcaaggccatttgtgacatgattcgtggcacctgtgtccacataccaaccggagtcatcgccaaaatcagggataaatgatgttgcaaaggcttgagggtcatattcgaactcatgttcagtgacataggcacgaggagtagagttggtggtgggattggaagggcctgagttgcctggtttgggggtgacccaatttttgtcgaagcgataatggcaaactggggcagtgtggccgtaacgtaggcataactggcagagaggcctgttttgtggattctgggctcgataattgggtcttgcaccattcttgaacgattgaggtgggcgatatggattgcttcttgatccagtaaaggcgacattggcttgtagttttagtgcaagatctgttacagaactatgatgttcgaggtgattttcatgagcaagaagaagagcttg

SEQ ID NO: 57707 - DNA, 3908 bp, Cannabis sativa
attctgctgatatattgtggtaatatactgaaattggtaaattatcgatacaatttgcgaaaatgttctgcttattatttttgtgctgccatttctctttcattacatgtgcttggcttcaagagtttcaagtcatctgtcatcagatctatacattatcttgctgttacaagcttttaaaatactatctgtgcattttcaacaacatgattttgcatcctatttattttaccgcagttcactgaactgtataagtaccttcaaatttgttttctatttactagttttattaactcatttaaaaaatacatatccttttgcaggatatgattgaaaatgtcttggagattaaagatacacacgttagagaggtaatgacacctcttgtagatgtagttgccattgatttcggtgctactctcatagattttcacaacttgtggttgactcatcaatattcaaggtacacccaaaatatataaccacagaaatcattgttcaattcactatgacttgacacagtgagtatgtttccagggtccctgtgtttgagcagcgtgtcgataatattgttggtattgcatatgcaatggatctactcgactatgtacagaaggttgtgatttactattttctcttatcctccgagatgtaaatactttgattttttaacatttctctgttttcttaaaattgtatttaacaatctcatagtgtgctgaataataatgttttttattttgaagggagagctactagaaagtactacagttggagatatggctcataaaccagcatactttgtgccaggtaatcttatatgccattttctagaatagctctattctatctatgtaagactttcactgcatgtcgttgccttctaattctgataatgtatttagcagagttggtagtatatggcatatggtgacacataatgtttcacaatagatatatctctagaactcctgtactctgccctggtgacaagtgcttcaaagaaattgttttggtttcctgttgctactagattgctgattgcttttttgtttaggcaatatctttctaggatcagttgcatggggtggatggtaaggtaggtgggccgtattttagtaaattctactgggatgatattaatttcgataggagagtatgctatttttatatttctgctgccatttcttagagagatgattctagtatttaatataatacgttgttcacaccaagcattataaggaggttcaagcttgctatgatcaattttcttcattcataaaggactttatacattggacctttgaaggttgtgttcttccatttaaaattgttgtataattcaacttccttatatttatatttgcaagtatataagcatgtgtgaactggaataatcaattggacatttaaagctaagttctaatgaaaatcagattgtctcttctatttctccaattccctgttaagactcttgcagttaggcagcccttacgataatttttttgtatactcttattatgctgtttatcctgattgtggattatatgatcatcatccatttattatcttctataacatcttagggaaaaaaataatttcacttcaatatttttttatatatctttttttcttttcttttttggatacgacttgattggttatatattacttatggtgcagattcaatgtctgtctggaatcttctaagggagtttcgcatcagaaaggttcacatggccgtggttcttaatgaatatggtggaaccataggggtgtgttcatttgttatgttgtcgttagcttcatgataaattatactaatagtacatcaatatactgtgctcattatggtgcttttatgttcctatcaataatatctcttaactatattttgtttattctgctgtgatcagttagttaccctggaagatgtggttgaggaaattgttggtgaaatcttcgatgaaaatgattcaaaagtaatgtttctatattacatttttcttttctattttcttttcttgataagtagttcatcataatagggcaaggaggtacaatcctatatttttaatggcaataaaagctgcaaaagtgagaaacattgaagatctaacacgcttcaataaatgagcctttgtttccatactaaaatgcctagaggcctttagatttctttctatctacaactatcctttttttttttttttgtgaatatgaatgttaagcatttcatttttttggacagtcctattcctctattgacatctgatcttattttctaaagcttttgctgttttattgaaacaggaggagattcagaaaaaaactggctacattgtgatgcgtgcggagggagtgtttgacgtagatgcaaatacatctattgatcagctttctgaagatctaaatgtcaaaatgccagaggtactaatcattatgttatttcatgttcttgttttccaaggtgtctgctaggttcacctatatgagacttaaaagggaacaactaattcggctacttgctgtattggtagttgctttgtggctgagatggtttatgtgtgctatgctgtaattggtaactacagtacataaccaaaatgaatataggtgttagggcattttggattagtaggagagtggctatgttgaatgagcgattgttatttccctctctttgtttctaagtgtattctgggcatatggttcttcagagtttacatgggccttttggccatggaactggacagagtgtttaccatgccatgactccataaaaccattagttatacaagtcgtagacacgattttagggaaggtggaacaagtaaacgttactagagtttcagaactgagcatgagctgttcgtgttaacactttttgaggatggtggtgctatattggaactgctgaacgaaccagattgacgagaaatgcgatattagtttctgttgattaaattgtttgggttctaaatgctcttgacaacacacaaagctgaggggtgtattgagctttaagacagaatttggaaacaactctatgagtttatcattagagatttttcaaaatggcaggggaccttcatgaagatatttagagctctcagaatggagaaaatttgagtgaatgtttggacaacattgttggagttaagaaaagtttcagccaactgaagtttcagaagttcaactgcattggtgagatacatgatgtgagtcgttcctgggctagtgttgtggaacatgtttaaagtgagatgggctttttgtgtggcggattaattgatgtcgatataggaacaaaatcaattaatctgccacaaataaaataaaataaaatccgtaaagctaacgcaagtagcggtatagttattaatgaaatgagcatcaatttctgctcaggtcttggaaggacaaaccgtcaaatcctttgttttgcagtggttagtagagtatatgaatgaaatgattatcagtgttaggagttatggattagtaggagagtgactatctcgaatgagctattgtttcactgagttgtatgattgtttgatgtcttgtttagagattataactaaataatacaacgaggttgctttgggcactagctgagttctatcagtgtcacaagtggctgcatgttagtattgttttcatagtcacttatgtatgtattgcagggtcatcagtacgaaacagtatctggttttatatgtgaggcgtttggatatattccgaggacaggtgagagcatcaaagtagtcctagaaaatgaaattgaagaagaggagaatggtgaatccaaaccagatcaccaggatcagaaggaaaagcatcagatctttaagcttgaggtgtgttttttcgtacatccactataagtccaagaactccaa

SEQ ID NO: 57708 - DNA, 1047 bp, Cannabis sativa
taaggtaaatagagagtcacaagtgttgcgacacatatctcctaacatcccctggtggcccacacttagtaaaataaattaattctcgagtaaagtgtgtcagcctgtcatgtaacccaattttgagcccaataactttagaattttgtaattgccatgaaacatacttcgatccatctcaaaaaggtatcttaaatacaagttgaaccaagtcatttggataaaaattaagagagttattcttgtttcactaatggtagtaagtacttttcaactccaaatccaacatgtgccatgtcattacgagtcgtgccacctcattatggcgcatgccaaccatgcatgttcttagacacctcgaatgtgttttgacttattttttgatagtgaatcatattttggggttctagggtcccaaaatctcatctcagaaaccctaacaggagacttgtaccatcttttggtgccaaataaagaaggcataggtaggatagggattatgagaagcctttaatggtgtttcttgcttagtttatttagtaatattgatattaaaaaaaaaaatactttggccacattagttcttggctaatttgtgggtgagatctgtgccatcttttggatcacaaagatggcacaagttggccataggtgttctacacctcttggtgacttttctcactttattttggtaccttgatgttaaaaatatactttttccaaggaaaatcttccccattgaatttggtcgacctttgccacttccttgtgcataaacatgacacatgtcggctaagtggtttctacaccacttgatggccttcctcactgtgttttgatgtcttgatgatgaaaaagtacttttgacaacgaacctccttctcatttggtatggctgacatgtgccatttgttagtgcacaaagatggcacaggtctgctagcagggttattgagtgaaaaatagtttctttcacttgtgttatactccttggtgatgaggaattatatttggacaagtttcctttggtagtttgagagtagagac

SEQ ID NO: 57709 - DNA, 542 bp, Cannabis sativa
ccggttaatattttttgagattaataagtgtcatcttctgatgtaccagccgaatttcgggtataacattaatataaaattttgctgaatttgttatatttattttatgttaatatttttagaaattgttttatggagtttcaatttgtattaaattttattatcttttatttaatagttgatatttaaagctaattattagtaatatattaattttatgtataatgtaatattttatttccttttataaattacttctaatcattaactttttataatatgtattacctagattttattttaaatttagtcaatatgaaggttattttttccctttaataatttaatgtttgtgggtaaaatttgcttaatggtttattttgtttagctcttattttaaccttttatggtggctaaataatatgtggattggaggttgatagtgtcatttcggtggctggttgtaccttatttggtggctgcactattttgttttataatttaaaattcattttattttttaaagttcaataagacctttt

SEQ ID NO: 57710 - DNA, 1717 bp, Cannabis sativa
gtaatgggttttatttagggcacaaaaacccaacacaaagtccatccttcaccctctggcacatcagtatcaattttttcttccacgagagccacctcagtgcttgggaactcgagaatgaaatctgccaaggcttgccccttgatcggggatcttggtttgtacttgatgttgaactggcttagctctactgagcatttcaacaaccttcccgatgcttcttgctttgctaagacttgcctcaaagggtagtttgttaaaacttcaatgctatgggcctaaaaataaggtcgcagttttcttgacgatatcaccaaggcaaatgctagtttttccatttgtggatagtgagtctcagcatctaataaacgcttactgacatagtacaccgggtattgccgaccttggtcttcgcgtattagtactgtgctaatcgcatattcttacaccgccaggtaaatggataagacttctccagacatgggttttgacaatattaggggctgccccaaatgcgtttttagagcttgaaaagcttcttcgcatttctcggtccattggaacttcttgttgctttttaagatctgaaaaaactctttgcatttatcagaggatcgtgatataaaatgatttagagcggcgactttacctgtgagactttggacttcttttggcttagtcggggatcgcatttctactaatgctttgatcttcgcagggtttactctattcctcgttgattcaccataaacccgaggaattttcctaggccgactccaaagacacacttaagaggatttagctgcattttatatcgtcccagtatttcgaacattgcttgtaaatggttgagatggtctcttgcatgttgagattgtacgagcatatcgtcaacataaacttccatggtatctccaatcaaatctgcgaacatcatatttaccaacctctgatatgtcgcacctgcgtttatcaaaccgaaaggcattaccttataacaatacaaacctcgatctgtaatgaacgaggtatgttcctgatctagttcatacattgggatttgattatatcccaagtatgcatccatgaagctgagaagctcatgacctgtagtggcatcgagaagttggtcaatgctaggaagtgggaagttgtctttgggacaagctttattcaaatcagtgaaatcaacgcatgtgcgccatgttcctttaggcttgggcacgagtacgggatttgctaaccagtttgggtagaacgactcccttatgaagctgcacgacaagaagcggtctacttcttccttcagtgcttggtacctcgcggggtccattttgcggagcttttgtctgacacctcatacttcagggtcaatgttcaatcgatgacacatgacttgcggagatattccgaccatgtctgaatgtttccaggcgaaaacatccaggttttgcttgagaaaagtgacaagcttctctcgctgttgagaagttagtttagaaccaattttcaaaactttattattatctattggatcaataggtacctcaatggtgtctctcgcggcttgggcagttgcggcatagtcgaggatcctaggatccaaatctggctcgtctttatgcgaaacttcttctattctgaagacctcctgacgaggaggtggtgcctctagcagatagatgacattgactgacttcttttctgcgagtttgac

SEQ ID NO: 57711 - DNA, 1291 bp, Cannabis sativa
atgagagaaaaaacaaagagaaaataaaagaaaaaactcatataagatatcacattattttctttgtgctttttttttatatatatatttatatatatgtatatatatattgatattgatacattgacatgaattaaaaaaatggaatgaaaaaaatatagaaacattttattttcttttattaaggtaaaaaaaagaaaaatactgatttttatctctgatttgaccatttaaataatttaaactaaacttaaaaaaaataataacaaaattggtaaaataaaaaaaaaataatttgtataaatagctatgttctaatattttaaaataaaacaataaaaaatataacaaaaaattaaaaaaaaaaaaaatatatatataatcaagagtgttcaaataatcatatatgacattgacaattgctttttacaaataaaataaaaaataaaattttaacttttgaataaataaaaattaatagaaaatactttagttgtaaaaaattatttaaaaataaataatgtttttatatttattgatattaatatattgatataaaaatctagcaaaattaaaaaaaaaaatagaaagaaaaaaaatataaaaacacttttttattttcttttattaaggtaaaaaaagaaaaacacatattttaatctccaatttgaccatttaaataatttaaactaaacttacaaaaaaaaaaaaattacaacaaaaatgctaaaatcaaaaaacaaatcaatttgtaccatagttatgctctgtattctaaaattgaaataataataataaaaaaacataacaaaacaaaatatgatcaagagtgttcaaatagtcattatatgacattgacaattaaaaaaataaaaaataaaattttaacttttgatcaaataaaaattaagagaacatttttaacttgaacaaataacaatataagaaaattgaatactacaaataaaattattttcataaatatatagataaaaaatgattaataataaaaaattaataaaatacttattgggtaagataatagtcaatcacccataaaagataaaaaaaattcttagactaaagaaaaaaacataaataaagtattatttataacctacatatataacacctaaaaacaatctaaacgatgtgggacttttagtttgtatgtatggattattttataaataaaataagaagatgtgccataatattagaaaaataagatggaaaaaatataagatgccacatagacccctattatgatttcatttatatatatatatat

SEQ ID NO: 57712 - DNA, 2255 bp, Cannabis sativa
  modified_base (1765)..(1775): a, c, t, g, unknown or other
aaaaaaaaaaaaaaaagaacaattttccctgaaacgcctttatgttttaatttttatacacttaatcatcttattttttttttgtgctaaaacccccttaagtttacttttctttgcaaatttaaagatttagttagatattaccgttaaatattaactgaattactattgtatcaattttgagattttactgttacatatacgcaggtgtatatagagtggtcatccagttaatatttaacgataatatttaattgccttgtcaaaattgcatagaaaaataaacatagggattttgccacaaaaaaaaattgaagttaagtgtataaagattaaaacataagatgattttgccgccaaagaaaagataaggaggttaaatgtataaaaattaaaatataaggggattttgccaaaaaaaaaaaataagagagttaagtgtataaaaattaaaacataaatgaatttcgccgcaaattactcaaaaaaaaaaaaattagagaaaatattttaagttttttagctaaaatttagagatgcttattgttggcttagaaaacaataaaaataaataaatgataaggtttttgaggacacttactgcatataaacaacttccaagttctaaataggaatgaagactccacactttaagatcaggctcaaccataaatgtatatattgctgattgaatggttgtcaataaacacatccaaagagttgaatacaagtggtctggacaactggctgaaattggtacctatatatatattggaaaattaattaattagaatattgtcacaacaaattaattaaagaaagaattttataataataataattaacctgcatgatgatccaaaatgaccaacaaagacagcttatgaagagaaatgcacaacccaactccaaattctcatcatctgatattgatgatgctaaaacaagaattgtgtttaataattttggacccttaaccaatgccatgcaaatagctccaccaactgaaaatattgtccctattatctttgcaacacttcttaagctttgaaaattaactttctccattctacaacaagaacaagagaaatcttttttatttatttatttaatttaatttatgtaaattaaattaatttaatttatttaattaccctactatggttgccattacaaatgtcattacaggaagtaaattagtcattgctgttgttattgttgaagaagataagtacaacccttcaaaataggcattctgatttcctgtcacactgccatttatatatgaaaattattaaactcagtcaattaaattaatttttcgtaaaaaaaaaaagaaagataatcaaatttctaacccaataagggaggtgataaaaatcaaacaaaaactcctcaatcccagtgaagtcttattgtatggatttctcctgcaaacatatatataaaaaagaaaatattattgacaataataaatagatttttattttttctaaaaaaaaataagtaaataaatataccatcttgtgaaacaagcaataggggccatgataagagtggctacaccttgtctgtagacaacaaaaacccttggactcattccttgtaataaagcagccctagtgaaaagagcaagtcctgtgtatatgcattgtaatccaaccatagccattgctggcctgtaaccttgaaacccttccatatttttcttttttgcttaaataattcactgaaagaaattatataaagagagagagagagagannnnnnnnnnnagagagagagagagaggtgtaattctcaaatattgtagtgtaacattacatatatatttaatatgcagatttacacgtgtaacatgatcttaaaaattaggaggatatatattcatgaaattgatcagataaagatgataaaataatttggcatgatgatgaaattatttatttgtgtagtggtagctgatgatgtgggaagattagcattgacatagcacactgcaactgaccaaaatgatagtctatcgttgatgccacatggcctcacatgtttcgctcatatatattgatatataataacaataatatttgtgataatattaaagagaaaaatgctaaaggaatcttttattactttttatactgtaataaattctctattgaagaattgtgatcgaataaattatattctaattaagaggttataactaaataaaattacactagaataaaaattaaaaaaccaaaaaatattaa

SEQ ID NO: 57713 - DNA, 988 bp, Cannabis sativa
atatatatagtgaaaattcaaataaaattattattattactttgaaaaaaaaaactattgctaatttgagagctaaaaatgattatggtgatcatcaagctttaaatttcatcaattatacactagtgctatttttttattaacactatatgacttttttttaaaaaaaaaaaaaataacttaatattcatattaattaattaatgtatttatttaagggcccatataattaatttttttaatttaaaaaaattattaaatttatcattttaataattcttttagttttaattttttatttagggaattgagcctataatgttcaaaagtagtattactttaaatttaaattagtctaacacagtatgagatattattttttaacagagaatcttaattcgagcctaatgtcttaattagtccaaaaaaaaatcttccatatttcataaattcaaatcattattaatagtttgttaaaaaaaaatcaaaattttttaggaaactgaaaaaaattgtgaaaatagaaaagaaaaagcaaaaccttctaattaaatgcatatgtaacaaataattggtggatatccatgaataaaaatatactaaatgcaatctcattattttgtttttcttttttttttttttttacaattctaattattattttacatataataattgtccacttgccaaaaaataataatattgtgaatgattatttatattatactatagagagtacaaaaatgagtgtgaatgggagttttattaattcttataattaagcactcctgtttatattttaataatatatattattgtttaataagaaaaaaaataaataaataagaagattttaattaaggttgatttggctcaactttgttgaatcatgacggtgaatggggagcatgttttgatttcatatttcatttatttatatatatatttatatatttaattatatatatatttttataattattaatat

SEQ ID NO: 57714 - DNA, 553 bp, Cannabis sativa
aagagcatctacacaaggtaaaatcagccaaagagttaaggtggctagtggttgagaggaatgaaaacataggaatggaaatgggaatggcaataagaataggaatggaatggaataaaatttaaaatacataaaaataattaataaaaaattattaaattttttctcatcatttattagaatggtctttcatttcatttcaaaatggaattgtcattccaccaaaatagtggaaaggcaatttcattagaatgacattttaacactttaatatgcaacaaaacaaaggaatggaagggagatcgctttcattccatttcattacctccaaccaaacgccacctaaatgccattttgataaaaacaaaacaaaaaaaaaagtcagattctaatgaatgaattatgcttgttttaaaatcattcaggaaccaagactggaaagtctcttctaatcgaggatggagcgctgccatggattgtacaaaacgcaaacaatgaagcctcggccattaggcgccatattgaacttgcactatgtcacttggcacaacat

SEQ ID NO: 57715 - DNA, 1245 bp, Cannabis sativa
aatcatgtccattgagcttctaagtgcttgaactaccgtaagacaatcggtttccaatgtagcatgttgccacccatgactttttatccaactcaatgcttcccgtatgataattgattcagcaagctccggagaagccgaacctgtgaacaagagtgttttcccttggactagcataccatggtgatctctagcaacaaatccgcaaccatacttgttactacttttaaacaacgcagcatcaacattgaccttgattttattttcacttggaacaacccattgctcagctccgtcatgagtcgtataactcgaccaagacgtctcgataagagtattctgagctttactccattgatcaaggaatcccgttgctgtgttcaaaatagcagcagcagtagcagttttttgctgccacacaaagtcgtttcgtgcactccatatcgcccaacagagaaccggtagcaacttccttttatttgcatcagcagtagcaaaagactggatgcaccagtccagaaaattacccgcaccagtagctgcaattgcagtcccaataccaacacaatcccagacctgtttcgctcttgtacacagcaataaagcatgttcaattgactcctctgcatcacggcatattggacaaaggatttgcacatccactctccttaaccacagctgtttcaaagtaggcaaacactccctgccagcacgccaaaccaggtttttaaccttgggagggatttttagcttccaaaactttgtccaaaatttcgtttgctcatcctcttgttgatgccatctgccctttaacttctgtagaagcttataggcactcttgacagagtaaaatcctgaagtttcatgaatccagtttaatttaactcttccttgagtactatgcaaatgtatgtccattataagcttcttgtcccgctcctcaaataaatcatctaagattttcctgtcccaattcccaccccctatctccataagattacacaccttactgcccatcaaaccaggatgagttgacataacaaaaggttgttcttcactaggcagccatggttcatgtaggacattaatctcttccccagtaccaacacaccaccgagttccttttcttaccaaatcttgcgcttcaaggagactacgccaaacgaaacttgggttctttcccaattcagccgaaaggaaagtactattaggaaagtactgagctttgaagacttttgcaaccaa

SEQ ID NO: 57716 - DNA, 1250 bp, Cannabis sativa
ccgtgtgtgtgcatgagtaggggctcgcatgcgagtcgtgtcgtgtgtgtgtgtgtgtgactaggggctcatgtgcgagcctttttgggtgctttcatgcgggtcatgtcgtgtgtgtgagtgtgtgttgtattgtgtcaagtcgttttgcagtatgtgttgtttgtttagggtggagtaaaggtgaaatttgaatgcatattgaagagaatgtcgtgagaggagaaatcaaaccacctcctggacctttacctgcagttggcagcctaaaagaccacctccaacaccaacggtttgcagttcaaaagcaataacttgtctctttgggacctccatgtacctcaggccattagagtctataaataccctattttgaagtgtgagaggggattagaaaattaatagtgtaactcatataatgaatgcaataaaagaaattattcttctactcaagaaatctctgaccatttaaacttgcatttcaccttaactttacctgatttttgaactttgctcttgattctaattttctaaccataaagttagttgacaaattcttaacgtcagctatccaaaaaaaaaaacaaaaaaattctcatctatgtttagtagtttaaaaatggaatgtacttgaaataaattttgattaaagatgtttattataattttcaaatcattctgtcaaatattttcctattaagatctttttcacttagggaggctaattagtaaatgcttatatatatatgtagaaaatttttatgatgggcacacctattttgtcctcatactatgaagacatttttttaaccattgatatgtatgacttttgattatacacattaaataaagtgtagttgcatgtactagattaaaaattaaaggaaaggtctattatgacatgtgtctccaatacaatgtgtcatgtaataaaattattataatttaaatattttttattaatatttaatataatgagacccatttatataattactcacatttatccttttttttcattttttatctttctctctcctctctcctatgtattatcacttcttatttatcttctttacttttttttttcttctttcttaattttttttcttctcatctcatttggattagcaaaatttttatgagtcataaatcattttcgtttaggttagtatgagaatagattttaagatgatacttctaagaaaattaaaaaaaaaaaaaaaaattcttgaaaaataagtttaaac

SEQ ID NO: 57717 - DNA, 982 bp, Cannabis sativa
ttgaagaaaatggaaaggaagaccgtgtatgcctgttgaaaaggtcctatatggcctaaaacagtcccctagcaaatggtacaaaagatttgatgaatatgtactaaaaattagttttgggagaagtgtctatgatagttgtttttatgtcaggtactcaagttgcattatctatcttctcatatatgtagatgatatgctaattgctggaaaacatatgggagaaatagacaaagtcaagaagcttgagcaagaaatttgaaatgaatgaccttggctcacctgaaagaattttagggattgagattataaggaacaaaaaattgagaagcttaaagctctctcaaagtggttacatctctaaaattctattcaaatttggtttcactgatgtgaaatctgttatcccaccctctactcaactcttcaagatatctacttcacaagctccatctaataaagtagatattagctacatgaaaaaggtatcctatactagcattgtaggcagtataatgtaccttatgatctgtacaagaccagatctcagtcatgcagtgagtagggtgagcaaatttatgggacaaactggtgtagagcactcgaaagcaaccaaatggatactcaggtatctaaagaagacacctgaggttggtctcatgtatggaacatatcctactacctcaaatgtagtaggatatgtggattcagactatgctggtgaccttgacacaataagatcccaatctggctatgtgtttctactaaaccagtgtccaataagttggaaatcgaatctccaagctattgtggctctttctacaacagaagcagaatacatagcttgtacaaaagttgtcaaagaagccttgtggctaaaagggataacaagggaactagggattgatcagcagactatttgcattcattgtgacagtcaaagtgctttacatctcagtaagaatcaaatctttcatgagag

SEQ ID NO: 57718 - DNA, 513 bp, Cannabis sativa
tgtgtgagtttactacttgattgcgtatacttgcgtagtaattaataaattttcgcaacatcgacccacaaccttgggttccaaagcttactccattgtaagcctcttccacgaactcactctgctcttgttttgattctcagtactgatctggagaaatattcagatctgtgtaattttctctctgttgtatatctgatctgaatctgagttttttctgttctatttctttgttgataaaaattttggctttttatatgttgttgtagaggagtacaagtataggagacttggttacaaagtttgttaaaacactttgtaactaacttagctaatctatctaggttgtttagaggccaaatgccacataagtttttactgcttgtaatcatattgtatctgttctggtttaaagtgaatatagggatttactttcaacaatttccacctaaatccccatatgcactgtgttgttgtttgagtgtaactgagggtcttagctcgaacccacta

SEQ ID NO: 57719 - DNA, 616 bp, Cannabis sativa
atgaatacaattcctgctctctcttcgtggtcagccataacccaacactctgctgtatggggaatcgtcaaacactctgaacacattctctcatgccattttaaaccagaatgttgttggtaacaatcaatcccctttggacaatcttcaaaacaacagcagtacgcctatttcctttacaccagcaacattgaattctgcttctttggttcataatgaaattacaatggccatcacttcaacgaattccgaggctgatgcaaaaaagaaggcaccagaaagcatgaatcagccccctgctggagcaaactctgatgttactccagcaaaaaatcattatactgctgcatttggatttcagggtggttctcaacgtgttggtctgcctactggtacacaatctgccactaattttgaagcaccatcaataaaggtttcaagtattactaaggttggtacctttgtaccatcatccactactttgccaacatcaccaaatgagagtgatttgactgaagttttcatgctaaacattggacaacctctgggatatgttgctacctatccacctgaagcaaacacaactaatctcttcaacattgcctccaacttcact

SEQ ID NO: 57720 - DNA, 1091 bp, Cannabis sativa
tttcgtgcctcgtttttgtcagttaggagttgtccattaagaagatagttgactataggtgtcatccacatggccaagctatcatttatctcgacatcttccttttcacatatacttggttcgtttaacatctccatcggaaccaagttcagttcatcctattcgttttgcgaggccagttttgcctaggcatcggcattagagatttgttctcttggtatttgctcgattttgaaataatcaaacatttctaagttctttcgaactttctctaggtacttcgccatttttaagcccttagcctagtattccctgagaatttgatttacaatcaattgtgaatcactatggcatatgagatttttaaccttctatacttcagctatcttcaaaccagcgatcaaggcttcatactcagtcttgttattttatgtgtcgaaattaaatctcacagcatagtgaaacttaaagccttctagcaaaattaatattacccttgcacccgagccatgctcattggatgcaccatccacatataatttctaagtatccgcgtctcgctgaacaagcagattttcctctagagttattccttctatcaagaaatctactaaggcttggcccttgatggacgttcgtgggtgataagttatgtcaatttgccccagttcaattgactattttatcaatcttccaaaagcatctggttttgataaaacttgtctcaggggttgatcagttaacactttaatcggatgtgcctggaagtagggttgtaacttgtgagacgcgtggattaggcataaagcaagtttttcaagagggggatacctcgattctgcccccaggttccttttactaacatagtaaacaggttgctggtgctttccctcttctcgcactattgcagcactaattgcattttctgagacagccaagtagaggtgtaatgtctctccaattactggtttccccaaaactagaggtgtcgataaatacctttttatgctttaaaggcctcctcgcactcttctgtccactcaaattttttgttgcctcgcagtatattgaagttgttggaaattatttta

SEQ ID NO: 57721 - DNA, 734 bp, Cannabis sativa
attgtggtgtggggctaaaaggttttgtatttgttctttcaattttagagagagaaagcgccgacttgatagatagagagagagagagagaggagactgttagtgtactgtagttgagtgtggtgacagttgggccatttagaccaagatattttgttgaatcagattttgggatggctttagtggttgaaatttgaatgaatgatttcatagagcagggctacctggtcaaaattcttagccatggaggttaagaccttaataagagaaagagaagggccaattagaattgaggaagaggtaaactttagatttcggatagaatcatctttaattagttaattaatttgttcaaacttatcttgtctcagctttttaatcaattgggtgttgtcctctaatgtgaatttcatgtgatgaaaatttattaaacagtgagcatttgcattaaggaggatctcaactgaaggttttgcagaaccaaatggcactcatgagcattgggcgctatcgatggctggttaccgtggtcggagaagaaggtcttgcccgacactttctctctccccggcgataatggctcgtcccgtggtcggagaagaaggtcttgccggatgctgctcgtggtcgaagaagaaccagccgccacctttttctctctccccgactagttccatagatctaggatttttagtttttgttttgtacaaaatttattttttatctaaaattac

SEQ ID NO: 57722 - DNA, 1109 bp, Cannabis sativa
aagtttaggagtaggcattcgatttattaaaaatactgcagtacgataagcctcatcccaatattttaaaggtagagaagagtgagctaagagagttaacccactttctactatgtgtctatgtttgcgttcagctaccccattcatgtgtgtgaggacaagataatttgtgaataatcccattttcatttaagagttgtgtgaaagcttgatattccccaccccaatcagtttgaagctttttaatcttgtagccaagttgcaattcaacttgagctttgaaagtgataaaggttggtaaagcctcacatttggttcttaacatatagatccaggtgtgcctagaataagcatcaataaaactaatgtaatatttgtatccactagaggagacaataggagcagggccccatagatctgagtgcaaaagttgtaaaggttcagtatattctgtagtagaattaggaaaagggaatttatgatgtttgcctaaacaacatgcagcacaaagatcagaaaaattagcatcagttttattgcttattttgatgttacaagatgacaaggcactttgtacaatcttggcagtgggatgccctagtctattgtgccaaagagagaattgagaattaattggtggtatagtgacactattacattgatcttttggattggaaagagtaggtgactcgggttgtgatacagagcacctatttgtggcaagattttgtagttgaatagagtcaaacttgtagagaccttgatcaagcctcccaaccagcaaggtcctctgagtgacctgatctttgacacaatagtaagatgggtgaaattcaaagtaaacaaagttatcttgggcaaattgagacacactaagtaagttcttggtgatgttaggcacatgcaacaaattgtttaatacaagttgttgagaatgaaaaggagaaaggataaaggatttaccaatgttttggatattcagaccagatccatctcccatatgtatttgctgatctcctgtgtaatccgaggagtagattagattttgaggattaggagtgaggtggtgagtggctcctgagtcaggataccagctgctgtcttgaacc

SEQ ID NO: 57723 - DNA, 995 bp, Cannabis sativa
aatacctacatcactaagcttcttcatctatgttatatctggcatatctttactaaccaaactaatatcttcactgtcaacatcgaaagatgcaccgcaataagattccacattctcgttgtgtgattgcacgttcataatataataatctctagaatttatttttaaagcaacatgtcatcctttgtttgacacatcttccatatatacattacttgttttgcttgagaagctagtataaatgcctcatcttcacgcatcaattttgaaaactttactcttgtgcaatctttctcttttttaataccactactcgaaagtcaatcacacttaaataacacaacacgatttcttgaacaataatctagttctataatatctgttaatattctaaaaaatataacatctccaaaaatagaatttggatccctactatttgaaaaactttgagtcatggcagtcataataactccactattttgagttcttaatttcttttcgatttcttttgtatgaaaccgaaaccatttattaaatattctttaaatcaaatgaatgtattatttggtcctttagccaaacaataaagatcttcagaaagtcgattatgcccattatcatgtaattcttctgcctaattcgacaaaaaaaaaattaataaataaattactacactcaatgtgtttgtgaactcattaagtaatacaaataattatgaattgaaaataagcttaccttttgtgcaaaccacgaaggaaatgtctagctatgaatctgatttacaatcattgctctttgacgagaattttgttgtgcaatgatattgcgatgatccctacgaaattaatatgcataagacatacttacttaatgtttcaatattttttttttctttttttgatcaagaaggaacaaacttcattaatcacaagctattacaaaactatacaagccaataaaaacggctataaacaagaattacataaaaattctct

SEQ ID NO: 57724 - DNA, 911 bp, Cannabis sativa
tgtgcgagatagatgttttcacgagtttcattacgctaggtgtaaatggtttatattggcacttatttgtcgtggttcttttgatttttcttgtccttggctgactccttagagttatctttcctctttaaattagaggcccctggattgtcagccttggtcaagatggtgcttgctgagacaatgttaggattacctcccgagccagtctttaacaacttcatctcttttcttgcttcctctttttgaacaaacacttgagctctttcattgaacttgctgctgtttttcactgagcgaccctgcaggtcatcccacagcttgcctccaaaagttgtaagatcagtcgtgatccctacttgaagagcagtaagctgggtactatcatccaaatttctaaccggcacagtagctgtgctaaagggacttaagtaggacttaagcatcttgctcggctgttgctttatgttagtgagggaggaagtcgcaggtcgtctatcccttgctacttggaattgtttctcttgatatccctatacaactgtgttttccaaagaggtgattgaatgatgggtaaatttgttgaatcagctgctcgccgctacaactagcgaagtggggaataaaatatagtgtaaattattcgtaacattgctggctcgcatgatagtattaaaattattaaagtgtgagactggatctgtagtcccatatatgatgagacgtgatggttcttgaatccatgcaggaattcagtactcttaatgtctggatggaaaggctcgagttcctcatccgatttgtatctagaatgttttccatattccccaacttcatacgtcctgaatttgtcctctaactcatcaatttgcaattgtatatgatcctggcgaacgtcaagtttttcctgg

SEQ ID NO: 57725 - DNA, 1422 bp, Cannabis sativa
tggcgccaacgcgaacttacaaaacttacacacaaaaaaaataggcaccgacgtaagcctacaaagtaaaaacaaaagggggggagggctccatatatagagaaacttttcctctgctgaaatgacctccgcattgcaagccaccctcgacggttagaggaagaaggatgacgtataatctcagaaaccacccgaggtaactcttgaggaaaggaagaagcagatatacagaaaactgagggcgaagcatccgtaggaacagggacctcttcgaaattctcagactgggcagtaactcgaactcaggataataagtcgtcgtcgtctgagttgagcttccctttgacacctcgggctcctccttagccgcctcagctggtgccaacagaggaggaaaaatagcaaaagggcacatagctagaggtggcgcaacttcgactccagaagcagcgtaagtccctaagcccagtgctgcttgctcgaaatagggacagctgcagacctctgaaaaatgcaatggggggaagcgtagtaggttcgaagtcatgaaaactcgaaaaaggattcaatgaaagaaaagcaggatccaggggctgcaagcctgagaaaatgttggatgaggaaggctcttttgagtgaggcatctggtttttaagtagggaagccataatgcagaaaggataaacaaagagcttaactaaacttacccagaaaaagaaaagagagtcgaaagaattcttagagaaaaaagctcaactagaagcttatttatacaactaaaagattgcatgcagttaaataaagatgccacaaaaacggaagtgaaaagtcactttttgcattaaaacacgtgccaagcgaacacgtgtacccaaatttcaagaagtggccctaagagtatatatgtctttccactttccaaagcaccctattcaaaaaaaaaaaaaacacggaataagtacgtataaatatatgtataaatgataagtaataaatacacttaacgtagccgcaactttcccaaccttatatgaaacgaacacaaaacataagaagggacaccaagagtaataaatacatacccattaaaagatcgtaacctaaacacaggttacacaaaaaaagagagaagaaaagacatagtaaacagcgattgtatacaaacgaaagccatgcacaaggaaataacaaatagctaacaaaacctaaacttaggaatcagaagcgctcgcgatcgggatggtgccagcagagtatgcatagagaacccgagattacgataaacccccgaacaaccctccttaggcaccgacggcagcccgtagggacgccagggggtaaaagggagccccctcccttaaaaattcctccatacgcctctcgttagccaaacactccctctccaggtcctcatcccaagcc

SEQ ID NO: 57726 - DNA, 890 bp, Cannabis sativa
gactttatcaatcttccagaagcatctcgttttgaaaaaacttgtctcgggggttgaacagctaacaccttaattggatatgcctggaagtatggccttagtttgcgagatgcatgaattaggcatagtgcgagttttttaagaggtgggtatctcgattctgcccccagtaaccttttactaacatattaaactggttgctggtgctttccctcttctcgcactattgctgcactaattgaattttctgagacaaccaagtagaggagtaagattgctcaagttattggtttcgccaaaattggaggtgttaacaagtgcctctttatgcttttaaaggcctcctcgcattcatctatccactcaaattttttgttgccttgcaatacattgaaaaatggtaggcacttatcagttgatttcgagatgaatctgttaagagctgccattcttcctgttaaggcattaacttccggtggttttgttggtgatggcatttctatcaaagccttaattttctcagaatttgcttcaatgcccctcgcattgaccatgaatccctgaaattttcctgaggagactccaaaggaacactttttggggtttagttttatgttgtactttcttagtatctcaaagcactccgcgaggtcttttgtgtgatctgcacttattatcaaattcaccaacatatcatccacatagacctccatgttttttcctatgtattttttgtaattttatgccctaaataaaacccatttcaatctaatctgatttgttatcaataaaagattaaaagtcatttatgtttacatgtggtaaatataatccaacaacaacttgtttgacatttataagtctttgtcaaagtcgcaaaattaattttt

SEQ ID NO: 57727 - DNA, 1250 bp, Cannabis sativa
  modified_base (1145)..(1150): a, c, t, g, unknown or other
taaaacatttacttcaggaaatgtttgtcaaaatctatatcggtattagattactttttattgttcttaaagaatacaagaacatatacgtgaatatatattaatctcttttattatatttcagttaattatatgatggatattatatttgcataatcttcaagatatatgcaagatttatatagattttctctactatatcatagacatacatatattgtaaatattataaatgataagaacatactattgttggattaaacctccacttgcactgataatggacttaatacaaggatagaatattaaatacaagcaaattcctaatttggccttcgtcctctagaaaccctaacagaaattagttagaatggattaggttaatccacacctaactaatttctgtaactaactaatacagatacaaagtaaaaaccctagatctatatatacctgcaactattcacaaccagatacggttgagagaatttcttcaagatccagaggtgaaacgcttgaagaagaaggagttgatgctctcacatgcacaagaaaacaacagagagttagtatagtgagagagaaagggattaagcacaatatatgtactaaatatagagattaccagtcgaaaaactatacctgtgacttggaatctccatccttgtaattctgatcatcattttgtagtggaatcgagctctcaatatgaggagcagctcaaacggagacgtagccaatttattggtgaacttcaggaaaaatctggtgttttctaaccctattctactagttttgtgtgtgtgtgtttgaggatagatcagatcgtgttggatctgatcttgtgtttgtatttgatttgggatttctgggttgtttgagggttggcttcgagtttctcagagagaaactctctgctagggtttcgaagcaaatcttaaggctgagggaaagtgattgagaagtttctcgatccttggttttgtctttggcaaaacggggtcgtattgacccttctgactttgaaaagtcagggtttagtaaaaggtcgaaattgaccttgtctaatactgattatttaatgttggtgtaggttaaattggtaaaaagctactaattcctacaactatatatatatatatatnnnnnntcaataataaacatataaaaacatatacatacatatataagatatagatatatagataaaaagaaaaagaaaaaaaagatttttgaaattgtttcagtca

SEQ ID NO: 57728 - DNA, 944 bp, Cannabis sativa
  modified_base (883)..(896): a, c, t, g, unknown or other
aaaagtaaaaatgtatatattataaaatgggagttatggaaatgaaaagttagaattagaatgaaatgagattaaattattgggttattagcttatcatattattataataattataaaatgggagttatggaaatgaaaagttggaattagaatgaaatgagattaaattattagattatcaacttatcatattataataataaaaaatacattaattttattattcaattgtcacatattaatattaatattaattaaatgatatttaggctagtctttttattagtcattactattggggttacttttctttttattagttttcaactaaaaagtttagaaaaattccaaattagagaaattgtaagaatgaaaggagaagatgtcacctcacctcttcaaaagcttcctttatatatagatactagtaaacataaccgcactttgcgcggttttgtaataaaataaatatagttttagagttttattttataaaagttatcggtgatcatctttattttgttaaatgttaattttaggttctttgttttacaaaataaacacatgatgacactttgagattgattttggtcaaatatgttaaaacttcctttcttagcctctctagctaactattgtgatccaaattttaatctgaatatatttatattgtataccattttataaaaatatataggattaagttgtggttcagtagtggtcatgtaatgaccgatttagtaatttggattagtaaagataattagcgcaaatttttattattttattattatttatgaatttatttaattgtggaccccaatgtttagaaataaatattcgagttgtaacttctcaattttggagattttattaaactnnnnnnnnnnnnnntagcttatatgtgaaatatgttatttatgtaatttttgttcggcgaca

SEQ ID NO: 57729 - DNA, 821 bp, Cannabis sativa
tgtaatatggttttcctccgccataagcgaggcttcttaatatatttctaggagggtcctgtctatgacttatggaccctttctctttcaaaaaacaaaaaataatttgttgattttgtagcataattaaaaggtaaaataaaattttgtaagacaaaattaactccaagggcaaaatggtaattttaccaaaaattctaaaaaatgacccgaagtagattcaacaaagattcatcaaggggtcaagaattcaagaccctattcaaaagaggactttaaaagctcaaagtcaaaagtcaaccctgaaagtcaaagtcaaagtcaaactcaaagtcaactttggatcaaaacatgtaaatcaaactaggaagctcatctacatcaagactacacacaatcaaatggtataagtttactttagtcttcttaaagaagggtttataagttcaaattttagtccactaacttgtgcgacaagttttctcacccaatggttcaaaaaattttttgattgactttttaaatcacatattgtttaactaagagaacaaaattagaattttctaaaattggataatcgaatagggccgttttagtttgaaaaattggactttttgccactgccaggaattcggttaaccggtccccaaaaggttaaccggttcacttgaaatcggtttaccagtgaaccgatttgcccagtggcagtctcgtttttcgcgtccattggctataaacggttatttttcacccaaacactatataaactcgattttcactcaaaaaatagagttggctgagcatttatgtctaatacctaa

SEQ ID NO: 57730 - DNA, 864 bp, Cannabis sativa
gtaagtggtcaactctatctcattgagcattacaaaattagtcactttaattagatagcataaatcaacaaatcattcttttcggtgttactgctatatatacaactatcttagaatgagacggtaaagctctaatatttttgtatatacatgtaataattttaaagaagtatcgctaatcaatcacaaaacaacacatctaaacaacgttagacatctctagtacttaatagcaatactattttttccctcaacaaaaaaacaaatactactaataaattactcataaaatatgtatttttttattttagaatagagtaaatcatattaaatttatttagttggcactaaactaacctaaatttccaaacaattaataatcgcttgagtccagaaaattgcatacctacgcaaccatctgggatgtacgggttcccttcgtagccatcagagcaccgacaaagatagccttgcctagaactggaatttacacacacactattctccttgcaaccgtaagtcgccttgttcttctccgcaacttggcaggaatcgaacccaacagcccaatcaaaaataaccggaaccgcagagacattggtgaattcttctaaccttgaaaatttgaactcagtttcttgcataacaaaagcatagctacacgggttgaaactccaaacgctcctatgattatcgttgcttcccaacatcataccgtacttagtaagttgactggggatggaagtttggcaacagcctacgccagagcaagacttgaggtccacttcgtgggcgtaactacacgaggatatgcagcccgttgtgtagttattatcgcctctaaagccattgatggttgccaaa

SEQ ID NO: 57731 - DNA, 1761 bp, Cannabis sativa
aatatccaattggatcggatcggatgttggatgaagtgtccaaaaatccaatacatccaacatctaagagtaattaaattttatatggttatacgtaaatttatatatgtacatataaaaattaacattaaaattttactcttttgtttagattggatccaatacatacgggacctaaaatattgcatggattcaatccgatcaaaaaatattacgcctaaaattgaataaatttaaattaaactaataaatatatatgaaatacattcaacggatagaaccgatctaatctaatatctaatagatgttggatcgattatggtaaaatctaacatccaatatgtaattggatcgaatttgtataggcctaaaaatattggataaaatccaataaacatccctaagtagatatagtaaaagaaaatatattttctttttctttaaaaagaaaataaagaaatatgcataaaattaaaagtactgtagcatgagcaaattcatatacgtgccatgatgaaggtaacacacgcccaattttcgtggttagctttttcaaaacgtgtttttcgtgttttttccttttacttttttattattcagatcatcactcgactttaccaacaaaaaaattttcttttttttttttttgaaagaaaacatatttttcattaacaaacaaaacaacatcactaataataataatatcctttcgtaggtttttaactatttacaacttataatttattttgtatccacagcccacccactgtacagtagatcaatgtgcttttctctaaaatatagagaacataaatcatatttactttccctcaaaagaataaactttttcatatttacttaaaattagtcatattttaaataatttttgcagcactattgttcctggttagtttttatttatttgttatatgtgtaatatgtatatttatatttatacgatatatacaatatagtaaaaataaaaatatagttttttgacataaaaataaaaatatttaaataatgttaaaacaaaaatagataaaaaaaaaattaagttcaagaggatgccaaaattgcccactctattgaaaatgtcaagtatgtttgcgagacaagtaacacattctttccttggcaaagcatttaattttaaatcatgacaaggtataaattatttcttaattaatgcatacatattgtatattgatgcatattataattcatattttgtaagttttcttatttttggataccacaaccactcacagatcactatcgaaagaacaattggacttccagatagagcaatactaggaaggtcaatttttatattttggcacaataacttttcactttaatgtttgttttggacattttttatatcgttagaaaacttgtgaaaagctctacagcatggtgcataagttcgagtcaaattatgtgtttcattttaggatgagtcccccacgtaatttggtaggaaatcctaaattttataaaagtattattaagtgtttagaatagacacttactagttttacgttactgtgacttagagcctctaatagtcgactaatttttctagtcaagttgacaggcacacctaattacgaaattaatgtaaagttagtatacatatatatgtacatgtgcacatgttttagatatacatattttatgataccatttatcttgtatactagaaataacagtatggatatacatagagtcgcgtttagatagtgatacctagtgata

SEQ ID NO: 57732 - DNA, 657 bp, Cannabis sativa
gaccatattgtaagtaatcatcaacttattagaaaataataccttatggagatgagttaagagaatggtcttcttaattatactaaaattacatttatatgtaattcccaaattaaaaatacaaaaaaccattttttagtttaggtcggtagtgtagggaggtgggtggaagtggtggtggtggaaatctccattaacaagaattggtttgtattttttatgtgatgactaataagggtggcccaccacattgacttgattgaataggtattgtacacgtggcagttagtggttacgtggactagtatgagcttaccatgctccacacgtggacatgtcattcgtacacgcgttgcatagactataattgtaaaaactaataattgaaaagaaactcactaaatataaaaatctggtgatgaccccacatttaaggccatgtttggaaagataaaattagagtcagaagcatagatagagtctagaagagagaacttgcagttgcagtcttgcagatggagaacatagtacatacgttgtgtttggttatttttttttttcattgaaatatacacagtatttgttcatttcaaaatggttaattattgggtttttgtcctaaaatagtaaaacatattttcttgtatttttctctac

SEQ ID NO: 57733 - DNA, 869 bp, Cannabis sativa
tctagttttgcatagtgactgagaactataaagttagaaaaatcaaattcacaacttcatatttttacttttctagcaaagtgacttatttggaaatcgggtactttcgagtctcccattttcacaaaacaacatctcagaaaattgatgaccaactttatcaaaacaccaaaattggctaagtgatgttaatatatcactttttcttcaaaaagtacatcccacacactatttttccttggtccagcatcaaggttgacatcacatgtcaacctgagcattggatatccaattagtagaggtaccacatgtgtattttaataaaatatgaagtaccaaatgagtattttaaagggtgtgcataaatcaatccaatccaataacaatcgatcgattcaattacaactgaccgcaaaagattggatgtccaattgtgattggatggataggatggggtgttcaaaaatccaatatatccaacattcaatcaaattacttaatatttttatttagtttaaatgagtaatttgattttatattgttatacataaaaaaaatatatgtatatatgaaaattaaaacggattcgatttaaaaaatactaagtctaaaatatttgataaacccaaattactgcaataaatatacatgaaataaccaatctaatccaacatccaaacggatgctggatcgattggatgactaaaatgaattggatcgaatcagataataaaatctaacatctaatatataattagattgtatctggagaagcctaaaaacattatggcatgtttactaataagtaatgggaatcaatagtaaggtaatcattcccttacatttgtttacttgcattattaaaatta

SEQ ID NO: 57734 - DNA, 817 bp, Cannabis sativa
gcatttggtgttaaatggtgagttgctcctgagtcgggtaccaagattgattagcaatagtgtcagaattggcatattgcgatggcatttcagcaaggttggcactccctgcaaagttttgaagagaagctggacccagaaatgatttgtcaaatctgtaaaaacactgagtgacagtgtgcccaagcttgtggcataattggcattgaggtttttgaccccaagcagagtactgtcctctcccacgactggccgatgtttgtcctctacctggtgtagttgctcgagagttatgatgattgagtgatggaccaaaacctggagggggatgatgggccgagtacatcccaggatatgaagctccaccaattgaagtgcctctggccataacagtagggtaattaacagaattgtggggaatagtgggagaagaaaaggtacctctatttccatgatatggtttagtgtgaccaagattagcaagatttgcttctggtttgctgatgtcaagatctttagctcctttatccaaccgaacttcttgagccatcaatagagcttcaatttcggcaaccgaatatgtatccaatcttgtattaatagaggtgataaagacatcatactcacttagaagacaattaaaaatggcttcaatgtgatcttgagctagcattcgatgtccaatagatgcaagagtatcaatagtacgcttgatcttgagcaagaaatcacccaaagagccttgcattttagtgttgcgaaggagtgttatgtattggcttatattggctcgattgagggctgtatagtattcttt

SEQ ID NO: 57735 - DNA, 883 bp, Cannabis sativa
tggatggcttggtttctcgacaagaaccatagaccacaaatcctttcgtttgatgagttcatgactggggccctctgcatcttcaaagtgatatgggaagctcgaaacgaagtcattcacggttcaaggattcgccccatttgggaggctatcaattcagtgaatcgacagtacaatgatcatcgttctacatggaaaccaaaggttggaaagaatgtgcataagagaatcactgaagcaggttggtggagctgctgtactgatgtctcaattcaacaaaattattctatcgaggcagcagttttcagagatcatttggacagaatcatgtccatttactcggagagatttccggccacagatccaactcttgcagaagcctctatgctagctactgcagcagaatatgcaatggtaaatctgaagggaaagatagttttttactgtgataatgatgtggtggtggcaaattgttcggcaacctgcaattcgaatcaggttttggacatcaagggaatggctcagcgtttcaatagtgcagctcgaattttggaagactcaaagcttagaaagattgataggaatttcaattttttggctcataattctgcgaaatgggctgctgcagttcatgtcactggtgttcttgatttggggtccatggaggccaacatcttttcggatgatcgagaatgggtaccggattaatggcggtttatcccatcttgtcttttgaatggatgtgctagactgttgttctttgttttgtcctgttattttatgttctgttttctagtttgtgttctttgttgcctatggtacttttctttgctgtaatcggctttgccgtttttccttttttaatgaatgggggtgtataacc

SEQ ID NO: 57736 - DNA, 831 bp, Cannabis sativa
atttaattattaattgtggattatataatctatattaatttgtcttgtttgcacaaataaatatccccacctaccatttttggaaactaacattttggtgttatatacataatttcaaaatcaaattttgataagtcaatttgccatgctttccatgtgatatttttaatattattttatgtaaaatatatataggtatatatatgtgtcaccatattatcaagacctaaaaaaattaagactagtgtattttttaaaagaaattgcgaataagctatcagctatagtaaatcacttaaataaaaatctagatcaatatctacctctgtcatcaattgttggggatatacctttttaaaaatttctcatttttattttttaactgttttaaattgtcgaaaatactaaatatttacttttatcaatgatgatcctaaaaaaacaatttaagtaatgatggaaatagtattttttttgtagaacaagattaattatatggacctaacctatattaattatgaaatagttacaatacatgtacaagctgtgtaaactcgaaaaatatatcaatccaactagttcagatcaataacattatttttgtttgttttgacgtacattagagaggaaagatagactttatttatatgagaagacatgtgaaagtatacctatgactactatattattcaacttttattaaagagtattgttacactacgaaaaaatgttacttttaatcacaaccttttagtcacaatataaattttttgtgtaactaaatgtgacttttagtcacaacaaaaagtcacttgtgactaaaacatagta

SEQ ID NO: 57737 - DNA, 630 bp, Cannabis sativa
  modified_base (98)..(112): a, c, t, g, unknown or other
ttctagtctttattggaagcttcattatataggtcttggtcctcacactagttgagataatgctgtttgtagcctcagttaattggttttaattaatnnnnnnnnnnnnnnnaattagactatgtcttatttataaattttcataaagcaatggcttaatattatgaaaaaaaaaggttttaaggtttatttgttaattaattataattattaaataaataattttgacatttataggattaaaattgaaaaatatggaattagtgaaagaaaagctaaatagttgaataaaatgacaaaattataactagtggagcccacttcaatgcctggccacttagtggtttattttgcttttattttatcttctttattccatataatttaaatcctaatcctagttaaaatagtataaaatgaataagattctctaattctcatccaacatattaacctagctttcattctttgccagacaactagaatttttaagagactccttccttgctatttttgaaattccttctatgcgttttcataatgttcgagcctatagtgatagagtacatgcccactcatatcaagtcaagtactcaatcatagtgtggaaaactgtgaagaatccaacac

SEQ ID NO: 57738 - DNA, 1469 bp, Cannabis sativa
aacacgagtacagggttggtactttagtgcatttggtacaaaggtcgtacttcccttaagaatgttcttaaccattttgtgagctcggttgttgggctcatggcggcttaagcataaagccgatatcgcattgtttatatatatgttatgcatatcttactgagtctgttgactcattagtttgttaccttgtgtaggtaaaggaaaagctaaagcggaggaacagtgagatggagctctgctgtgattgtacacatcgcggtagtgcaacctggagggtttcagtctttcaatattttgagataatttagtttcctgttgtttgtaaaatatatatatactagtaaactttgtattagtaaaatactttaaactgtattttgaaattcgggatcccgacccatatgtttataaagttattatattataaaaattaacttttgagtttagtaaatttcaaatgcgggcgttacaatatattagattagctcccccttaatatatgcaagggtttaaagttaaaattttatcttgcatgattttgtaaactctccttccatttactacttataattcaacaatcaatggaggtccaaaaattaagttgttgccaaaaaagtaatcactatggaaatttttcccttttaattcattaaaaataaaaaggtggcaagggaattcacaaaataattggcaaataataaaaaaaaatgtaccatgcatagaaccataaaacatacataatcaagttccaacaaacataccatccaagcataaaaagaaaatgcaaataactaaaaaatcacacactaacacaaagaaaggcaagcatactaaccataaataaacataaacatgaagagtgatactaaaacatggtacaagtgatctaaattggtggaggtccaaagcggtccatatatgctcttcattgtaccatctcatctggaaaattagcacacacatggaccatgtgactcctcatggtggttatgtcagtgtggaggttagtgaattgagagttcatgtcatttctcaagtttttaaattaaggttcaactgaagtgtgaagatgagaaaatacatctttgatgttgaaaggagaaacttgaggcattggaggttcttcttcttcttctccttcttcactagcactaggaactacttaggcttctccatgggcatgtagatcttgtttggagtaaacccatttttcttcctcttcatcatacttgtaagacatacccttaaatgtgattgcgcataaaacgtcgaaatccttgaattctaggacctcgatttcatctttagtggggatgcctagagaaaaataagtagctaagagcggcaccatagggtaaggtttttcttttttcaggcttctagaattcattgatggctctaatgattagatagcctaagttaatgctcttgctttgcataatgatgttaaaaaggagaatttggtc

SEQ ID NO: 57739 - DNA, 1201 bp, Cannabis sativa
  modified_base (31)..(64): a, c, t, g, unknown or other
aaattataattaatcacgtttttccataaannnnnnnnnnnnnnnnnnnnnnnnnnnnnnnnnntaaaaatcacgtaatacgcctcaggtagttagggtcttacagagaagatcgtcatctattcaaaaatcacatccccagaagtcacctaggttcatctaaaaagaagaagaatagagaggtgagtatccaaaaaggtttaggatgtccttccaaaagaagaacatcccaaatactctgaccagaaggaaaaaatggatcaaaataaaggagatttgacctaataacgaaacacctaagcaaatgctgattttagggtttttaaaacccagaagctcagaagagcaaaaacaaagaaaaagaggcaatttttctcacgaaaagtctcttgccaaatatttttaaggggcatggttcaagggtttatttcttttcttttcaaaaataaattcaaagaaaatcaaaaatcaagcaaacaataacaaaatgcatatatattccaataataccaggcatgcgaaaatagggaaaagaaaatcaagaaaatagggaaataacttactcactattgcgttgagagttgaatttcttttaagaaaatgtttggacgaaaaatgaagcccacgtggcctgaagaacaatttctccttttctatgctttgaagattgaagaactgttgaaagttctaaatgaattgaaaagttcttcttatagacccactaaggggcagcctcagtatgtaattgaaatcgagttttcctcccaaaaatgccaaaaagaacaatcattaaagaagtgggggtgtgcaaccgtcaaaacacatttccccatttcccgattttcaaataatcattaaatgatgatatttgaagagactaaagaagatacacacatgcctcaggtagggcaaatgtcacctctagtacggcatgtgaactttaacacgtgttacccatccaagcaatgtgcggacctttgaagtccccatgcgaccaacaactctcacgcagacttgggggaaaatgttatgcaagttttctcacaatgtgacatgtcattcagcagtgtaacatgtgtcaagtatgtacacagctggatggggtatattcactcaaacttctgtctagaatagtttagagctaaaccgagcaaattccatgccttgtatttctctaagcgaggtgaatgtgctaagtcga

SEQ ID NO: 57740 - DNA, 1808 bp, Cannabis sativa
tcctggaagtcagataagacctcgccatcaaaattggaaatggcaatatcaccaaagaacatgttaaggcgcgcccatttggcagtgttgtgagccatgaagttatcctttctttggatatgaaggagcttgtaacaatgaagggtgagacaggaattggagaatcgataggcggctccttccagattgaagttgtttctttcggttggaggagcattgaagaaggagactactgtagtgttgtcacagtggaagatgatattgcggtactgcttgatgcctgcatagcaggctgcacttaccagcatctgagcttcagcaagggaaggatcggttgcagcaaaccgatccgaaaaaatatcaatgatgcaattttgggagtttctgaaaacagccgccccaacagtgtggtctgtgcttatgctaacgtcagtggtacaacaaatccagcccatgggaggggtaagattagttgagaagccaggatctggagaagtggcagctgatgagtgatctttaaatcgaagacgaactgtcttggttgcctcatctaaagacattttttggactccatgaataagatcattcctcactttccagatgacttcgaaaatgcacagagcacccaacatgaattcgtggaaagtgagacatcgaggtctgttgaggccaatttgaaaccacgtcatccaatcttcccaggatgagcaattgacacagtcggttctgatgccccataagcttccaaaccagacagctttggcgaacggacactgccaaaaaaggtggtaggaggattctacttctgataagcataaagggcagtccatggtagggattggaatgactctttccagcttctctcttgttggaagggagttagaaaggatttgccaccatagcagtttaaatcttgcatgaagaggggagttccagatggtcttccaaatcccgttaggatggtaatcattggagtgattagcaatgaggtggaaagctgatttagttgagaaaaccccacttttttcttgtaaccaacaccaggagtctttttggggaagggcggggagaccaatgtttagaatattagcagcatcttggggcctgaaccaatttctaatcttagcttcattccagctgttattttcgttgatgaagtcacttactaagttagccccctgagtagcatcttgaagaggtggcggttgatgatctccagttgggacccatttatcgaaccaaatagaagttgatttaccgtctccaattctcctgcaagtggcttggctgagcagcggtctacaatttaggattgctttccaaagcttagagtctgtagatttaagctcaatgtcaaagaagttggttcgtttgaggtatttctcgttgaatatcatactccagaggctggtagagtccgtaagaatcttccatccccatttgagaatgaaggcgctattaatatctttcacaagcctaaaaccgaggcccccattaaacttagatttgcatagggagttccaagcaatggtgtggagggtcttcttagcatcagtttctccccaccagaagtttcggaggcccttatctattttgctggtgatgttagatggaagaacttcagaggaagccgcatagattggaagagaacaccccactgattggattaagcaagctctgccagccttggagagaagtcttgacttccatccatcgattctagccaggaccttctttactaggaattggtaattatgaggtttgttctcctttgagcaaaagagcggaaggccgagatatttagcatc

SEQ ID NO: 57741 - DNA, 1145 bp, Cannabis sativa
  modified_base (1082)..(1086): a, c, t, g, unknown or other
ttttggtgtataattatcaaattaaaaaaattacattcaattttttaaaaagcaatatttttgttaatgggggctatagcccccacattgagatgagtgggtccgtcactgcttgtgagaactttatgtgagaagaatgataacaaagtaagattagtttccctccttctattttgttatccttttataattctaagttgtttaagaattgaaagacctcttttaatatttttagagtattattataattagttattattttaatcaaggcggttaccatcaatttaatgagagagttttatttgattatcaatctatatataagttattatatttttttaattgctatagtaaaatgaaaagacaaataagttactatttttttttttaaaattgctatggttctaattattattttaatggggtagttattacttttttttaattgctataattgatattaaatagaaaaaaatattaacaaaagaaaaaaaaatagaaaaaatgagaaagcaagaaaaataagttattatatttttttaattgctatagtaaaatgaaaagacaaataagttagtactttttttaaattgtcatggttctaattattattatatttgattatcaattattaataattaaaaaaaaatagaataagaatagaaaattttgagaatgttataataaaatgaaaagagatataagttactatattttttaattgcgtaaaataaaaagacaaataagttattattttttttaaattgctatggttctaattattattatagtgtaagttataaaaagtgaaaagacacctttatcatttgataaatacaatgtctattaaaattcttcttttttattaattagttgttgttattaataaatgttaaatacaaaaaaaaaaaataaaaaaaaataaaatttaaaaattagaaaaaaataaaacattaaaagaagataatgccacatcatctcttcaaaaccccccaatgatacacaatgcactccataaaattataaaaaggaaatttaaaaaactattcttaaaaatctctaaaattatttccctaaatctnnnnntattaaaattgcccatatatgactccatttgatttttccccataatacccctcccattt

SEQ ID NO: 57742 - DNA, 1067 bp, Cannabis sativa
aaaaaaaaaaaaaaaatcaataacgacacttacttgtcgttggaaaaattattcaatttttttgaaaaaaaatacttcatcaataacgacattcccttcaataacgacaatgtcgttattgaaaaaagcttcaataacgacattgtcgttggggtttttttaataattttttgaaaaatacccgttgggaagggggcaaaattccccccattttgaatattcaataattttttatttttttaaaattacaatattgattatttattggtttagtgtgaatattttaattttaatttaaaaaatatttaattttaaatatagctttgtgtatagttatacagatacttatgtttttttaattttaattcaataaggtttagttatggatatatttttaaaaaattgaaaaatttattgttgactgagtttttcgataaccactaattagagttgtgcgaagcaattaatgaatattagaaaagaagatttttacgtggttggggcattaatgagccttagtccacgaatcactgtattaatgagtatttattatagtgaatttttttcgacccctttttctgtacattattgggatattcataagcgcattgtggtggtcaaaatatcactattatcgtgtttatttgagctatgctttgcacaattttctaaatctgatcttagggcatgatcacctacttttatgatgtatttagactgtctataggtgttttgtggaattttgacttatttcttatttatgacttgacagatcatttatgcagtcgtcaattgatgtatgagatcttataaaatcagagaattatgagtttgaacccttaagcacgtatgttcagcgtatggtgatggatgatcttccccatgttgtattaaatgtgtatacagtgttttcagcctcgagcagtgtgtatacttcgcttgctctcccgtaccgttcttcgcgtcaaatgtactcatgaaaaaggggaggtaaggaatactcattgtctaatcaacacttcccgaagaagactaatctgtaattatcctcttgtgatatcaagctc

SEQ ID NO: 57743 - DNA, 1034 bp, Cannabis sativa
  modified_base (1002)..(1006): a, c, t, g, unknown or other
ttttaaaaaaaaaaaagtttttacaccacatactgaaaaatctaacttttttttttttatttttagcagaattttttttcaaagtactatgtaagtttcatattgtgtaatgtgtttagttttcattgttgttctacggttattttttagttgttctactgttgtttttaattattatcttttgttgtttcacggttgttttaagttgttttataaaaaaatagtatttttttttaaaaaaaaataatccgtgtgacagtaaaattgtaaatttttgtctagtattttattaaaaactctaaaaaaaataatccaaagcaaaacaaatgataaaataaaaaggaaaacaaagacaaaaaaaaaaaaaaaacagcccacttatgctaacagctatttttatttaaaaaaaaaaataaaaaatcacatgcatacatatgcacaatcataacatgtggcatcaagtaaatttattctaattgagccacaaaactttccatagtatgaggtaaaaatgagtgatcttaccgtagataaaccctatatatacattatatattcttaaaaaaaaaaagacaaaacaaaatgtagagagaggaagagaaaggagggtggtgattagggttagctttatatagttaagaatatgttgaaaatagatttaaaattatatttatatacaatattaatttagagatattttttttaaatacgttaactatatttattaataaataaaatattaatttataattaaagatatcatgaaaagttaatagaaaaagaagattgataaatattttaatattttttaattaatcaataaaaaataaaagaattaaggagataattgatagaggcatttagagaaattttagagtgtcatatcatcgccttctacttctcctttatatatatatatatatatattttgaacaatattttacataataatatataaaaaaaattaggggaattattctatatactattttttttaacttnnnnntttcaaatttatagtttgggtttctaaa

SEQ ID NO: 57744 - DNA, 1345 bp, Cannabis sativa
  modified_base (575)..(577): a, c, t, g, unknown or other
aactatccccaacttcttcaatgactccaagtaaaattaaactataacttttttttttttaattatttaattttattactataaaaagcacggttgaaaagtacgggcagtaaggttaattttttttatttttataaaaactgtaaaagctcacacatttataaatccaaattaataaataatatttatagttcctattatttatatatataattaattaattgtataaagtttttttttaaggttcatttaaaaattttgccctaaaaagtgaagaattaatataatcttattttttaaaggtaattggcggcataacttccttaagtggccaggtttttgcaactaaccctcaattctaaaatcttggtggtaaaatctcctaaacccaagttctgttagcacttagccctttccatttatttttggatgttaagtgccaagttggaatgtccacgtgtacatagtgtacacgtggtacaattttattggtccaggtaaataaatatttaaaaaaaattaaaaaattaattattttaaaaataaaaaataaaaaattatttttctttaaaaannnaaaaattaaaaattaaaaaaacaattttaaaaaaataaaaataaaaaaaaccctaatttcctaattcccttttctttcttctacttcttctcctatcctgtcgcactctcctcctcctccttcttcttcttctagcatcaccaccatcaacctcaacaaaaccacaactgcccactgcagacgacccatattagacacagagacccaagaagtttatcttttttttttattattttgtactttatgattattagcgagcaagggtggggttcctctcgccttcagatgctccgatttccacggtcaactgtgatagccactctggatcagaaaaattatgggaagccacatgccacatgtgcacaaacagttgtagaattttctatttttggctatatttagaaactaggtattacctttggtcttcacttcaaaaaccttcttaaaatctcctgatttccttgctgaaatgttgaagttttggtctgaaagtagttgtgccctcgggttctattttcagccaagagaaaaaaaagaggatggtcttgattctttgatgtttatctactaatcacctttgttttattcaacctaatattaagtatataaaatttagtcgaatcgcctctcgcgtccaggcagccccatccctcggcccagccttcgtcgtcagcaaagggatttgggtcagtgttgatttcgtattcggatcccaaccctccattcgctagtgggtggaggtgtcaccggcgtgagaagagacaagag

SEQ ID NO: 57745 - DNA, 1863 bp, Cannabis sativa
  modified_base (100)..(127): a, c, t, g, unknown or other
taaaagtaaattagtgacaatttgtgtttaaattctattagttacaaataattttttatgtattttttgttgtgactaaaaagtcacatttagtcacaannnnnnnnnnnnnnnnnnnnnnnnnnnncactaaaagtagcagttttttttagtgggagatcgctattaggacatgtgtcaaaagtcttcctgacaaaggtgatggtcatgcgacgagttctcttggtgataatgacgacataaggtggtttttctgaaagggaggccacgagtatgtggtccttagtttgaaaggaggattgttggggatcaacccaagtcccatattggaagaatatacaagagttgtcttggatataagtattctaccttctcattagtatgaggccttttggaaaggtgtccaaaaataaaatcgtaagggcttaggcccaaagcagacaatatcatactaatgtgagagtcaatgtgaggtagcggcccaataagatggaagaacgagtcccaacactaatctctcttcactacaagaaatgtcactttttccagcacatttttgtgctggcaaaagctggtattctgttggtaaaacagaatttacttgtgatgtgttggcgaaatggggttggcaaatcaatgttggtattaaaacttttgccaacataaaattaaaagcgttggtaaaaatgacttatcctagcgcgtaaatgtgctggtaaaagttagattttagccactgtaaatgtaagttggtaaaactttgacctctttgccaacacagtttgcggaatgcgctagtaaaaagtgacatttcttgtagggcttgtctcaaattgtaaaatcactttggagattaaataaagaaactagtcattgttgaaggttgttttatcatatcaatctctttctctctctctaaattttatattttagttttattgtttagttttgtctcattctcgtgagtgcattgattgaattatgttcttgtattggtatagtgctctacaccacaagtgggctcagtgctcaaatcatcaaaaacatggtgcaagaattcaagaaagcttcaagaatggctggtgtaaagttcgaagttgatgaattcataggccaaaatgacgtcagtctctggagaatcaaaatgaaagcactcttagtgcatgaaggacttgctgaagccattgatctgaaagctacacatgcagtaaagaatgaagaagatgatgatggaaagttcaatataccatcaaagtaaaggtttcacagtgcaatcttaagtataatcttacttagtcttgagggtgaagttcttcaagaagtgtccaataaagaaacaacaattggtttgtgggaactataatagaaaaataggcattcctgtcggttagaatgtcagttttttttagaaccgacactattaaaatggagtgtggattatgaattgacgacaaaagaccctcattagcgttggttataaattgacgctaggcattaacatcagttataaacgaatgctaacttagttatattagagagagagagagagagatgggttggcccttataaaataaaaccttaaaaaatataaccctaactttaataatatccctcttcacattagcctccttcttatgttatcttgctctaaccctcattctcactctcaatctcacttaaactcacttctcctaattctcagctcaattccaaattcaacctcaatgtgacttctcacggtgatcacctcctaaacagaagcttaagagacaataataggtctctctctctctctctctctctctctctctctctctgttatgtatattctagatctactgtatatggtgagagaggacgaga

SEQ ID NO: 57746 - DNA, 827 bp, Cannabis sativa
ttgtatatctttccaaattttatttttaagttaagggttgacttgctttcaattttcataggacaacccaattatcatatggcatctaaatcctcaagtcaatactagcttttgcatagttttttccataatctcctttatcgttgacaaggagaggaagtcagttttcttagtccatcaactgactaattttgttcatttcagttctaccttgtttagatatccccctagaacactttactgctaggtccaaatttgtatcagagcttgaacatgagtttgccatatctatattattaacaaagataatataaagttagcgataacacaacaactacattaaaaaatatgatcacaattatttgtgttatgcgtaacacttttttttttgatattatgtatttttagtaaactttatcttaattctaccaaaattttagcagcataacaactgtaattggacgttcccaaaaattttaagcatgcataaatcacacgaacaaaacaataaaaaaccaacaaaataacattaatacaaaaattatccacccatccgacaacagtgcatgtattcgcagaacctacttcactatagttaaacttttaagatattcaaacttaacaaacatgcatattattccacctactcagccgcagtacaatatattgcagaacctacttcaccatgaatgaatatttaagacattcaaactcaactaagcattgataaataattaataataaaaagttagtgaagatacatacctgtagcaagctaaaatccaataaaaccaaagtattcggaaccttcaaaattagctcacaac

SEQ ID NO: 57747 - DNA, 749 bp, Cannabis sativa
tgtaaccatatggttacaataaatatgtatccattgaatagtcacccataattatatatatataagatttatttttctcatatatggtaacatatgctggcatatattgttatggaaatatgaatttgtttgccttcagtagcaatatttatctcttagttttaatttatattgtgaagtaaaatgcatttctttttgtataattgctgcaaaatgcatgttacaaaatttttatgtctataaatttttactgtttatttaatttaatcttgtatgtagtcattgcttctgttgttgttggttaatttaggtaatactgctaagattaagactcgcatattggtgaaaaagagtgttctagaggtatatattttcttgaaagcttgaaaagatagtttcatgaatagttgtagacctttaatatgtttagatggtacagtcttaaagggttattgcaaggggttactattggtaattgttgggatagatactgaaaatgtcatttttcccattacttatcctatttgtgagaagaaaacaatagattcttgggcctggttttgtgacctactggagacatatttggagagtgaaaagccagacctatatacattcatgagtgacaaacaaaaaggcttggagaatacagttggaagaattttctcatgatcagatgttagacacaagtgttaggcatcttcaatttaatttcaagaaggaattctatggtttattgatgaaatatatat

SEQ ID NO: 57748 - DNA, 1267 bp, Cannabis sativa
ctatatatccactcatgtttatgaagatctccttgtcaaaactattttagccaaattgaagaggatcaaaaaattgatggaggaaaaaaattatgttcttttgctctcgatgaaagcaccaaaatattgacatcgcttttagccaacgatgctgagtctttaaagcgataaaattgaatgattggttactatataaataataataagtaataagaacacaagaatttatagaggttcagcccgtgataatgataatagcctactcatctttttgttgtattacttagagaataattaagatcacaaggtctgaccaagtgagtttcttaatattctcgaaaaagtttataattattttagcagcaaaatgattctctagaaagttcaaatttggatccctaaacaatgaaatgacttcattatttataggaaagatacaagggtttgttatccaaaataataggacaataatcaggaaactaaatattaattccattaatttttcagtagtacaaaattgttttaattaaactttaattatggtgataattaaggaaaatatcttaagtaatctttaaatgttgcgtccttctgtgttgatagtgatactttgctagatacatgcatgctgctcggaacattacaaggtatagttactgttcgaatactacctgctgaagaactaacctttgtcgatttagtcttgagttgttctggtaggaaccttgggcgagtataacctatccaagtcttaaaatgaactccacgtgtcaccctattgagtatcacgtcaccccgtatagtaattggaataacacttaataaaatatccaatgtataatcttaaaaaacaaattaggtatatatattttaagaaaatagttatattttttttttaataaataatagtaaaaatacaaaatatgatattttaaaaatataattttagggcctttttgttaaaagatttgttgggcctggatggggggccttaggcgtgagccctgctaccccaccgaccctaatcttagtctatgagtcaacattattaagctctttggctatgaagtatttactattttttagaatgggaatgcggtcacccaaaatatcctgacatgagtggttcctaccatatttataggcagggattcactttctcgagttgactcggacccatcacagttgttttcatattctaatacccactgatggggtaaatacaataaaatattaactttgggtcgggtaggtgagacacaatttg

SEQ ID NO: 57749 - DNA, 550 bp, Cannabis sativa
tttcatggatttgaaaaagagaattggtgagaaaaaaagaaaaaacatcaagaaacaatggaaagcttacctgctgtgaccttctagtttcgactgaataaatcgatgatcaaggacggcaaggacctagtgagtgtcacctggggtaaacgatggccacacctggagaataaagcttgtcgctgctcatcgaacctggagaagaaatggcagtgttgcatgagaagaaatagggagagagtggctcggtgctaggagtttcagggtcggggatcactagagttaggtcggtacatgaggtcatggggttgtgatagccaaagtaaggttttgtttcgttcagaattttgcaagagataacaaaggggtaggcggctagggtttttagttttatggatgatggagagagagaggtaatatatattaggtttctctttttttttttaataaaaaaacgtacagacttctttttttaactttttatttattttatttacttagtaattacagtattttttttaaaaaaaaaaataggattatgatatagtga

SEQ ID NO: 57750 - DNA, 840 bp, Cannabis sativa
taatttatccaattttagcattctaaaaactcacttttcaaattttgaattgggatcattgagcatgcctaatgtgatcaatctcaaacatggaatttagcacaaatgtagatatattaaaaatcaagaaagaagaaatagcagttatcattaacttaggaaataatgtcaatcaacattcatcatctccccaaataggagtttagttcataatgtccataatcaaatttaaaacagcaattaacatagaatttaagatataagaaagaactagttggtgatcttgccccgggtcgccacaagtgctttctttgcctcctttttcagttttaggattcaatttctcagtatttttcttttaaaacgcgagacccttaaatagaaattaggttagctatctctgaatgttgaaattccaaaactatccaaaattcccgtgtttagcccatagtagcgactacataaagcctagttgcgaccataggcaaaacttaaaaattgagctttctgcctatgcctcgtagtcgcgaccatagtcgagaccatgaaaaagggtcgcgaccatggtaaatggtggtcgcaactattgaagcacacttgttagcttcagtagatttttctccagtttaccccgtcttttcatcaattgatagaatttgaactctaatgcatcgggaatttaaaataaaggaaatcaagcataaaactattccaaaagataacattaataatgaaaacaattgtaaattcgacccgaaacttaggctaaaaatagcctaacagcagctaacggggcaacttaaatcgcaaccaaaattcgtataacaacccacatagaaa

SEQ ID NO: 57751 - DNA, 1894 bp, Cannabis sativa
aatttattcatagaatttcaaatggtatctagtaggcatataatgtaaatttattaattagagaatagatatgagatacatatttggttctatgttacatatcctaggaactatttttatgctctccactcttgacatcttgtgacatctttgttgtttgaatatttagatttggatttgcatttgcattagaattcaatgactttggagctaaggttataataaagaacttgttcataagcattctcttataaatttgatacatatggtcttgtttataagcattctgaggctctatgttcattttattgtttaggtaagaagctttttttaatataaaggctcgttttgtgataattgatataaaagtttattgaattaaaattaatttttgattcaactctcctattcacatggatgagtttggcttagtgaagctaagagttgaagtggaacaaatgaggctttcatcatattgactgagagaagagttgtgcaatggtcacatcttactgtcaccataggaaagccataccaatagcatggtatttgggcctatcttcctttgaaatgatatttggccaaagactttacttctttttttttttgcactgctataggaatgtcataccatagccccctgtttagctaagttggcataactttacaagacactagtctagtggccagggatctcctctgcatttgggcttgatgctatttcaatttgtgtattttttaatcttatgagttaatgaaatctttcaaaataaaatattaataattaaaaaaactttactgcaatgtttgcatgggaatgtcatatttaagtcttaatcaataactagtgctgtattgtcataatttgttggctattttatattcgattcctcttgttttaaatctgaatgagaatgtagagaaaataatttataaacaagttatgtgcctaattcaagtttggtcttggtgcattgtataggatttggttgatgattgcttagtttataatagttattaagagaaagggtccttttgttttatgttgttcttctgccaaattaagagaattcttagtttcttttttccttaggctggaaaagggaatttcatagttaatctccttttcccctctgaagcacatagctcctgacagtcaagctaatttgtgtaattaaaatgttacacaatttaagtatttttatgctccagtcttggcatgattctagaagggtgcattaaatgggtaaagaggcatcttagaatttatttttcttgaaacagagttagtaaaattgacatcatagtgattataaatagaaatagaaatatgtgttggctaagctgaaagatccataaaaaaaaaaaaatacaaagagcactagagatttatagccacatatatattactaattaatatataatttcttctattttgttttgcagggtaagagcaatctgtattcaaatgacgagatgaatcttccgcgtgatcagtggattaaatacgtccgagcacaggcagggcgacaagggctattatgatgattagtgtttagttttttgtttatactttacactataaccagctacaatcatataactaaagattaattaatatttttactttatgtttgagtaagtagtttgtatatattttaatttttgttcattttcaatttatgtttatactttattttaactaatttgtgacaatgtataaattagtaaaaattaattaatgcaggagaaaaaagtagaattttttaaaaaaaaatttcccttttttttgcaacttaatgacgggcaaaaaccgtcgtagaaaaatacgaaatttaaaattaatctaaaaattttacaataaacgacggtttaaaaccgtgcttataccact

SEQ ID NO: 57752 - DNA, 1409 bp, Cannabis sativa
taattcctcaattattcataattatctaattagggttttgctaatccatttcataattttagggtattacacttttgttcttcgactttggtacaactatttaagtcttgttctttcggcgcgaatccatctcctcatccatggcctggagccattttgatttgtttccacctaaaattgcctcttcgtagcttctgggttcttcaatttcactttgttgtattgttgttagtgcaaatgctattaagtctacttctgcaaacctttttgtgctcatatgtgagtgtcatgagaaataccttggattgctttcataattatcagcagtgttaaagagaaaatatggagacttatgcacacttggagtaaaaaaatattctcggcggggagaaaaagtgctccttaaagcagtggttcagtccattccaacttatgacatgaagtattttttattacccatcttcatttgcaaccagcttgactctatgatgtccaacttttggtgaggattagatgaaaaaggtaaaaaaaaaaaaggcgtagtttaaatttgctttgtaagactaaagcagatgggggtataggatttcgctcctttgtgcacttaaatcaagctctgttagccaaaaaaaataggagaatattagagaaccatcactctctattaagcaggttactaaagagtcgctatttctcaaattatttgttttttgaagcacattatgctcactctcctttgatgacttgggaagggattgtttggagaatggaacttttatttactggttttcaatgaaaaattggtgaaggtaggtggattagatgtggcattgacccttggattcttggtcacaatactttttgttccaatctgctatattgttcctcacaacagggttatggctaaccttatcgtggaggaaagacaatgggatattggcttgttgaatcggtatttctctcccgcaggatgaggaaagaattctaactctgtctttgagttttttgcccaataaagacactcttattttgcaacatcatcacttaggcctctactgagttaaattaggttaccacatagttgcctctctagatgaattagatcagtcttcaacttcctcctcaacatcttttctgtggaaccttttttagtctcttcatttgccacaaaaagtaaaattcttcacttggcgaattattcatgatacacttctagtagcaacctcgttgattagaaggaaattatcacttactctacttgttcgatctgcaacaagatttgggaatcaattgagcacgcactttttttaatgccaatatgcctgttcagtttggcattattcacaaatagttttttattagaaaaaagcttcttctatgcataaggtgactacttgatttatctttct

SEQ ID NO: 57753 - DNA, 2427 bp, Cannabis sativa
cgaggagtaggcaattgatcaactgatcatttgttcgaacctcgtaaatctattgtgtttgatctctcttctctaatttctccactgttaaattgattgtccattgttgtcatattcaagttcttgttattggtttctctgcaactagtttactggtttactggttttattttcactgttgcattgtttattttcagttgcttgttatgttcttaatcttgttctttgcattgtgttatttgcgaggtgtttgatcatgcattgatcacatcgaaatataatttgaaagtaaccaaaatacacataaaattatatgatatataaaaaatagttctttaatgtaaagttttttttttacgttagtttcttattaatactgttaataatcaaaaaatttcttttaaaaccacaaatattaataatatacgcagtaaacttaacattacttcaaatttaactaagatacgttaataatattaataatactattagtgtaaataaaatacagaatacgtatattatattatttatttatttattttttgataaatcaatgagttgtattgcataaataaatttacaaactaagagcacccaaatacaagggcctcaatctatacaattctatctttccatcatttccatttatgcttttacaatgaattctatctataaagcaaaaaaccactctttattatctacacttgagagcttctttgggagcaagaattggacccgtgtccttatattccatttaacctcctcaaccattcggttggcatctatttttgcaccctgccatataatagagttcctcattttccaggcactataaaccacgacagcaatcacaacacagtacacagctttcctaaattttgaaagctttgctcttcctatcgatttgacaagttgttgtaggctatagctttccatcccagccaagtctttatctccttcaaacagtaaccggtttccttgcagtcaaagaaaaggtgctgaatgctcttagcttgttcttcacataggctacacttctcctgcaccatgatacccattttgatcaatcgatccttagtcttcagcttgttcaacatcaccaaccagagaattatactttgtttaggtgtattcattcgggaccagacttctttactccattgagtattcgactttggagtattgaacagtttataaccagtcgtgataacatatctatgtctctgaaactcagtactatcatacaaagagagaatttggtttttgagagctactaacctcttccaataccagctggagtgcacagaggcattgtaactccaccaactctgtcccttgatgtatacactattcacccatcttagccataagctctcctaattgttcgcaattgcccaaatgtatttggacatggctgccttgttctagctttctagctttgtgatacctaatccccctgtagatttaggctgacacacattatcccaagccactgcacctgcaccataaaacacagcttggcctttctataggaaagctctacaaatagcttctatggacttcaaaactcttttgggcatgattatgattaagcatggatagaaatcaaatcagattgcctccatatctccttcaaattagattcatacctagggtgtgtcttcaacaccttaaagtatttgaatggcttttttccactaattacattagggtaaagagtcaatataccaggtgtgtgatcaaaaataccttcattgagaaacacagcttcaacaagtttgtatttattgatccatgactgattggccataattcaatctttgaaaaaattctatcagctccatgttatttatttgaccaagtaaaaaaacttccccttgctttgacatcttccacttggcagtcattaacacattgcaaaaactcagtattaggatgagttttgaccctctggccaattctctcttctttggcaagaatatcattaaaatctcccatcaacaaccagttctcatttgttttcaactcacacagatctctccataatactttcctttcatttctattgtttgaagcataaaccacagtcagcagactattgaaaccttcaattgttgtcaacttcaaatgcattaattgactagtgcatttgaggatgtcaacattgaattttttctggattccaggcaatgacaatcttgcctcctgcatgccatgctatattagatgagaaacaccaatttgcaaaaatatttaagtataaggctccaagcttcggagccttaactcttgtttcgagaagcctaacgaaattaactttctaagaattgataaattgctttatcatttgttgcttgtgttgactgttggctccccgaatattccaacataatagcttatccattagacagagagggttctcccccc

SEQ ID NO: 57754 - DNA, 1103 bp, Cannabis sativa
gtaaggttatagtaagcaatagctttctccattattatttccttttgtgttcataaaacattatgtaatattatttttctatatgtatcactcctctagggatacaaactgcttaacaagtacatctgaatgtacagaagacacaactctgattctatccaaaatagaatagagataaaaaaaaatagttaagaactttcttcaatttgaataactttctagtgtcttttaaaagcaactaagttatttagcatcactggtggaactaaattattatagatgggtttttacaatcttccagagtaattcttccatcccagattaaccaccatctcagataaagttttgagttgatgtagatttaaggattctaaatacacccttatcatctaacatacaggtcacttttagagattttttttatgattgtctcccaatgtgtcctatttgattacatatttgatcgctcccactcaacagtaggagtctggttcaatgcatacacaagagtgcatttaacctcttaccattggtacttaaagacatcttgttgtgatattttatcttaatctggaaataataagtgccttctagactaagtcatctacataacattctaaaatgaaaggaatcagttaataaaaaataaaaatatacaatatatagaattttctagtctaaatgattctgaatctttttcaactctttgaaaaattatattttcaactctttgaaatattatattgaaaaagtaagaggttaaaataggtcaaatgttatgattcattttttaaattgaaaaaaaagtacttaaaaatatattaattatattaaaattcattatcattgaagtaaaatacttgcttaagattaagtaatcactaacataccataaaacatttcataaggaccatgaattgtgcttaagtctttcgaatagatattgcaaaatttcctatcttatcctcataattctgataagttattactatccatatgaatggttagatcaaactccataaaggacacaaaccagcaacatacttgtaaagcccgcttagttaatttggaaattagcggttgtttatgtttaattatgaaat

SEQ ID NO: 57755 - DNA, 2151 bp, Cannabis sativa
  modified_base (876)..(881): a, c, t, g, unknown or other
aatttgtaattacatatgaattcttattttcatgtttgacaaataagagttagtaataattacataatttaatcacatcaattatctaaaatttatattattttgtaattacaatcaattctcataagggtcataagaatttgagagtataattgagacctccatttacctcaaattacatatggttagtgtgtaattacctcgctctgaactcatcaaaccttgtaattactccgaattatagtcaattctaattaaaccagctcattgacttctatagacatgagcatggatagcaattggcataaacagttatttgaataattagtatttttgtccctaaattttttgcagtactaaattgtgcccttatagtatacgactcgttaattacacccgcaaaatataaattttacagtaaggtggtcttctatcatattctattcaattttagtgtgaaacaaatggcgcattgaatgatagttgataaatagacacaaaacaaatacatttcaccgtttttactttaatcttgaaacactaagaatttatataaattattatgaaaaaaaaacttttttctattattcactaacataaaataggtgaaaaatatttattttacattcaattattaactatcatccaccacttcacccatttcacaataaaaagtgaataaaatatgatggaagaactatacaaaagttatatttcgtacaaaaagttcaaaaaaaaaaaatactaattatagtctatttatttcgacaggaagaaaaatgtatatggtgaaccgaaactaataaaattcaacacatctagtatctattgatggttacatcaattttaattattagattattattattattattnnnnnnattattattattattattaaatggttataatttgtttaaaaatattaaataagtataagctatttaatttattttatttaaaagttatatctaaaaaaatttaataaaaccaaataaaataagatttttttttttatcattttaatttttaaataatgaattaatatataaacattgaaaagtggtcaaattagtattatgaagcgggatggaatgaaaaaatagtaatagtcttcaacctttcatgtgcactacaaccacaaaaaataaggtgtgtggttggaggaataaatggaaagaaataatttttattttattcttttgtttggttacctttaaaaccattacaataccattctgatggaatagcatttttatcattttagtggaatgactattttatcttaaaatgaaaagaaagatcattccaatgcaaaattttaaaaaatttaataattttttttatcaatttatttatgcattttaaattttattacattccattcctattccaattttcattcctattcttatttctatattttcattcctcccaaccaaacgtcacctaaaatcaatctttattttctttctcttaatacacgggtttaattaatttttaaattgatgaggatacatatagtaactaaaaaccattaaaattattaatatcaaaccaatatcaattcataccagagaaatgaaaaataaataaaattataattactacttagatttgtaaggtagctgacttttgttattgattttaatttttaaagaaacgtttgattttgttgatttaatattacctaattttacttcattttaaaatatatataataagtgaagaacataaaatagttatcaaatatatgtgtaatttatttttttaaatatatttttataatagtaaatatgatctcttctattaaattcttattcttggatattccaattgattgaatattttttatatttcaatttcaaatggttttgttaggatatttttcaaaaaaaaaaaaaaaagaattgttggtagattcaaatattaatttaactgaataaatagtttcgttttttataagctactagtggagtctcacgtgcttcgcatgtggctctgaaaaatatccaagcacaactattttaaaaaaaataattaatattttatgtttaaatttataacattattaaattgtatcctctaaaatatacatcatggtgacaaaattttgtactcttctatttacagaaatatagtacttttgtt

SEQ ID NO: 57756 - DNA, 1629 bp, Cannabis sativa
gaatatcaaatcagaatatgaactaacagtaacagaacttctcatagagcctaattgctaagggactaattcagagtcctcatcaaatatattcacataaaaaactattatactactatactactataagcaccgagaataatcagccctttgatccaagcattggttttcattgatggtgcatagattgcatctgatacagtgtacttatactactataagcaccgaactgcgatccacaaagattttccaaacacaaagatcaaacccaagaaaggaaaattgagatgatcaaaaatactcagtcagctaaaaactctaacattttgcttagctttcttcaatttcccaacacacacacacatataaatatagagagagtaccggaaggggaagacaccaaactgaacgacgacagacgactagacgagtccttcaccttgagatagcagacatcggagtggccgacatcaaaacactaaagtcagggcgagcttgtgagggcgatcgtttgaagttcgatcgagatcggcaccagagtggaggctgtttggattttctcaggaaaatgaggacaagaaaatgagatttggtgacatggtgatttaatttagggtagattcaaatttcctttttttttaaaaaaaaatatattaaaaagtaaaaaatgttttttttaaaaaaatatatatatttaaaacggatcaggtaagatccgatccgtaaaaaaattaactgggcgggtcggatttgatcctagatccaataactatccgaacgttttggatcagaatgatccgtcggatcagatcactgacccaaactgaatgaatggatcattttgccatgcctatctgaaatgcttgaaaagtctcaggaatttctagcattggctcaaaaccaattgggtaaaacttcaaaaatcttgcgaactaataggggtggagaatatatggatatatagttcaaatatcatttaattgaacttggaattgaatcccaattgactgtccctagcaccccacaacaaaatggagttgcaaaaaagaagaaatcgcatgcttttggaaatggttatgtccatgcttagctactcaactctacctacgtcctactggggttatgttattcagatggcaactgctattttaaatgttattccatctaaatcagaccctaagacacctttagaattattgaatggacgtatacctagttaacgccattacaaaatctgggggtgccctgctcatgtcttaagaagaaagatggcaaactagaaaagcgaactgaggtttgcatgtttgttggaaattctaaggacaataggggtggactattttatagtcgcaaggatgataaagtattcgtttccacaaaccccactttccttgaagatgactatattaagaatttcaagccacaaagtaaagtagtattggaggaaatgctttcaattataactccttctaatgttccatcctcttctactcaagtagagaataatcccactccctcggttgaacatttgcaagttgcaacaatagagaaatttaccactaatgttcctgttcagaagataacgattcctcgtcgtagtgggagggtttccacaaaaccatctcatta

SEQ ID NO: 57757 - DNA, 1457 bp, Cannabis sativa
  modified_base (1230)..(1239): a, c, t, g, unknown or other
gccactatttatagggactaaatacatgaggaattatttccctttgtctataataaataaaacagaaaactacattaattctataattacaatgtaaataataggaaactaaagtgagttgccaccattctctgacttaatccaacaattatagggattgtctttgtgtcttggaaacaacaagattgatctctagaatttgtatcttacatgctttgctcggcataaatatgtctgcatcttggtcggacatcttctcgatcatcttgttcaggtatccgaatgtcacagatgttaaataacctattaacaggctgttaggaatactttccttcgcccaagtatcagaaacgtgggacaagtgtcatccatttgtattgccatgccaaggtgcaaaaaataggataacatttgtcttataagtctgtgtcaacctggagtcttgtccgtatgggtgatgtttgtctttgatgatagatgatgatctaatgtgactctggctagttgtctcttcaaaatctgaccatttaatgctaattgacggttgtacctcgaatcacaacttgatgcttaagcacgcttggcggttgtagtccctgcaaggagtacgtaatgtctattttttgggggaaactcaaaaattcgaattttaaaatggttaattcctttttagattacttataaataggaccaggaacccttggtaatccttttagccattttaattctcttaaaccatagcaaaggattttcagtcaaatttcctctcaaattcttcgagaaattcataggaaaaccttttacaataccatccgagcaggataagaaagcttcaaataagtgagtaagttcttcattcctttcttttccacatttgcaatgaaatgcatgtatgatttctaaattttttgctgtgaatcttgcctgttcttgaactgttctaggttaaccatagagtagctaggtttaggacttggatcatttatggctaaccataacatccaattatttgattgtgtttcgaatttaaccttacaacgttcatttccacttgttcataagattttagcgaaaatcagattccaattcaaagttttgaacttccaagattgaaaattatgtttctggatgaaacctttgcttttgattctcaatcaggtctggtcgacatattcaatttgtttttcattcgttactttgaccaactcttattctcttgtctcccacctnnnnnnnnnnaaccctggtgagttttggggaggcaagcatcatatcgattaagatttacttcaacttctatatgaagatcaccccatctccatgctagcccatcctcgtccagtcacaatctttcaaattctagctttgaagattgggaaataagttgtaataccctggaattaaggaaatggattagcaaagccctaactaggtaattgagtattattgtagaatta

SEQ ID NO: 57758 - DNA, 1317 bp, Cannabis sativa
tgacgaccaactgatagtcactacagatatctaagtatccaacatgcacttcccgatataacttgagtccgacaatgagtgcctcatactcaacttttcattatttgatgctctaaacccaaattttactgtccattatgatgttgcccctaacataatgagggtaattcttgccccaaaaagttgataggtagatgactcatccatgtgtaacttccaaataggtctgtctttggtctttttctctggtaggggctctctttcctgttctcattccttctcaggcttgaactgtcttttgagagcattatttcatttcccatacactcggccaaaaagtcaatcaaagcatgaccttttatttctactcttggttgataagtgatttcatattgtcctaacttaattattcatttaagtagccgaccaaatgcattagctttttgtaatacttgtggaaaaggttggtcggtgtatacccgtatggggtgagcttagaagtactgtcttaatattcttaaagcaaggagcaggcaataagtcaatttttcaattagagagtatttagtttaagcatcgactaacatcttggtgacatagtagaccggatgtcgggtgttgttctcctatctgatcaatacgacacttactggaaattcagtcactgcaagagatatccccaaatcctctctgtccagagatttgataagattggaggttgcgcgagctactttttaagtgcttggaaagcttatttatactcctcggtccattcaaacttttttacttcctcgaaagatgtttaaaaagggcacacacttatccattgattttgacatgaatctgctcagagtggctatccaaccagtgaggctttgaacttttttgacttttatgggcgacttcatatatatacagaagagcttgaatattctctaattaagttagcttcaattctttgagcattaacaataaagcccagatatttacctaaattgacttcagaagaacacttgaggggattaagcttcatgttgtattttttttaggattttgaagcattcatccttatcctttatgtgcccccagcctttttggatttgacgagctcgtcatccacataaatttatatgttatgcccgatctctacatatgatgttatgattttagattagcatggacacatgtgatataattttttatgtattgaattatttacttatcgttatcagttaaagtatgatgttgaaatactttatatattaagaatatgatggtattgtatatagttatattgttattgttagttccattttt

SEQ ID NO: 57759 - DNA, 1229 bp, Cannabis sativa
ctcagcaaatattcttcatttggccaaattttaatgtatgttttctattatttttattagaaaaatatagatgagtttggaagaggaaccaaatactctcaattctagctagcatacaattgatcatttttatttggcacttaatagtgttcaacactatacgacgtgatatcctataattggttagcaattttttatattatttattaaatcaaaatatgtagacttgatattaaaatactccaataataatatgttactttttgtagtgcttgacctcttagcggtatgctcattgagaaatggtaagggtataatcttatggtgtcaagcaccataagaagcgttttattattgatattttgatattgggttctacatgttttgagttaataaatattatatgaaaccgataactaactatagaatcacaacatcaatatgttattaggcattttaaagtatcaaatagcaatagtctacacaacatcattatacactatttagctgttgcctaaaatttctcccaaaatacgtggcaattcaggatcgagctaggtggcaatgggactcacgttacaagatacgccaccttaattactcctggagtctattattttaaaggagcaatgatagattagtcatctttgggagggtctagctggacaacatatatatctcttgtcttttaaggggtatgacacattattaccaagtacgggatacaaagtgcatatacaacactcagttgtactcgaggtgcgattcaaccctaccaacactagcatgggacgaacacttagtgcatgtggtatagaggtcatacttctgttaagattattcttgttcatctgataagccttgcagttaggtgtatgggcgcctagcggcatgtcagttttgtgtttatatattttatgttttttttactgagtctatcacttcacaaatatacttgcatgtgtaggttttggtcgagactgaactgagaatgagtttagagctctatgaagattgtacatatcaaggtggttagacctcgagagttcggttcttcgggacagcatgggctcaattgtattagtcgctagacgacaatgtgaactaatgtattttgggtcattttgtacatagatcgggatcacaaagtttgtaaacttttgtaaaacatatttagtaaattaagttagtatttatttattgttataaatattaataattatgtggat

SEQ ID NO: 57760 - DNA, 810 bp, Cannabis sativa
atagttcttctatttattatttatttcgaatttcgattttcgatatttaaaaaaaaaaaaattattttatcgcatgtactgtagctatttaatactaactgtaaattttaaaatttatattttttattactcacgtgacaattttttttatacgaatggtaagtaattatttaaactttattttcagtacagtaaattatattaattttgtgaaaatttataaataatcttaaataattataatatatgtaccataaaaaaataaactaaaaaattctctaaaatgtcatacaaataaaaatcaaccaaaattactctttaggcctcttctatagaaattatatatatttatatataaataaataagttgaatgagatccaagagtgcactcacttcgatgtgtacacgtgttcatgatttctatatataattgtgtacaggtgcagagcatctcataacaccaatatacctacgaaaaaatacatgtcaacaatacatattaataccaatagaataatttagcttattatattattagatacacactatgagaattcctatacttgcatctcttgtaattttttggattaacataatcgtaaaattaatttaaattttgacatgtatttaattatctttttgaacattttaggacgctaaaagttctctttaactattaaaattattaaatttaagaatttttgtttaattttattttaaaaaacttgacatagataaataaaatttaagagtcgcaatttaatatatattaaagtttagaaagtatgatttaagtaaatattaaaatt

SEQ ID NO: 57761 - DNA, 651 bp, Cannabis sativa
ggtcctccgctgaggtgataatgttcgcccggagtaccttttcggcatcaggggtgcgaatgttggggcaaaggaccttggagaggttgaagtcgtccaccgattggccctagttcaccatggtgaccaagcccccacattaagaccctctttgtcatatgtggaaaagaccttggcctgctgaaggaagagttgggtaggagcggtgcagtgcatcgggggaatcctaacccacttcgtgagtagttttgggcgttccacagcttgaaaattggaagagaagaaaaatcggtgacgatactccttgacattcttttggaagttataagggaccaaaccctcgttggcaagatgggcccggagtgtgacaaaactgtctttaaatttgtcccccttcttagggacagacacaaattcgtaaaaatataaaatttccgcccgagctacataaaaaataaataaacctgagagcaggcggtacgcttggggaatgagttggtaaggcgcgaggccaacaaaaactaaaaaattgataaagtaatcttgaagcgagagcatggctcccgacatgaggtgggtctggctccaggttccaaaaccaccgtagttgtggttgggcgtctcttcctctcgaggcaggcggtgaaaaac

SEQ ID NO: 57762 - DNA, 1584 bp, Cannabis sativa
  modified_base (650)..(658): a, c, t, g, unknown or other
ttggtaacgcgtggacgttaatcattaattataacaatttatactaatgcttataactatacttacatttacattaatttaatcacagaattaaaataatgagaagtaattatccattttacttgtaaaagcaaactggtgtcgttttctacaacaaattaagggtgattcactgatttgcatgctgacatggttttacaaatataactaatataataaataaacaaaatactcaaatatatatatatatataaatatatatatatgacaggtgttgaaagctgtatataaattattcactattttattacagcataataaattatacaaacattgaccatatactataaaatctaaaagatattactttgtaaatttttcgggttaatatcaaaaatgttcttggaatttcctataagaccagctagtagtggatacgccacttttagtttactaaaaagcaaatttatatttataataataataataacaaaatgatttttttggtggatcagaaaacctaattaattacaagtttaaaataattaaatatgcatgaaaagttctttatttctttttaattgaaacgcgtttcaaaaacatgtctggtaacgaatggtccacgtatcatcattattattattattatnnnnnnnnntattattattattattattaagccctaacttgatatatgatcaatatcactatcatggttttgtatggcgtcgaagaaaaatcttttgcgttgttagcatatgttcgtggccacaattaattagagtaattaatttatgattacatgaattaagatccaggcaagtattaattggattgaaaatgacttttattaggatcaggtacgtagaaagaaactatatggttcaaataaatagaaaattctagaacaaatactcatgattctcactacttttgcctcatcgtagttaactaattttcaattttgtgtcggcaagtctagaatcactccgttcagttatatatgaatttatattatatataagagaacccattataatatcatgatcatgatcatacttctcctttgaattttaattaatgtctatatagtacaaaatgtttatgtggtgtatatatatatgtactctaaatatatatgctgtataacctattttgactttttagtaataagactgatcagctgagtatttaatctttcactgtgaattatattttattaggtataattcttgcaagtaattttaataaaagggtgaatactgatttgtaaggtttatatgttacacttagcagttattaagttttaaccaacataattaataagtatattaattaaatttatcagacaaaatattttaataaatggttaagattaatatatatttataaaaatattaatatagattaatcaatacccatatatataagtttttgattttttagagaaacactaagggacactttaagttccttaacatgagaaatttgattttatatgcttacaaaattaaaaaaatttattcttaaaccaaaaatttaaacccttaaaaaattatgcctttttttcaaaaccccaaaaat

SEQ ID NO: 57763 - DNA, 993 bp, Cannabis sativa
gttacgtgcctgtgtgatggattttgaaggctctaagagcaagtacctaccactgatagaattttcataaaacaatagttatatgaatactatagggatgaatccctatgagatgttgtatgacaggaagtgcagatctccaattcactgagatgaagctggagaaagaaaatatttaggtcctgaatcagtacaacggaccaacgaggctatagaaaagattaaggccatgatgcttgcctctcagaacaagcaaaagagttatgcagatccaaaatgtagagacgtagaattttaggtaggagatcatgtaatcctatgagtgtatctaatgaaggggattgaacgtttcgggaagaagggcaagttgtgccctaggtttacagggcctttcgagattctcaagaaggttggagtggtagcatatcgtctagccttgcctccaacactttcagcaatccataacgtgtttcatgtctctatattgtagaaatatgtatcagatgctactcatgtgctaagttatgaaagcctagaacttcaatcgaacttatcatacgaagaacaaccagttcagatattagacagaatagataaagtcattcggaataagaccatagctttggtcaaggtgctctggagaaacagtaaggtggaggaagccacctaggagttggagtctgacatgagggctcaatatccaaaattgttcaggttagatttcgaggatgaaatcctttcaacgaggggatatttgtaaataccgcttaatttttaagatggaaattagtagataattagggtttaattcagaaattaaatttctaattatgatttatgaatttatgtagatatataagtatgttatttatgttatatatggaatttcaagttttcatgttttatacccgacaacaattgaatgcaacgtttggccgatacaatcacatttttttatggtttagtattttagtggtagcaaggcaacctata

SEQ ID NO: 57764 - DNA, 1046 bp, Cannabis sativa
aattagcatctttagcctttataggcaagcgcagatataattagcatcatctttagcatctttagcatgttatttattaattagcatcatctttattttatttttcatttcatgcatttcatacatataattttaaacaatgagtacattgtcttattttggttgggagtcaagcatgcttattaatttttatcatattaataatttcatggttaattttttgaaaaatgactcatttatttttgtaaaatattgttttcaagccaatttttgctatctttgtcacttggaatttttctagagttataaaatgcacatgccaaactttgtagtaagatggttattagtacatatttgcttaggaaatttaccaaatttaatatttttgtgagtttccaattttcattaattcttagaaatagttaaattatttttatgcatcagcagttgggagcttgatgtatgcaatattgtgtacaaggcctgacatatgctatgctgtagggattgttagtcgttaccaatctaatttagttttggaacactggattgttgtaaagtacattctcaagtatcttcggaaaatgagagatctcatacttgtatattccagtggagagttaaatcctactagatatactgattctgattttcaatcagacaaagatagtcgaaagtcaaaatctgggtcaatatttactcttggtggaggaactatagtctggagaagcatcaagcaaaccagtattgcagattcaaccatggaagttgaatatatagcagcttccgaagtagctaaggaagcagtttggttaaagaaattttacactactttggaagtagtttaagaagtagaaaaactaatggtgctctactgtgacaacaatggagcgatggccaactctaaggaaccaagaagcgacaagagaggcaagcacattgagaggaagtatcatctactaagagatatagtaaagagaagtggtgtgacggtcttgaagatcaaattggaacataacctcgcagatccattcacaaagatgcta

SEQ ID NO: 57765 - DNA, 1266 bp, Cannabis sativa
  modified_base (57)..(76): a, c, t, g, unknown or other
caatcaatgtaaggttttcctaacccttatgtgtttatttcattgttttagaaaatnnnnnnnnnnnnnnnnnnnnaacatacttgttagtaaatttaaatcttcgtaaaatattctcaacaaaaagttagtggctttgtcattcactgaggcggaatatatggaagccacagaggctataaaagaagttgtttggctcaaaggattcacaagagaactggggtttaaattagagaatttaacagtgcattgtgacaaccaaagtgcattacatctgatgaaaaattccatgttccatgagaggtccaaatatatagatattaaacaacacttcataagggacatcataactgaaaaggaagtaaatgtgaagaaaattgggaccaaggaaaaccctgcagacatgatggcaaaatatgtgagtttcgctaagtttagactttgcctaaacttgctaaacatcctcaagtgctaaatgaggattcaagaccagttcagtcgcaattatcaataactctttccattttaatgaccaagatagataattgttgtgattggtctttaagtgaagaaacatatttttgactccaccaacttccaacttgtttaactaactgtcagttatgacaattagtattgagctcaacaaccaacggctagttatagccattacgtattgctacttcagacagtgtgttatgagagagagttttcataatttggtgagctagttcagagtgaaagaaaagagcgaaaagaaagagtggtgtattggactatggtgtgtttgatccatcatagtgccactagtgaggttgttttgtcattaaagctgtacttcttgagtgattgtgtcgagtacacattggtgatcaacaactgtaattctttcttctagcttaataaagattggagccattgggactgttcaggccgaggagtagacaggtgattcatcatcacactgttcgaacctcgtaatctcttgtgctcaattttctttattctacttgtcaaattattcttgttactggttttgcattactggtttttgtatactgtgttgtgtgtttttgaagttaccttgttcttgatcaaatctttgttgttctggttttatgttttgatttttgcatgagttacatgatcaagcacttgatcacatcaaattccaatctagaatttatttttattttttcggcaaagtaatttagaattattatgctaggggtatttataatatacccgattcaatccaatctacac

SEQ ID NO: 57766 - DNA, 1608 bp, Cannabis sativa
atgtttctctcaactctctaacaaatacacaagtccattattaatgttctttttatattattattcctcaaatttttttatagtcacctttctctttctaattttatactttttactaattttgtttagttatccttagatttatatgttcattcttatttttttttctttttcttttaaaaaattattcatattattaattttgattgataataatcatgaaaaggtcaccgccttatacttctcctttatatatatatattaattattaattcatcatattattcacaatattgttattatatatatgttgtttatggcagtaatttagtttattttatttagagagaaaatctattggaagtgatagtgatgactataagtgagataggataatgagaacatctttgaatatgatcaagtaacaactataagtgagttacggtgatgataacgattttgaatcaaataattttctaaatttatcaattataattttttttttctatatagatctctattttgtgtgatgattctttaatttctaatattttcttcactataatatttgataaataacttaatatctaaaacgtactattagaatttaaatttaattagttacaattctttcttttttctcattattaattaatagattttatttggtatatttcttctataaaatttttttaaattcatttatgtataaaagtgagtagttaattcattgctgtttgatttgttttgtatacacaaaaaatatgttgggaatgatagttaactacaagagagatatgacgatatacaacaatacccttgaatgttatatgttgcctaaaagtgagatacggtgatgagatagattttaaaatcatatgatgagttttctataaatttatgtattcttatgacaattcaccttcaaaataagagtcaagcctagtatattattataattaataggattaaaatttgataaaatttattagttagttatcattaaataaaatttatgatttattttataatatattaaaaaaaaaattaaatatccgtcgcgactagtgactagtgagtgtattatattgtttgatcagagagaagtgagttatataataagtatgatatatatatgtgataaaataaaaatatattatattatatgctataaaaaatccgagataatatttacattttaataaatatcataatatttatcagtcgatattataaggtatataataagatattagagaacttattattaaggatgaaaattaataaattatcactccaataattgatattctctctcatatttgaggtctattgatagatatgatttatgaaagtgacagtctttcaaatctttaatttttgtacttgaatatatatgtaggacttaaaataataattttactaattgaagtaaatatatttaatatttgatatgtacatatgtaaaccactcaatgctagctcaagtggttatagaggggatgcgtgtgtattggaggtcctagttcgagtcccagattatgctgatgtaatatataaacgcttaaatcaaagaaaaaaaaaatatgtacatatgtaaaatttaat

SEQ ID NO: 57767 - DNA, 730 bp, Cannabis sativa
  modified_base (505)..(506): a, c, t, g, unknown or other
taaaaaattatcccctaatgcatgtatggaaattcaaatttccttatgactattagagagattatagagcgtcatgtcaccgcttcatacttctcctttatatatatagattgtgtagattgtaattatttaagatatcttgcaaaatttcgagacttttaagaaaatttaacatgtagaaaataatattcaaatatgccaaaaattaagagtaatttgtggcgtaaatacttaagtttaactcttacttgcagataaatacctaaatttaattttttatgttaataatacctaagttatattatggaactttcataggtacctaattattaagtttcaagttaatggtcacatactagttcttgattggttcaggttattaaatttttattttaatttaaatatactaataagaaaataacacgatgatattgacttagcactaggtacttacagaaattttagaaaaatataatttaaatgttattaccgtaaaaaattaaanntaaatatttatttacaatcaaaaattaattttaagtatttatgtcgtaaattattccaaaattaattagtgatagtaattttacgtaaataaattgaagatcaaccaacattaaagtggaatgagcaaatgtaaataaaaaagttaaggtatatggtagacaattatatatgtatttatgtcaattgttggtaaaaactttaaaaataaagatttccccaattg

SEQ ID NO: 57768 - DNA, 601 bp, Cannabis sativa
acctaatttcttctaatattattcatgtgagatgtgtttgaatatgaagtgataattatttataaatttttaatattttatttagtaaaatagttagtagttacactgacaaataataattttagtaaatatttaaaataatttttttttagtaattatacctaatttttattagaatatgagaattgaagagtataattgagacttctcaattacactctaattatatagttatagtataattatattgttcaaacaaatacttaaaactatgaacttttaattacactcaattctaattctctcttagctttccaaacacatttttaaatttaatatgaactcctttaaagtagagattactaaatttagcattttatcaaaaaaaaaaaaaaaaaaaactatttaacagggtgtcgtataaggagtgtggaacctcatcctacaaaatttattaaattgaaagaggtgctcaactacattaaactgcaagttgatagctttctttgttccacgagcaacttttctaaacacattgaaattgaaatggattattttattgttatgcaagctcttatagtagcttaatgtggtaagaata

SEQ ID NO: 57769 - DNA, 808 bp, Cannabis sativa
ttttattttatttttgtcaacagtattattttattttgttaaagatgaaaatttgaaagatacatttatcattatttttattaattttgacttaatatttattcaaatcctcactcaactaaatttctggcttcgtcactgccaagcgaactctaaatgtaatatatattgaatttagcaagtaagtaggtggtgacacttgttttttttttttccgcttactaacactctattctaatatttaggttcattaattcaatttcttcacacttgagagatgagaggtatgttctgttgaagaataattaatatttttgttctctaaaattttgacattatttgattttgtcctttgaaatatatggcttactacaaaattgtttttaaaatataacagttatataatcatgttcaattaatctgttaggtttcatttttttaccgttaaaaattagtatttttctcccataaactttgatcaagactaaattttactcccttttattaaaaaaaaaatcagttaaatttaaaaattacaattttctattaattctgaaaaataataagtaaaaaaacccagtattaaattaataaaaaattattaaatttacttcaaaaacttaattatttcaaaaactattttcaaactttattttatttttaaaacatatctcttataaaattaaatcaaaattattgaaaatataattttaaaaaaagaagacagtgtgaagatataatcaaacttatttatatctataaacttatattttcaaaaataaagaaaaataattagaaattcaataaa

SEQ ID NO: 57770 - DNA, 742 bp, Cannabis sativa
tccactccccatagtcacggttatgaacaacaacatcaatatagttagaaccaaacctgagcaattgaacttcctccgcttcgcgccaaagaagagccacctaccacttttcccttgcgcatcaacactcactgccccttcgaaaccaagtgaaattcgaagcttctcaacagcatctttcttagccaacgtctcacaaagaaacaacacaatgggcttcttttggataacaatatcctttatgaattggatggcccatgggttctcaagcccatggcaattccatgttataatactcataatgataggtgggcttgggaaccaagacccacctttattaagttttttggcccaacaccaatatttccatcattttccatcataatacactcaccctctgccacctcattactctcaccagaaattccattttccatgcgcctccttttggaatctatgataattttggaaatatcttctccctccacctcagcattaattttgtcaacatgttgcatgggtgactagatacagtatcaatctgaacattcacattctttccttttataacactcccagtattgatactattgccattaaccatagaatcaatctccatgattttagccactgaatcagcctcaccatctgtcgccacacagtcagccgaactcttctccaatgttgccaccgtcgccaccgtcgcctgctgctcgggaccagaacgcagccactgtgtacc

SEQ ID NO: 57771 - DNA, 1482 bp, Cannabis sativa
taatgaagaatgattatagttggaatgaacaagtgataggagatctcctcagctttcttaaatttacatttgattacaatgaagtttttccctattgattttgtgaatggtatactttggtttcaatgtaatggtagccgaaaatattatttctgttaccatatagtaagtggctctgttatcggatatgttaaagcattattcatatgaatcaggatagcttttctttttattttttatttttatttttttttcttgagagaatattcctcattgtaattttgttcgttgttcttaataataaaaataagtaatatattttaagttttttgagctttgatcacgtagcttaattaaggatcttgtggtttttattactagcaagtaggtactttttcttatttgtataatatgcatgcgatatttatacagacctgtacttggattagtatttgatcatgatcacaagcactaatatttgtgctaattaaagttgttgagatcatcagtatttttgagcatatattactgtgtttgataaaatgttccaagaattttgaggtgcatgctaaggcatccgaaatgaagccaaatgccgaattttttttttcagtcacacgctgacgagcacacagttaattataagagaattatttcatatattgttttttaattttttctttaaaatttacggtttagattgctccagttacttttttcactattccattatcttcttgcttttgcgtcagattactaacaaatttagatctcaaagaagtacaacatgcatgtaagagaagcatctcagttattatttgttcattgtactttatcatgattaaacccctcttttgagtcatataaattgttgctatattttcttctttcctttagggtctttttttttcctacttttgatcaagtatgttctttattttttggctatatcttaaagaaattctatgctgttgttagtttaattaatatatgattctatgaaatcatcctgttaattatttctattttatgttcaactatgtgaatttggcattaattgaaactttgaatagttctttatggattgaacttaccataaatgtcaaacaccactggctggttactcgcaagtcactatgggtttcttgagcaagtttataattgttttctccaatatttttatttcattgattatttatgaagtccaaggttcatggttgatgctataataattgattgtgatataacatatgaacaaattgatcggcagaaaaaacatggttgttaactctaaagttcatgactagctatataactgctaattcaattgactttcgatgattggaggaaatgttgtaatgaaattatggagctcgagttgcagttaaatatatcattgctctattattaatttgttgcaagaaatataataacatcatttatattgcatatttcatgtttcacattatttgtcatatgtag

SEQ ID NO: 57772 - DNA, 1174 bp, Cannabis sativa
ttgcattttatggtgtatttggaccgagcgtaatcgtgttgtgcacggtcacaacgccaaaccagcaagaactgtgggttcctttgctgccaattatttgcatcaatttgctacaacccaaacaaagtttcatcaacgcagctcagcaccacagcaaccatctggatccgcaacacatcaccaacaacatcaacacaacgcctttgtagctgctccttcatggcagccccctcctccatctgctttaaagcttaatgttgatgccgctgtggatagtcagcacaacataattggagtgggagcagtggttcgtggctctactggttgtatacttgctgctatgtcaaagcctattgttggcaatttcgcatcccatgaaatggaagctaaagctttgtttcacagcatcaattggattttacaaatggaagtgccaattactcatattgaaacagatgcgctcatagtttccaatgccttgactggcacttgttatgcaatttcttcttttcaagacttaattgtagacatatcttgtcttctttcctctctccctaatgtatctatttctcatgttaagcgtaatgctaacatggctgcccatgggttagctagatatgctttagggttggaagaagcttgcttttggttggataatattccaccgccgatatactctgttgttgtaaatgaactatcttctgatttataataacatggtatttctcctcaaaaaaaaaaaaaaacataaaaacataaaataaaaagcaaataaaactaaataatattaaaaaataaaaaaaaatgatctcattaaagataaattatagtatatttaattttgactttaataaagtatgtatatccttagatgtatagggaaattttcagatgaatgccttaaaaaaatgtcattatttaaattttgtaacatattaatattactattggtctaactatgtatcaaatcatatagagtttgatacaataacttttagagggtattgctacccaattataaaacaatacgtctacaaaatgttaaattacccaataacaatgctcgtccatatataaatttagaataattagcttttttagtccctgtacttatgacactatactatgatgccccttaatttataagtgtagttaaaaataccccctaaaatat

SEQ ID NO: 57773 - DNA, 821 bp, Cannabis sativa
cccaattaaatttcaaattaatcatagttaattgaactcgagaaagatagctcaaatggtcatgtatgtggtttgaattgttaactctgctatcagttgctagaatcaatagttttcgattattggatgatggtatacttctcgaaattatttatatttgttgattaatggacgaacaatatcaccatttttattcgattagataccaaagtaaattaacatctattaaattgagaaatttaaatcgcgaactctgctatcaattgttagaatcaataaattattattggacaatatattatttatgttcgatgagatactaaattagatgattgactcattctatattagtgaaattcgcgggatagttttccttgtttactagtttcgaaaaataattaacaataatcttgtaattaataatttgattgtgatgagtaataatttacaggtgaagagttggagtttaagaaggatttcagagtttggttaccttagagctcatgcaactaagcaagatataaccttagaggtaattaatttctacttttacttatatgaatactaattttattaaatcattgacattttttttattactattaatgtgtatttatttatgttttttttttttttttttggtgatcagtttgtaaacacaggtagtagaaaaattgaagatagctttcgaattatcaagaaacaacaagaccaattgaataatagaaaaataaagaataaatagaggacaaaatgatctcttattatgaacataaataaatacttcttttttattgttatttacagaatgtaattaatct

SEQ ID NO: 57774 - DNA, 794 bp, Cannabis sativa
aataaaaaaaaaatgagaaaattaccctcaatattttttttatattgtcctcttttatttttaacctttttttaaagcctatcatttttacttttttttaaacattgtaccaattttacctctgtcacttcaagatactctctatgtgactctcttatgtcagggtattttgagtactatatataaaaagaggtatgtttcaattaaatataaaattagaggtaaatttaatcaattaattaataaaagtgatatttttcaacttacccttttaaatattaacacaagagctgggtaagatagactaggcgtgcatttaaggcctacgagactcaggtcaggtgtccacaaaaataaaaaaaaattatttaaatttacacatattttttgtgattttttaaaaatgctacattttctttaataatgacttaataactttgttgctacctaaggcccaataaatcttaggacgatccttggtctcagaagttgtgcattaaacatttctgccaaagctagtggtggttggcggtgacatatccaccatataacattatttatatggtgtctacaatcatattgatgtggcgtgctgcaatcgattagcagttttttatattatttaatgaattaaattatatgacactcgatataatttatatcaataacaatatatcacttataataatattggctaattagtaattttttcccctcgaactttaacatgcattaaatcgtgtcccttgaacttttttggccgttagaatttcccctcaaactattgaaattgt

SEQ ID NO: 57775 - DNA, 1330 bp, Cannabis sativa
cgaacccgaaacccgtttggaggtattttcgggttgaacccgactcgaccacacgggttttttaggttttcgattcttttggcagcgggttggggcgggtggtcggagttttcgggttcgcgggtctaaatgtgcagccctactttaaattttttgtaaaatatatagctcatttattggacctctcttttattacttttttgctaaaattttaaaatttagctattttaaagtgactattaagtaagattgaacataaaccccgacccaaccaacccgccaatctggtagaccattcggtcgggcgggtcgggttcaacctggtggacctttcagacaaatttgggtttgatattttaggtgatcaggtttcgggttgaacttggactcgctcgtaaactcgatttttttttctttttactcttacctaaattactttaataataatacaaatttttacactttagacttcaaatgtaataatattaactatttctaaaaaataaaattacataatacaatatatattatatattatatgattatacatttcttttattataagaacatataatttattaaatttaataatttagtaatgctaaaaaaaatagttaacctgcccaacttgactgacctaaattcgccaacccacgacatgtgaccagggaggttcgagttcacctttttttcacttgaaattcggtcaacatgcccaatattcagtcctacctcttaggatgatattacatattcttttctcagaaaataaaatatcctaaagaatttctttttcttaatatctatatttttttggaaaattgcatgagttcttaagatattttgtaaatttttaaaatattgaataaaaactaattcatccaaaaaaaaaaaaaaaaaacttcaaacaacaaagaattcaatgcttgaaatttgcaataaagtcaataaagtcatataggggctaacatctacacaagaatactcaaaacctgcatataaagaattcaaatgcttgaaatttaaattagcaaaatcaaagaaaaacccaagaccggagcctgaattttgaatcaaattgtcaagacttttaacatacaagcattgagtaacatgtggaaatcacccataacgctttagctccatctaactctaagaaagaacaacttattgatcctaattacaaccacacctaatgaatggagttgaaaactttgttgatttatagtcagtgtgtgactcctaaaactggaagaccaatattatgcctattatgaatatgagtgaatatgtcacaccaatattgaaaaaaaaacaagttttggtcagc

SEQ ID NO: 57776 - DNA, 903 bp, Cannabis sativa
ttaaaaatacatttagttataatagattttaattataataaattgtagtttttgtaaaaatctttagtcacaaactttttagaaaaaattacagtggtaaaatatttacatttttacattgaaagttttatttatttatttattacattttagagtattctatgcgaacacaagattcaacaagaaaatcacatgaaaataacatcaaaacaacatcgaaacaacataacaaaaaattaacaacaaaataataagagtacaatataataaaaatacatcaaaataccgtattttttataaataaaatcttaaaaaccgtaaaaatatttaatattccgcaaaactatatttttgtattatttttatatatttatgaaattatcccaactttttattaataatataaacttaaatgataatatttagtcataatttttgtcagtcttttaaacaagtacttattcaaaataacatcaaaccatctcttaaaaaaacatcaaaccaaaaaggaatttttctttaggctaattaagattttcgtttctcgaactttaatatgtaacaaattgtgttctttgaactttttaaactattaataaaaattctctccggattattaagattattagattaaaaatgttttgtctaattttactaatagaatcctaacgttgatgaaaaattatgagagaatgattttttacatatcaaaattcgggaagcacgatttagtacatggaaaatcaccgcattagtaaaattgagttggaattggacagaagtccttgaatctaacaatctcactagttcgggaagaatttttatagcctaaaaaattcagacggtataatatgatacatgtcaaaattaaggggacaaaagtcctaattaaccatttcttta

SEQ ID NO: 57777 - DNA, 1550 bp, Cannabis sativa
gttaaataaattatatgttaaattgatttgttgcttagattcacttgtcttcatagaatttaatgctttccctatgttaaatagattgcatgctccgtgggtctactgcttagtaaaaagatttcattatttagtgcttcgttgtaattaattgtaatagggagactcgaataagtgattatctacagggttaataattcaattttgaaattaaatataatatttatcattactattcttgactgattgttagaggtatagaataattattaactgtttttaaaatcgtaattgtcattcgttatttattttctttttatgctattgtaattcaaaacccttctttttttttttaattcctataattaactattgaataatttaataagcatagtcttcgtgggatcgacccttactttcttttatactgaaataattgaaagtattagaataaaataattagtaaatttgttgtggtaaacgacatgcatcaaatttttggcaccgttgccgagaactatcactttattttattattcatatttaatttctctattactaacttgtttttacttggctacctctggtgtagatgtctagtgaagatgatactcaagagagattatcaagggtaaaataatatcttgagtcatcgtctgtctctcgctcatcaaaaagtatcaccgataatcctccctttcaacctcttggtcatgtcaaagagccattatcagctgatcatgagtcttattctgatgactcagtcaattttcacaagaccatggctcaaaataggatgttgaaagagtttgtcgtgccaaatcttgaccaatggccactgtgcatccattatccactttgggatgttaatttggaactaaagttaggccttattcacctactaccatctttccatgggtttcccagtgaagatcccgacaagcatctaaaggagttttatattgtctgttctagtatggaacttccttcagtgactgaagaacaaattaagctgcgggccttccctttctcattgaaggatgaagctaaagagtacttatactatctcccacctggtacgattgaaacattgaatgtcatgaaaattgtgttcttggagcattactttcctgcatctaaagttggaagtatccaaaaagaaatatgtggcatcaaacaagtttcaggggagtccttgtatgaaaattatgagcatttcaagaggttgtgtgctagttgccctcatcaccagatcaatgaataacttctaatccaatacttttatgaaggtctcttaccatttgataggagtatgatagataccgcaagtggaggagcactagttgacaagactcctacaacagctaggagcttgatttctaatatggctaccaactcacagcagtataatccttatccaaacacatataacgagggatggcgtgatcatccaaattttagttatggaaaccagtaacaagccgcaccaactagaccacctgggtttaactatgaacaaaagcctcagtacaacaagcaccatcatcaaa

SEQ ID NO: 57778 - DNA, 990 bp, Cannabis sativa
aattgactaaccataccaactagagagagaaagtcataataaataaacaagaaaacttaaaaaacacgtaaagtacaaaataatcaacaaggctcaacctctcgatcataggagccacgcctaatcattgtcagatctcaaatttgaatctcgcatactatcttattctcattctcgcttgcaacaattcaattcttaacgtacaacgccacaaatttcattaacattaaacctaatatgaaaattgactaattcagcacatcctagtagtaataacatcatcagcatcataagaccatataccttgaagagaaaagatgaatgaactgaaaatcaaacttcgctttgaattttacagtttacagagttttcatatgatatgattaacgatgcaccatggtgtttctagaagctctttatttggaggtacattctttgggggtaaagaataattccaaaatggtagtcgctagcttattggtggtacttctgtgtcagtgtacaaaaattattggcttccttcagtgagtggcaataaaatctcttatgcttcttaggaatttttaaatagaaacgatattattaaatgaaatttttaaacttagtcgcggactaagttaagatgttcgcgatactgcttaggaatgtacaaagaattaaaattgcgagtcattcccaagataatacatctcggttgtcgtccactatattagaacaccactgcactttagcaaatcttcgaatgcaactttaaaatagatatagcacattgaatttttggcagtcaaaactgagtttatttttcggtatgaaaaagatgtgtttctcccattagtgcaattgtagtatgtagacaccaatggaatggaaaaatatgtcgggaataagaacgttttttaaatcgtgtcccataaattgatacgactaagtaaccagttttaatttattgacctcaaaaagtgatcaaccaacagcagggtcgtatggatc

SEQ ID NO: 57779 - DNA, 1036 bp, Cannabis sativa
agaggttcttactacatgccttgaagtattaaacaataatatgggctgcggttcccttaatgatacacttctgtgccttattcccaggattaaagagccaacgatggtgggagattatagacctttaagcttatgtaacgtcatctataaagtgatctcaaagtgccttgctaatagaatgaaacatagcatggaaaaggtaatctccgagaaccagagtgcatttatcaaagggagacaaattcaagataacgccattctcaggtttgagagtctccattgcttgaagaaggggcggtttggaaatggaaagaagatggttcttaagcttgacatgtcaaaggcatatgatcgagtggaatgggatttccttgaggtaatgatgaaatgcttgggttatgatgtgcaatggatcacaaaggttatgaaatgtgtgaaatcggtcactttttctgttttgcttaatgagaaggctcggggtcacattgttccggagagagggttgaggcaaggagaccctctatctcctttcttatttcttatctgctcagaggggttatcatgtctaattaatgaagcaagccgtgctaataaacttcatggtcttcgatttggtcaccttgaaaagagattgacccacctccttttcgcagacgacaacctcattttcatggaggctacggatgaggagggacaaacaatatctgaagtgctgcaggtatattcttccttatctggccagtgcattaattttaataaatctaacctttgtgttggcagaaatatctctaaggttgaaggaaaaagactggcgagtaacatgggggtcaccttcactgaaaaccattccaaataccttggcctcccagcttttgttggaagaaacaagaaggaagcctttggtctaattcgaaataaaatttgggaaaagctccaagggtggaagatgggacttttttctcaagctgaccgagaggttctgattaaatcaatcatacaagctattcccgtttacctcatgagtagtttcagacta

SEQ ID NO: 57780 - DNA, 1056 bp, Cannabis sativa
aaaaaaaaaaaaaaccattaaaatgttataagtagtgttatagggtttgctagaacttataaaaagattcaaagttaaattttaatacttttgtaatattgacattgactttgacattctactacttataatgtgtaacttactatgtttttctttctttctatctttttttttttttttgaaaaaaaaatatatgaacattattaattaatttttattgaaatagtatatatatattttatataatatgtggtatataataaattttttagtttaatagtattttttagttttctcaatagtatagaatatactattacttaagagaatattctttattaattttaaaatattattatatatatttaaaaataaaaattatatatagatattttatattaaaaaaaaattaatttaattaaatttagaatacttaaaatattatagatattttcaaccacatttttaactttattggtttaactttgaattaaaataagaaacaattctgcttaatcgcggatacacaataattcaccacgatatctcacttagattttatccagaaggcacaaaatataaccgcaatagcaaaaaaatcttcaaagattaaaatctcaaatctcatttcaaaaaaattaaaaaaatatatatattacctaattagaaaaaattaaatacatatattatatttaatatcacttaattaaacttaattatatttatattatacgtataacatcatgtctaatagactgatggatatatacatatgatgtactgtattatatttatatttttatgtatgggaaattatagtaatagtaaatggccctaccctaaaaattataggactatgttagtttatgtcctcatttcaaaaaaatatagcaaataaccctaaatcataagactatgttagtaaatgtcttcatttcaaaatcattcattttttttttatttttttagaattagaagctaattatttaaacatcatggtatatctatattagttttgttaaaatctttttttattttaaagttatgtcaattttt

SEQ ID NO: 57781 - DNA, 1026 bp, Cannabis sativa
tttttttttatttcaatatttttccttttctaaatgtttcttcatatttatttattagtaaatatataatagtatagaagactatacgagcatacatatgatattaaattttttgtgttgttattcttttttttattaatttttgtgaattattattttatttttcttataaattttaattattactaagtaatagtagagcaaattacaacatttaggtatgacgactggtgatcttacctttaataagtgaacttatatcatgctatatctttgtttaaacataatttttttcaagaattatttaagtataatttatatgattataacttacaggttttgacgagggttatgtgcctgtgatacgttcttcacacgcctagtatatatatacatgataacttgatcattaagtttggttcttttggcacgatttagaaaaattaaatgtttatttatatcattatgtgtatgataaagaacccataagatttaagattatagtgtgtcgagggtactccatttggatatcttttaatccaaaaggaggatcagattgaataacctcatagtacagtttttttttaaaatatttacgaaaaatgcactttatattaataaataacatatatatatatataagagatgtgatattaatctcaacaccacatacactacaagtgtataataggagaatcaccaaatttgaacaagttcttacacctttgtccaaaagcttatttccccctacctcgcagttagggaaaaaaaaagtagaaatagcttttaggaatcatcaagcctaaagtgtttatagcaatgtgctctctttatagaaacttgttgttttacaaaatgaacccaagacctcttgttatacccaaaattcggttgtacttcagaaaatgacacctgtcaatctcgtggaatatgaatcaataaataaaataacaattatatcattaaatgtaaaatggaataactcattaaatatagaattaatagagtatattcataactcgctga

SEQ ID NO: 57782 - DNA, 1207 bp, Cannabis sativa
actgctataagtgtaattatatcgagtctcatcatataacttaacttaaaaaaaataatttttaaaaaatattgctaactaatcttaagatgtattatatccttctcacgaaaacaatactaatttattaattaagatattgtgaggagaagtattcaaatttaattaatgacaataattaaagcaccgataattaatcacttaacgagcctttagccatattaattaacaaagttatatatatacgtatatatgttggccaagtcatttttcaatttataatttaggatcattctacaattatatatagtgttttttatcaaaattattgctccttgactgttgactttacgaatacgtacgtacgagaagatacatacggaaggatatatatatataactacgactacttaggagagccatatatatttagatattataatgtaattgatgcatttatacgtagcctgtttaagaacacaataggttttgtacggacgaaattagagaaaaattacagttttacaaatattgggtacttataccgctaaaaataaacattagaattatgtcacttacaaactttaagtaattataccgctatttatccaaacactaataatactttttagcaatcttcgtcaaattaatatactagtagtgctatggacttttggggattgtaacaaaagcaaatattgaatgagaaatgcttaggggcaccttaagtctcctaattacttttttttgtacaacttaaactactatttgcatgattcatatatatgagagaaaaaagagcaaaagactttgaatattatctttatgattgaaatggaatacatgagctgaatatatataggcagtaagcaatttttaactaacttaactaattaacatttactcttaacaactaattaccagacttaacaatcataactaactctaatagccccctcaagattgagtgtaaatgttgatgaaatccatcttggatacaatgttgttgaactaggaagggagtagagcctttgtgaagatgtcagctcggttgttgtgagaggagacatgcatcagttggagagagccttgttggaccttttctcagatgaagtgacagtcgatttctacatattttgtgcgttcatggtagacaggattctcacttatgtggattgcagttgtattgtcacagtacatcttaggt

SEQ ID NO: 57783 - DNA, 1286 bp, Cannabis sativa
tcaagttttaaattctgcacaatttatttatgtttctgtatttttacaataagtctgtgttctgcaataataagttttcaatatgttattgtagacttttacaatcgcatttttctatactgctattaaaaaaatttattggcatatgttttaattaatattagagcgggacactaaactcttagtgtgatcaacgttttcttgtgttttttttttttgcaatatgtcattttttgtagaaagaagtttcggttctcttccaccacttctcaatgattctaactatccttattggaaggttaaaatgagggcatttatgaagtcccaagatgagaaagcatggagaataattcttttaggatggtatgttgtggtagatttcgaaagttattcaaagttaaaacctgaacttgaatggtctacaagagacgataatttatctgcttgcaataagaaagttttaaatgatatatttaatggagtaggtgaaggttttattaagcttatatcttcttgtaaatctgctaaggatgcttggaaaatccttcaaattcagtttgaaggaacttatgctgttaagcgttctaggtttattatgcttcagatcaaatttgatgatcttagaatgtctgaaaatgaaactatatctgatttttatgaaagattgtttgatataactaataaatattttgctcttggtgaaaagcttgatgaatctgttcttgttagaaaaattattagagttcttcgagacaggtttgacactaaactcttaaatatttaagaagcaaaagactttaacaagatgaaggtggatgagttgatgggttccttgcttacttttgaactaaatcagcaaatgaagcagaaggacaaacccaaattcacagctaataaaggtaaaagtattgttttaaaagttgctaaaaaaataaagttatgataaatgtgatgatgaaattgctttattaaccaggaacattcagaaatatatgtaaaagatgtgtaataaaaagatttcacccaaattttcaaaaggaaatattatttttaaatcttctatgactaacaaaaagggaattcgatgcaaaatgtggagattttggtcatatttagcttgaatgtgcaaatactctaaaaaagaataagaaaagtttcaaagttacatggagtgatgatgattgggttgttacacatcgttgatgtatatatattgtactaactgttttcaatagtgataacacttaatctctttcattcaatctttgtgttactctcttcttttt

SEQ ID NO: 57784 - DNA, 700 bp, Cannabis sativa
aaactaagaaaaatggaaactaaagaaaagaggaatgttgattacaattcatggtaataaataaaagatttggacatccatataatattaatatttataacaagaatataattttaatgcaaatattagtattataattggaatagaaaaaaaaattagaaccataatttaatctttatgtgttgatttaataccaaatttaacatttatccttggaggagttgcccttaactttattacattctacaaaatattatgagttggattaggggtgttcataaaacagctgatccaacccaatttttacgatctaatccaattaaatccgcaaaatgcagatatccgcacttgtacggattggattgaaaattttaaaatccacacttgtgtggattagatgttgattaatatgtaaaataaccgatccaatccaattcaaacatatttataacaaaaaataaaaaattatatatacaattaacattttaatgtaaaaaaaatagtaattaaaagtctaatacatctagtacaattattttcaaaacttaatagatcaaatgtatattccattcttatatatagggaaatttaatattttatgcttaaaattaatttatccactaaaaatatgctagcatattttgcatcatgcaaaatatactcacactatttttctcatccaattttacccttaaacaaa

SEQ ID NO: 57785 - DNA, 880 bp, Cannabis sativa
gtccgggttcgggtcatagtctgagtcccagatcttgatccctgtcacttgtcctggtctggttccggttcatgtcataggacccagttctaagttttgcttcgggaccaagactggggtgcagttctaggtctcgaccccaattctgtgtcccgagtgaggttccatgtttgggtcttagttcgggtctaggttcggcaccgagtcgaggtatgggttggcatccgggttcgggtctaggtttgggttggagtccgggtcctagtccggttacggttttaggtctaggtctatgtttggttacgcttcgaggtccaagtccatgtccaagtccttgtttcggtcccgttcccgggtctcaatctattgtggtttcagaatttgcgtcacagggtacgggttctggtccatgtttatgtctaggactgggtttgggtcagggtctgagtttggtttctgctctgggttcgggtctggggttgggtcctagatccaaacaccgactacgggtttggtccaagcgtcgggtctagatctagttcccgatcttgggtctcggtctggttccattttgtgtgccgggtcacgagctgggtcctatgttcaagtccgggtttgtggtcagctcttgggtcccagtcctagttccgttggttaggtctctatcccaattctgtgtccacgtctctgttctggtctgggtttaggtcccaatctaggtttgggtctgggtcctaattgcactttgggttttggtctcgttatgtgtatttttttgggtttgggttcgggtttgggtcctgctccatgtcttggtctgtaaagcccgcttagttaatttggaaattaccagttgtttatgtttaatcatgaaattatt

SEQ ID NO: 57786 - DNA, 834 bp, Cannabis sativa
gtagcaattacaaattattgtctttagattcaaacaatttcatcttaattttactgtttgtttttccttcactttctttcagttattttattaactctattttgtgcaaataatctaaacaatgtaatgttgattaattaaaattgaacatgagaaagtcttattaatagggtcgattgatgtagctgtagtcttattaatgatttgaacaatgtaatgtaatgttgatgtgcattgcaagacatttgtttgataaaatgtcagaaagggagcattttgatgataaagaaatacgagaaagcaaagaagcagagtaagatcaatgaaaactctcatgaagcaaccttccaaattacaagttttatttttattcgtttctatttttcttttctttcaatcaatgattcaatattcaatttatttagatcagataaatcaaattcagataagcaagttggcttgtcgtgagttgagcttggaatagtttgaaagttctaaggatgggagctaacattgtcgtcatgattcatgaagaatattaaaaggaggttgccatcattgagagttttatggcaatactttcgattaaataaacttcttatacttatgtgtaaatttcttcttatagattagaaatatatattctaaattttcttcaacattatcttggagaaagtctcataggaattaggattatcaacatgacaaatttaagcacctgcgaacatctatatttttgaaaaaaaaaaataaactaaagccagtagaatagtttagtacatctttcgtctctcagctctcaaaggttcttcactgtctttgttcttttttttt

SEQ ID NO: 57787 - DNA, 2981 bp, Cannabis sativa
atgcattttttttttggggtattaattatgagttttttttttacttatatatatatgcagtataacaaaattcttttaatatatatctacaatatatacacagataccttattacaaaaataaaaattataacaaacaaataatatttattaatgataataaagaccattaatatatacgcaaactgcaaagttattaatattaattatccacacaaaaatgccaacgattaatttaaaaataaagtctggatcaatattaattaagataaattctcttaacaaattaagagaaatatataaatataattataaagatgattattgcttatagttcaaaaaaaaaatcatataaattagtatatggtagtgaaagaaattagtatatattattcacacacaaattaattttatggtagataaattaatatatattattatataatatatatatagttcaagaaaatcataaatatatagtaataaaatatatataattagtatgcatgttttcattctttataagtgtaattataatacatataaatatatatatatatatatttgatctatatagaatttattattcatatatagtatataattgcggtataatacatgaatccattttgtttattagctaatatatatttattattaattaattattatatttgatgaataagaaagcaaatagtagaaattacagaacaaatcataataaatatttattattgaaccgttataagatatatacacacatagtcatataatatatatatatatatatatcatgctcgctataagtggcttacagcaatgaaccaaagaccatttatacatatatgatcatatatatatatgcatgatatgatgatattctatatacatacacatataattaaataaataaataaataaaaatggaaggtgtatatatatatatatatatatatagatctggattggaatatggatgatgaagttagtggggtgtattattcttgatcagcacacttgccaaggggaatgttttgtgggacccactcattggaccagtgagtgaacaaaataaacatatttctcaatcttatatattcacttacaaaattcaattatatatatatatatgaaagagaagagaaaattgaaagcaataataatgaatgatcattcgacggaaataataatgaatattgttgtgttgggtaagttaaaagaagattctgttcatttttttttatctgttttgatatttaaaaaaaattaatctatttgatattttaaaaaaattaatttattttttattttttataattgtatacgttataattatttaaaactatatattaatttttaaaattttttacgtagtttaatattaaaaataatatgttgttacacatataactatttttattatacatgtaataaataattatttaaactttatttttaatattgtaaactattcacaattttttgaaaaatttaccattattcttaattaatattactatatgtgattataaaaaaaattaaatcaaaaaaattcttttaaataccgaaacaaataaaaaatttactacaaaaattttctaagctcgatcatcatatatatatatatatatatatatcatccttattagtaggtgagatttttggttgaggcaggttaattaatgccctaataattcctctactttaattttatgtacctacgttttaaaatagaaatattttaaacattattagaattaatttacatattaattatcattattagtgatacatgcatgtaatgtaatcacgtggtacatttcgaattatcaagcaccaaatctttgcaattctctcaaccaatttaaaagtgccacgtggctcggtttaatcaaaatgaaccatatatattttgaaactttacaactaattacatccatttaaactagaatttccactatttttttaacattatttgtattgtatgtagtgcttcatgtgaagatttgctgtacaagccaagttggtgtaattaaataaatattattatataagataatatatattaattataaaattagggttataaaaaaaaatacaacagtgcatatccattaactactctttccatacaaaagttttacattataccaaagccaaccaataatgacacattacaaatttaattatcatagaaagaaaaattacatacataataatattaattaaaataccctaaattaaatataagagaaaaattgttattggatttcatgaccttgaaactcagataattgtactatagtacatatccattttatgaagccaatctaaaataagcttcaaaatcccaccataatatataaataattgtatcaccctctatgataatctttgttagctaataattaattatgataagagaaattaaatccaaacaaaccatacccacaatgagaagaaaattaataattaacaaaaaaaaaattgatttttttttttaccaccctccacctaacattccagtccaatacccagttgagtcaccattctctttaataatattattattttgatcaataattccagaattattattattgttattatgtgaagaaacttgcttcaaatcttcaaaagggaatagaagccttccactaccactattattattttcatggacacttggcaagctcccataggctgatgctgtattagtagtagtagtagtagcactagtggtattgggcccaagcccatcaagtgaaaaattgagactgggcttaaaatcaggaattggaaaaaagctattgaaccctcttgaagtaagcccagtgagaagctctaaagctgagaaatgatcacttgtattagtagtagtagtggtggtggtactagtaggagaagtattagaagaaggattagaaataatatggttaattttttggtcattaataatgggtgggtaaaaaccaaggttta

SEQ ID NO: 57788 - DNA, 1407 bp, Cannabis sativa
aataaatgttatgaaaattacttaatttaagttggtccaaaattaatcaaataattaatttttaactcaaatttaattttctataaatatatctgacaaaattcaaaatcaatgtatttagaagtaatacattttcgaaaatcactctaaaataaaataaaataaaactagaaaaattattttaatttatgttggtctaaaactaaataaattaattttcaacataaatataatttccctatttaattaaatttcttaagaaaaatatcaaatatttaagtgtctagaacaaaattaacttaaatattaattttcctattcagttaatgatattgttgaccaaggttttcggtaaccaattaaatgatatattgaggagagctttggaataattaatgcaggtggttttaatgtggttcgggcattaatgagccgtagtccatgagtctttgttattaatgagggttcttatgcagagaatgttcttgatgaattctctctctctctcttctctactcttttcgatcgatcccctttcccattttgttcagaggtatttatagagttttgtaaggatcactaaaaagggatcacttgtctttgagtgccagccctgtaggtgctcaagttcctaagagatataaaataagacatacatgacctatgtcgtaggtatcgtaggaattcggtgagagtaatctttatccttccttgattgatgtgattcttcataacggagtcgtcactagactctttgattatcgtgtaatcaccgtaaacaagtcttacgctatctgtcatgtccttttatgggtgttctaatacgtttcccccattccgcattaaatgtaaaatgactgttcgaataggttctccttctcccggagatgctttgttgtatttctagctcccggagagtagaggcatgctttatgctcctctccgggggctcactccctaaagtgcacttgcttgtctatatatgacttagctaatttcgtgggtgaggtgtccttgaaattcacgtgccacacgcagccgctgccacgtattttggggaaaatccaaggcaacagatatctaaaaaaatacaagaaagtctacctagaaaataactatcaagataattcataaactaattacttattttccaattaaaatacaatatattttagtctatttattttaaataaatcattaatgaaaattacttaatttaagttgatctaaaactaattaataaattaatttttaactttaatctaattttcaaaattgaaaattttcgaaatatctacattaaaaataatgcaatttgaaatttaagtgagaaatgataataaaataaaataaagtatattctgaaaattattctaatttaagttggtctgaaattgaaaaaaaaaa

SEQ ID NO: 57789 - DNA, 1561 bp, Cannabis sativa
gcttaagaacctaaaggtatttttttccttgttttttaaagcattcatagtttaaaattacatacataaaagctaaacacaattcaaaacttaaaaaaaaaaaaaagaataattagcaattttgtcccttaaaatttcaacaatactaattctgtcccttaaaatatacagcttgttaaaattctccctaaacttttacatttatagaaatttaatttttctgttaggttctgtcccattattctttttaaatgcagacatgtctgtaaattagcaatcactaaattatgtatatttttatacttttaattggttttatataattttttaacaatattttacacataatcatacagaaaactaattagaatgattataatttgaatacttattagtaaatacatatgtattattattatactaatttttcatgtgttgtgcttttgggcaagtatattcgtgctcgcggcttgtcgtaccgtttcatgcttaagtcctttttttatgtcatgctgtgacgtgccaatttacagtatcgtatcatgttgtgcccaaatttaaatttctagttttggatcctgcttatgcctcccgagctcgtgtcaatttcatgttgtgtcaaaaagttcagactatatatataacattactcacaactgaactgattgatcaacttttttttttttttttgcctttatttggaccatgaaacatccttaagttaacataacaaataataaataattacaataaacatttaaacatataagcatccatattagcttttaaactatgttatcattataatcactaaatatgccttcaaatgaaattctcatatattgttatccaacgagtccactatcatagcctcaactttgtaatcagatctaatctaactccatatacagttaatcaaataaagcaatcaccactacttccatcaacttaatcaacaaataaaccctacccatgcctgatgtaacatgtcagccaagatgaaatgatacattttaggtcgatgtccacgaggtggccaaatggtggcacatgttggtggcatgctaatgcctagtttgtacaattatagattttcgtaaatattttcaatattttttagatcaaaaagagacttgatattgccatttatttgggctaggaatacaatttcacaatcgaatttgagtaaagcgaataattgatatatcttgatgatcatatgtctataaagaaaaaattatatatgttcctggtagaaggttagaagcttagaatgctccttaagggaggagctcttggtgtcagctctcgaccactccctgacaccttggtgctaagtgagcactactagtcagtgggactagtagggcggacatgtgaggaccacagggggactcatatgtccccatgagttggagtactcacaaacattatcgaaccgactcagtagtgcgtctaggaatgctaatagaggttagttggcaagtttttattggcttgctggtatgttgtttgcatggaatgtggctaaaccttcgagagacatcgtggtgcaccttgg

SEQ ID NO: 57790 - DNA, 965 bp, Cannabis sativa
cataattggagattgtagtgagttatatattatcatattggagagtattgttatgaagacttactcaaaataattagattattttatatgtattttttgtgcaacttataaattaactaaaattatttttgtagttataatagaagagagtagtggctcaatcgatataaagaagatagtgactctttcgacgtggagaagagaaaatgtcgatgtgcagaataaaagtgaccaaagttgtggatttcaaggacttgttgaagatgaaagatagatgactttaaaattatttgataccaaagaagtagatcaattgttggtggcgataaattcaattatgcagttgttgttgaagatgaacattatttttgataaaatagttgatttgttgtcgaaaatgaacattatgtttgctataatgttacggtgaataattatttattttttttatttatttgttgtataaatatttgtatatatgaatgttgaataataaatatttttatatagtattcactattgttgatcagtgtatattatcaaaattatctaaatggaaaatatttttaattttaatcaatattaatatataataagatttttttaaaaaaatatataaaagcattagaggcggagtagcccgccgctaataatgacatcaatttatcagtctaacactagtattagcagcgggggtgtcagtccgccactaatgttaatttatatcgacaaagtattacaagcgaattattaccaacggaccccgccgatattaacttttaccagcggattgagagattattagcagcggaaccctccgcctctaataaccataaatgttgtagtgttagaatgagttatgggtatttataatttggcccctcaacaaattataaattaacttatggtatctacacattatttccatgacaatttaatacccttttgatacccagaacataatt

SEQ ID NO: 57791 - DNA, 1011 bp, Cannabis sativa
ctcacttcttttttttacatctttcaaaatactcatgcatctttgttgttggtttctagacttctttcctctcctttgtcacccagcagcgaggctcggaaaagaaaaagtatctagagggcatggtctagaacctcataggccagctcgaggttataaccaagcaatggactgatgccaaactataaaatactcgtttaccaaagaattcgagaaggtgaagaggaacctcgatgccgagcttgaagctaccaagaaggaggcaaaggataagaccgatgcatgccaaaaactccaaagaggaacttgatgcagccaaggtaacacttgatgcgaaagaggccgaaatcattgaatgatgcaacgttgttggccttcgtactatctatcaagcctggatggcaaatccagggatggacacgagtttcttgggagaatcggaggaggaaatccttggcttctacaagaagactaagaaggaggaagaagatgacaaggcagcaacagaagaagaactttccaagtctcctactatgtaggcttggttttatttattttgattttatttaggcaaacggtcttaagaacaagacaatggtttgccccttgtggcacttttttgtaaagacaaatttgcaaggttggatggccaactttgcttttattttatctttcttgaatgcttcgtatttttatatttgaacttaatatatctgtttgtttgcgttttaattcacaacttaaacaattatattttgatcaaatttaaattacgttagggattttcattgctcatattttccttcgatattatttgagtagttaacgatctactatgtgtacgagcagttattatctgctatgcttttgatttgcgagctgtcatcaattcttccacgcatgaacagttataatctgttttaagcaaacttgaatatactatttatgatttatcactttgtatatttttaattgcttatatgaatagttaagtcgtttattcatatacta

SEQ ID NO: 57792 - DNA, 559 bp, Cannabis sativa
ggggtcgcgaagcgacacccgccgttggttcatcattagagagagaagggataactgcatcatcacctggggctgcacgagcgcgcttgagcatgctcctgacagaatcccccacttgagtggactgttgagtgaagtgttttcgggttccaacagaggaagtaggagaagaccttgtggagggttcattaataactagaccaggaggcctagtgcgagggggacttgaagagggaaaagcaataccttttcctttcgcaatgtgggagatagttgaagtagtcatgattgggggtggaatggtggggtgtaaagtctgagaaggaggggaagtggggatggcagaggtggaagtaacaatggtggtggtgcgaggtggggaatgaactcacagaaactggttgacagcatgttgcaggctgtgagctggtgaagcgggaggagggaagagttcctcaaaaggagtggcattggatatttcaaatggattctttttgtggtgggattgagccgatgcatgaagagtgtcacgatattctaaaatgggaggggagggaaa

SEQ ID NO: 57793 - DNA, 849 bp, Cannabis sativa
ttcaccaaaaaaaataaattgtataaaaaattattcataacaaaaaagaaataaaaaattatataagattataaaaataaatggagaagttgatgtaaataaattgttattcaaaagaaaattaaaaaataaaattattaagaaaaactcatagaaattattgtgaaaaaaaattgtaatataaataaaattaacataaagacaaaagtaagtttttcatttttgtccttttgttttgggaagatgcattcttctatgagcacccgtgacactttttagacagataactttgtaattggttagcgatactctttaaaagttattacattaaattacatgagatcttatacttaattgcatcaataaagatattaacatgtaggagagtgctagacaacactattttttaacatttcacttagggaaatttgactttatatgtatttattaggcaaaaatttatcccctagttattagtgtatcaatattgttagattagatcaaatttttattaaacccaaaattacccctcccatttttcaactcactttctcccttcattcttgctcgctctcttcaagagaaccgaaccaccaagaccatcgccaacatccaagaccatcgccaccatccaacaccaccgccaccatccaagaccactcaacccactaaaagaccaatcgggatgaccctcttgactccatttcattctgtctgagcccacgctaatctccttcttcaatcgcgaacagagagaccatcaccacgaacggagaccacaaatgtagaccatgaaagaagaccacaaacgtagaccacgagcccacgcctatctggcattctctataa

SEQ ID NO: 57794 - DNA, 916 bp, Cannabis sativa
aaaatcccttactcaccacaatctctcaccacctcgtgcccgctttcgagttccaattttattccaattatcccgaaaatgtccacgatctcgatactatgccaagtcctcgtttggtgtccacacacattccttacgcgtctcttcctgattctattaacaaattttccaagtctcgaattatttacatcagtcgaaaccctcttgatgtgatcgtgtctttttggcattttgcaaacggtcatccagagcgtctctcgcgcgagtggactattgaatattttgtggacatgttttgtaagggggacattacctttgggccttattgggagcatgttttagggtactggaaagcaagtttagcgaggcctgagaatgtgttgtttttgaaatacgaagacctaaaaaaagacagtgttggtcaacttaaaaagatagcaaagttcgtaggaatgcctttctcccaagaggaagataatgatggagttgttgagcaaatattggagatgtgtagtttgagtaaattgaagaatttggatgtgaataagtatggtgaagtaaggccaaacattcataataaaattttctttagaaaaggtcaagttggtgattggattaatcatcttactccatctatggtagagcgtgtaaaaaatataattatagaaaaattaaatgattctggtctgtcattcaaactgtagtcgtaattattatgtattttgtatgattgtcttatatatgtgtttattaattattttagttatgtgtttattttgtagtttttctctcaggtttttttaacaataatatgtaatgtatttaaaagttacgtgaaatgttagtgatgtctaacatcatataaatttgtcatactattatttaatgcaatttaatattgaattccatatttttt

SEQ ID NO: 57795 - DNA, 1332 bp, Cannabis sativa
attttatatatacaattgtgaccctaataaatttctaacatattcgttattagatcaaaatttgatggtttgatatttttaaaattaataatatttatagttaaatttgtttagtaactggataatatctatttatggataatatttatagttaaatttgtttagtaataatttatagttaaatttgttccaatatatatatatatgggaagaattaatggagctccctacaaagtttttttagattttatttaatatgcttcatgttgctaaatgactgtatatgaaaaagacgttttgatatgctttgctgcctttacatatctactagactgctactaatggattcatatatagactagtacctaaactattatataaattaataaaaatgaacagctttagaataatacgaaatccaattatgcatagattttggcaataattccacataatgatcaacagcgcagatcggctatcccaattttacaaagataaattttcatgtttgatgaagatataatataatgagcagtgactaaattggatttgttcataatggaggtgattaatatataagtgtacgttggaggagattaatatataagtgtaattattggggccaaatgcttattgcttaattaatcaagatctgtttgtaccattagttatttggataattggatttgtcattgtccataccatgcttattccatcattttcatgaattagtgattacttgtgcccacagcaaagccgtactacaatatattatataatatgagcattgttaattattagatacgagagtggtgtttagtacctttagacatgtcgtattatgattgggtagtgatactctctaaaagttattatattaaacttagagacctaatacttaattagaccaataacgataatgacatataagaagatactaaataccacttgtatcttttaacatttctcatataatataaagttttagtatgattgagaagtaagaccatcattaatgtcatgataaatatggctcaaaaaataagtgaatgttatatttagtccaaattttataattatactctaatacactagaaataaaagtatataaaaattgtattaaatatataaataaaagtataaaaagttattaattatattattaagtggcaaaagagtaaataaaaaaaatgagattgatttgtttcatgctatagttaatgtcaaattagcataatttttagtaagtgtcagatttaaatccattatatactattattggagttcaatttatgacaggctaaaaaaatatatatacacaccatatttata

SEQ ID NO: 57796 - DNA, 1257 bp, Cannabis sativa
tctctctctctctctcttatttttaaaatccacttatagtggttgtaacaattggccacctaattttgttgcaacacttagatttctgtgaaagactacgtaaaaaattgaagagtgatagttctgttctacttctgtaaaagatttagtgattgactgtactctgcgactaaaatgatcaagggttagatcactaaatggaaggagtcttattctgttgtgctacacctttataagtatttatactcaatctatgatataggtaaataggaaattaaaatttatgttaaatattaatttacgtgaatcacaaatcgatctcactaagcatattttcccaatagagtaagacttaagcgtagaccttagaccttgaaccccaaacctagacacgaacacagacctagactcatacctagatcctgacccgacttcgatgttggaacttattttactaaaatctagatttactaacatgtatgtttgattataatctataatataacatcctgaacaagaatttcctaaaaaaactaaattaacagatataaagttgtagaaaactttatattggtggcagcaaaatataatggctcattcgttcagatttctaacccttgtccctttttgtcgcacaatattactaagatctgaacctcgatctctttagatgatagaatttttcataatcttccacactattattgagtattgacttgaattgtgtgggcaagtactcttcactatagggtttgaaaattttgaagaagaaagagagaagaattcaaaatctaagagaggctcttattttttcatagttgtatgacaaaatagtctgatgaaggttatgttatcagcttaaaattagagcctatcattatctatttataggatttcctctagggttataatttaaattatacagaattaaaaaagataaaataatagctaaaaattaaacccttaagtggctagctctatatgtgggtcctacaggttttgtaatatctgcttttttgaagggtaattaatttttttttgacttttattttattttgtttgctaatggaaataatttattatttcgaatatttatgagtttagtggagtgtgagaattttttttattattattttattagtgactataaaattacttttattttttttaattttatttttattctatttggagggtgtgtataatgcttagtttataattaagtagttgtattattttattactagtaaacaaagc

SEQ ID NO: 57797 - DNA, 732 bp, Cannabis sativa
tgccaatcagctgagaaaacatcaagaagggaagggggaaattgtccacccaagtatcattacaattagtagaaataacaatcttagctaagaaatgggcagattttgttttagcacaaagagagtggaaacaataagagtaattctgcagtagcccgtaatcgacaccatcatccaacaaggcactccactctgatcagcaagaagacagatggcgaaggtagttgataaccataaggcaattggatgtcaaattgaaattatggaaccccacctgctaaactaaatgcagccccagtatgatggcttttctttcatccatggtgactgaacaagaaccaggtctagaggaagtagccgcccccaaaactttgccaaaacaatcacggagaatggctccagatccatagtacgggaggccatcggagacagcagcatcacaacaaaggagtggaagattcgtcatattaatagagcaacagttgctgccatcagtagcggagaatcgaggaagaggcgtaaggactggggtggtaagatgctggtcaatttgatcaagagcccaaggacaccaaagagccgaagaaagattaaatcttcttttattacgtcgggaccacaccagccaagacaaaactagaaacatttcaaaatcaatatgaggtttgtaatcctttatgaacatcaaaaagtcccaaggattctactggtagctggaaaaatactgatgcc

SEQ ID NO: 57798 - DNA, 975 bp, Cannabis sativa
taattttttaatgaaatatttgaatcttaattttataatgatattttttttttctaatttaagagtgtaagtttgtgaccttaatttaagtttgacccgcattgaactaaagattattttatttatatatattttaatttttttgtctagagaatttatacaatttttattttatttttgtggtggccaggagattttatattttgaatacaaaaattttactcttttttttttcaaactaaaaaatagaagaaatgaaaaatacaataggaagaaacaaagcaaaaatattatctttacgcaccaatctatatctattaataaatagtattaaattttgtatgtttatgtcaaaggatgacaaatattaacaatggtacctggttttaaataagtatttagtagttactacaagtcaaatgaaatgaaatgaaatcatagtattagtatatatcatcattaaatatgttttaggtaatgtcttatgtgatatatgtcatatatcatcaatcataatgtaaaccgtgttagatgcgcgtacatacccatatctttactctaggatgtgctacacccaatcatttattttattttattctttatttttaagaaaaaaacaaaaacaaataatagtgctgtagagttgtcgttaaataaaaaaaaaaataaaaaatcacgtgttgtatagtgtagttgtaaaaatatttttacaaatatttttatttgtttgaattaagtgttccaagtttaccatagtcctttttaaatgctagcttgcggtaggtaatgtcatctatgataagaactttcgaagtgattactaataatccaattaagataaattaagatataaagttactattatcgatacgtgattttcgagattgtcaaaataattaaaagaatgaaaaaaaacatttgcatcgcgtagtgagtctccttttaattttgaaaaataataagaaaataaaaaaa

SEQ ID NO: 57799 - DNA, 1672 bp, Cannabis sativa
aattgacaaattatgtaattgaacccaaagttccagagtattcaaaggtattgatctaggattaactccgtgtgttacccgctccataatcaaaggtgcccgatcgaacgtccatggactactatcgataactctctctatgtccacctcatgataaaactgaaaaaggaagaggtttggatctaactccttcacatacaaaccacgccccggctgccatagagacgctattttgttttgcatagcttgaaaatcaatggatcgatttgttagaaacctccccactaacaaccatctatcgtcgatttctgcaagcccatcctcccttgcctcaaacaacaagccttcctcatcatcatcttcaatcgaaaaactggcgtaattctctgttaaattctgaatctgtggctgtctattactcattaatctcaaagcaccaaaaaaacacacacaggaagcaaacaaaactaaacttttgaaccaaaccgtttacaccatgtcaaaacgacaagataattttacattttgtactcataccacaatttagtatcaatatatatgtgatactttttatatatgctttaattattctattgtagattaaaacctaaaaaatttagagaagggttgccaataaaatatgttaacctttaagatatattaataaaaaagaaaaattactgacaaagttaaacaacaagaatggtactggtattgtgaatacgaatgagaatgaaatcttcattgaaagattcacttaccaagaattatattctaaaaattacaatgattataggaaaaaaaatgtttcatatatataataatacattaatacaaaaaaattaaaataacataccaacaaaacaaacagtagagagaatagtttaaaatttataatccaattatatatataaaattattggcgattgtgtcaacatcattgagaaagaacattgatgtgttttatgcttccggcttggatggaacgatataaataagagagcaatatgtcaatttttctccataactaaacttattcaatataaaaccttagcaactcaaccattataaaatcatgtccactcacttagtaaaaagatatatgaaatatgagagttggacaatttaaatataaactaatatatgcttactatatacgaaaagatcgaattcataattaattaaacagtcacatatctctataaaagttaaaagttatttgattttttttaacattaagagttgtctacctttgaactcagatttctgttctcatagtctgccaacaaaataaatatttttagtttacttaaaaacacataaataaataaaaaatatttatagagaccattaccaaattatttgttgaagcaagacctcaaagaaacaataagaagatgagaatgaggaattttatatattaaaaatttagaacaaaacacgttaacattctattttccatgtttttttttttaaaaaaaatataaattattcagaaattctatttatagttataaggctaattaaaattttctcaatcgaactttgacatgtaataaattctgccctctgaacttttttaggcgttaaaaattttccctggactatttagattgatagatttaaagacttttgtctaattttatttaattttactgtttcagtgattgtt

SEQ ID NO: 57800 - DNA, 994 bp, Cannabis sativa
cttgtttggtgacagagtttgttggttaatgaagttttacattttccattcaaaaaaaaaaaatgattacaaatctagtgctacttgttttggcacccgataaacttttttaatctattttttttatatagtcgtatatattataattatttaagacatcttgtaaaattttgagaaatttagaaaaatttaacacaccaaaaataatgtacttctttaaaagtgttgcactgatatactcctacttgttttggcattcaagagacttatttaatctttttttttcatgatcgtgtacattatagttatttaaaacatcctgtaaaatttcaaaaaatttagaaaaatgtaaaacgccaaaaataaaattcaaattttctatcgcatgactcttttatttcaaggggtgcattgtaaaagcaccttataatatttttttgtgtaaatttaaatgtgaatatcataaactattttgattttcaattatgatttaagtaaaaatttattatattttttattttttaaaaaaaaaaatcacataataaaaataatacaaatttaagcacatataaaatttaaataaaatacactagacatcatattcttattaatcaagaatactacacgtactttatactacataatataacattataaaattaaagcacagttaataatatatattataacaattatgataatttttattaaaataaaaaatgaatataaataataaaaaaaaaaattattattttttggtgttatggttagagtagtaattgtgtaccaaaatgatactcattatatatcttaaatatttaataagacaaaatttagactgaatcgaaatgatgactgcaagtgcaacagatatttaacattttcaagtgataaataaaatctgagactaaaacctcatcaaaagattaaaaccaacaactaacacaagtcatataataactcagaagattaacaaatctagaaagagaaatac

SEQ ID NO: 57801 - DNA, 591 bp, Cannabis sativa
tggcaaaatgtcaacctgggtgctcgcttagcaccaagtgtcaacctgggcgctgggtcctcattctggaatctaggttagtttgtttcttccccaaaagcacttgttttctcgtttttgatgaagacaaagaaaatgctaaggacagttctttagtttgatgctcggaagtgccccaagttgacatggggcacctggtgctctagctgctcgaaaatgaaaatgctccgaatatgattctgatacctcaaatatgtttgtgacatgtctaattcatatctcattacaaagtttgatccatcttcactaagacggtcccgaaaactgaaaccctatgttggttgtcaacttgggcgttaggtgaaaccgtaggtgctcgagttgacttttgatgtattgtttcgtgtaatttcagctctcgggccttggacgtggatgtttcatgtcttcatggtatagaatactgaaagatagtgagttagaaacaacttggcgggacccaaacatccattcggagttcccaaagtcaacctgggcgtgggagctagggacctctcccaggtcgactgctatgactcgagacttctcaac

SEQ ID NO: 57802 - DNA, 2102 bp, Cannabis sativa
  modified_base (259)..(271): a, c, t, g, unknown or other
tgtgctgttcgtgcatacctctcctgagctttgcccgaatctccagctatgtgcgggcctccaatgatgacttgcagatgtccgtctacaggtggagatagtatgtcttgatcattgtcgttcctctgattctgatcggtcttgacatacttctgtaagtgtgggttatttttccttatcaggaattcaattgttgcattcgttagtgtcgtggctgtagtctgtgtggaatcgacaaaactttgtcatgtctctcttnnnnnnnnnnnnnttcatgggcccgggcttcttatacggggctagagactgagtggccatgttgacacttcctatatccttagtcaagatggtaaatgcaatgtactttgcttgattttctcgaggagcctgctcggttttgctggtgaactttcccttcttcccattcccttgctagttattgttgttagaacgtttaccatttgagctcgaattatttgggtagtggggaagttgggcggacattccagtggaaggagcttttgactttccaggcttttgctcaccttttgctcgctgaatagctttttcgagcttgatgaagccttcagcacggtcaagaaaatcactcattgagtctacagggccattcttccttatgtccttccaaagtgcactgaggacttcaatgccccctagtatcacggacaactttccatcttcagttacctgtgaaaccttggttgcctccgtcatgaatctgctgatgtatgctcggagaggctcgcgtggtctttgcttgacttcgaccaggtctcctaaatgcaacggaagttggtgagaggaggagaattgtgcatggaattctgaggagaaggctttccaggagttgaattttccaggggccaggttgaaatacgattgctgggtggcatccgagagagtagcaggaataattctgcgacatacgtcacctcgtactccctgcagatccattttcatctcgaaatacttgaggtgggaaagaggatcttctcttccagtgtatagtttccaggttggcattttgaacttgtggggcaacgccaagagattgatctcgggtgagaaaggggttccacgtactcggtccaactcgagatcatagtttctctgctcggccatgccttggaacatactctttagttcgtctagttgtgcttgcacaactggactaacctgtttgacattttggccaatttgagtcacgtcagtatctttttgagcgggaatgtgagcacgggctccgggctatacgatcgtcgtgacaatctgatcgtatactcctctccttctattcagattactccttaggtcatgagtcgtccccaacctatcgaatacagaagcgcctggctttctcagtgattgattgactttcttgacaggtggaatggcaccgttggcctagttggaaccatcgggtatgaattctcctgatgaattactagacaaggtctgcccacctactgcttggcccacaggcggaacctatgaccggagatttggcgactgaccatttatagtctgggaaatattcatcactggatcttcatctgtttcacccgggggatgacactcagaggttgctgctcgacactttggtaggctttttgtatcagcacaatagcttggcgactacgattgtcaatctgtgcatgttgagcccttaacgcttccatctctttgtctctccattcggcaaacatgcgtctttgttcctcaaacacaagatttaccgcagcgcggacttcctcttgatcatgatgtagagtattggtatgaccttgcatgagtccaagagcagcgcagaggttttggatctcaatatcatctccaatggtcattcgaacattggtggcaggcggaacggctatgttatgaatgccctggctgggtgctgaactggtattccgagtctcttgcacaccaggcgcgatttcatccacaggagtcatcacaccataacctccgttcgacggctgttcaggattaatagttggcggaacccttgtgtttcctgggttctgcaatgcaggatccatcgcctgtggatttcccggatcaaccacacccctatgagt

SEQ ID NO: 57803 - DNA, 626 bp, Cannabis sativa
atattatttccaggtgcttctggatcaggtatgagtaaggacataataaagttaggttgtttcatacacaaccatggagggagattatatggtatcataataattggtcatgtgctgtgacttacactaaatgtcttgaaagaattcattccatcagaagctaacccaagcctaacatttgccacaaaatccttatgtttgtgataaaataatattcatgttggagaatctcttggatgtctcatacaaccatcatttaatctttttgatgatgccaagtcataaaatcaaatgttttttatgacataaataatctttgtaatcttggtattaatggaaagtggcgcaagacttctgcttcactcctaatttttaaaagaaaaaaagggtaatgttatattaatttaagcagtatatgtgaactaaaaaaatagaacaaaaaagtgttatatttaatagcgtaccttggtgtagagcatactttgttatataatttgttataatataatatagattaaaatatttaaatgcgacatattatatattaatatgagattatatatattgtgtgttggatgttgtattatatcatatatatataatataataatacacataaaagttgt

SEQ ID NO: 57804 - DNA, 1861 bp, Cannabis sativa
ttgtgttcctatggatgatgatatcaagagaaaaattttgagttagtctcatacaaatccttactctgttcaccatgaactactaaaatgtataaatatctcaaatctatgtactggtggcctggaatgaagaacaatatagcagaatatgtcccaaagtgtttaacatttcagcaagtgaaagttgaacgccaaaggccagcaggtttgctgcagccattgaacacactgtcatggaattcgtagttggattacctaggactacatggcaatatgactttgtgtgggtcatagtggacaggtttacaaaatcagcacacttttttcctgttcagacgaacttctccattttatcagtatgtggaactatatgttagagaaatagttcgtctccatggtgtcccaaagtccattgtatctgatagggatctgaagttcacatcgagattctaggagagcctacatcgagctatgggtacctaattgaagttcagtacaacattccattctcaaacagatggacaatccaaaaggaccattcagattttagaagacatgctacgggcatgtgtattagactttgaaggatcatgggtaaagtaccttctcctgatcaagttctcgtataaaaacagctatcaagctcaattggaatggctacttatgaactgctctgtggaaggaagtgtagatcacctattcactgggatgatgaagtaggaaaagaaagtttttgggtcccaaagctatttagagaataagtaaggcaattgataagattagagcgtgcatgctcgctgctcaaaagtagacaaaaaagctatgccaatccaaagcggcgagattttgattttcaagtcagagatatgatatttcttcgaatatctcctatgaaggttattagacgctttggtaaaagaggaaaatttagccaaagattcattggacctttcgagatcatagagaagatagagcaagtagagtacaggctggctatgcccccagcgttggcagctgcacataatgtgtttcatatttcaattcttcgaaaatacgtgtcagactcgtcttatattttgagttatgaagcattagaacttcaatcggacctctcatacgaggagcaaccagtgcaaatattagacagaagagagaaagttttgagaaataagaccattacacttatcaaagtattatggaggaatagttaagtcgaagaggcaacctgggaagtagagacggatatgcaacagaaattttgggatgaaatttctataaggaggggataattgtaatactctaaaatttagtaattggattagcaaccctaacttagttgattaagtataaatgagaaattatattattgtatgatttaatatgtagaaattattgtgatttattgcattttaagaccccgtttatgtattgtgggcttttttgtaattttgacttgggaagggtagaaatcgtaatttaatggtatattgtatttatggactatattattatatagtatgtttattatgtctttttgcaggtaatttttgacaagtctgcacagtatatatagtcacaacgggatattttgggctgaatcggattcggggtccaaaatacatttttgggattagttatggcttttatgtgttacatgagaaaatataaatgatatgatatatgtgtgtgagcgggaatgacaaaattgaccttatgtgttatatatgcttatgtgtgtgccttaggggaaatatcttttggccaaataattttttttcaacaaaactaattttcagcaaaataaaacacaatttctgggttttgaaaccccaaactgccccattctctctctctctctctc

SEQ ID NO: 57805 - DNA, 914 bp, Cannabis sativa
aatgaattttatgagaactccccggaaggatccccaccagaatctggccatcacagcttcgaatcctttacacagtttaacaggcagacaaaaacaagacatggcataagcagggatagcctgaataacagccttcaacaaaacctccttaccagctcgagaaaaacacttagaagaccaacccctaaggacagaattaaccttatcctttaaaaaagcaaaagagtgatatttagaacgagcaaagcattgaggaaggcctaaatatttacatataaaaggcctatcttcaagattaaaagtagtgaagaaaacagtacgaatatcaggctgagtattagaggaaaagagaatagaggacatggaaaaattaatagtctgacccgaagtcctagaatagacatcaaaaacttgttgaagagctaaacaagaagtacgattagcagtgcaaaaaataaggctatcatcagcaaaaaacaggtgggataatgaaggagcattcctagagatagcaatgccagtaagcaaaccagcatcttgcttcgccctaagaagagcagaaaggccttcagcacagagaataaagagatagggagatagaggatcaccctgcctaaggcccctagaaggctgaatagatccataaacagaaccattaatcagaaaagaaagagaggtagtagaaatgcatttcatgattagacaaacaaatctaggaggaaaattaaaaatgaaacatgataactctccaaattagtgccaaattaaccccgatcaaaagccttagccatatcctgtttaagagcagcccaaccttttttcccatttttcctagaattgatagcatgaacaacttcttgggcaataagaatattatcaaagattactctaccagaaacaaaagcactttgaaa

SEQ ID NO: 57806 - DNA, 2816 bp, Cannabis sativa
attaaaaatatactaaacttaatctaaaattaatactaaaaataacctaacattttgttatgtgtaactattggtgtaagtttggcagctgttggttgtttatttgcagctgcagatgttaatttttgggctgctatgatcacagttgcaagtttttggccaacagtaggaaaaaactgttgtggttggacatggcgaacagtaggaagaattgtttgggaaaacaaattatttatttcagattgggatgttgtacgagaaagagggaaaatagttttgtggaaaacaacatctctagaaatatagatatgtttggtttctatgtgaaggagtgtataagctttcattccttgaggataaccaataaaaatagaagcacggcttcgaggggaaaatttgtgtcttttggagggtaatgtagacccataagcaaggcatccaaaagaacgtaagtgttcataagtgggaatcttgttatgaagtatttcataagaagttcgtcctttgaacaatttggatggtgttctattgatgagagaggtggccgtttggactaaatatgaccagtaaaccagaggtaggttgaactggaaacaaatagctcgagccacatttaatatgtgttgatgtttgcgttccacaacagaattttgttgtggacgttcaacacatgagtggtaatttgtgatgcctttagaggcaaaaatagattgtaagttcaactctttagcattgtccaaacggattgctttaataaaggttgaaaattgtgtgcaaaccatattgtaaaaaataggtatgattgtttgtacatcggatttatgcttaagcatatatatccaagtgaatcttgatttgtcatcaacaattgataggaaatatttgtagccttccacacttgtaatatgaaaagggccccatacatccatatgaactaaatcaaagatattcatagaaaaattatgattagagacaaatggtaatctttttttgttttgcaaggtgacatatatgacaaaactaacaagaatcaatagaagcaatgttattctttttattaaacaaatctgaaatgtagattgatgggtgaccaaggtgattgtgccattggtctacattattttgaacataattaaaaaaggaatggctggccgaggcaattggaagtgtaacctgaggaagcaggtacaattttccatgtctcttaactgtcccaatcaccacattctgagaatgatcctgaatagtacaagctttttagctaaaaaacacaagattggaagtggtgtcaacatactcagttatagacaacaagtttatgtggaaattgtggacatagagaacattgaataaagtaatgtgagaatttatatacacagtaccaattttttggagaggaatcttgtggccattaggtaaaacaacatgtttagggaatgaaatgttggacaaagattgaaaacaagcaatgtttgaacacatgtggtgtgtggcaccactatcaactatccaaaaaaaagatggatggggattattacctgccaaattggctgcagcagaaggaatggtagcatcagcatggggttgttgagtgagttgctggcttagaagagatatcagctgctggcattgagtagataaatcgattgggacagagaaaccagcagcttcatcagtggaagtgctgctgtaatttgccttagcttttcctttttcttatttctttttatccccatagcctggtggaaaaccatggaggaaaaacatttgtcaaagaaatgaccttgttttccatagtgagagcatgaaggacgaggcttcttggctcatggaggataagtagatggtggatgagcggcaacagccaggggaggtgcttctgaagatccaagagtcctttgatgctcttcttgaatgatcatggcaaaaacccttgaaagataggggataggttcattcaacaagatttaagcccatgcagatgagtaagactcattcaatccagtcaagaactggaggacttggttctgattgtagtaatcaagaatgattttcatggcaccacgggggcaagttgtgtttggttgaaattctttcaactcatcccaaaggtatttcagcttagtgaaataagcagatacagattgctcaccctattgtaaccgagtgagttgtgtctgtagttggaagattctagggccattgccctcattgaacctctcagccaagtcgagccacatatcagtggcaatatcgaaatacattatactatgagcaatcttagtagaaacggaattaacaagccatgacatgaccatattattgcaacgaatccaagaattaagagagggattaccagtgggaggacgaggtaaagatccatctatgaatgcaatcttgttcttggtagtttgggccatcgtaattccacgtttccatgattgatagtttgttccgttgagaactttagagacgagaaccaatccaggatgatcgctcggactaagaaataaaggactcgagaggtcatcagtaatggatcgatcaatcgatcgctgaggaggaatgacagtgttgtcgacaacatcaatgggagaacccaaatctagaactttggaggtgtactgaggtgggcgcctagtgttggactctcgaagaggatcagctattgaagacatgttttgatcaagaaccgtctcagggctgatagcagcgacaggaggttcggttgtggacggaggaatgccgtcgttagaccatgtggatggaggagtgccgtcttgggatcatgtggaaggtcttgccatggaagctgt

SEQ ID NO: 57807 - DNA, 1011 bp, Cannabis sativa
ctttcccctcatcatctgacatagctggcatggaacagtttttttattgtcgaaaagtctcctatccatgtggttgtggaacgacaaaggttccttcatcaagagactgattaacttctctccttaggacttcgacaccttcttcaaaattggtcatcctagtactcaacaccattattgtgagaaaggtaaattaatgagttttccaaagggaaaacagccaaactttcacctcaacgctcttaatgaaagcaccaaactacattgggagcgctttttaatcctctcaatgaaagctccaaactgttgatgcagttttagttaattgatataacacgaccgtaaaaagaaagagaactgcaatgaattaatttgactaaacaaaactgtaatagataaagtggacactagagatttatagtagttcaaccccatgtcgtaattgtaatgaggctacgtctacttctgtttttattgattagatctgacacaccagagttatgatcttaagagtgtgtggataaaaatacaacaaaggatttctaggtgaaatcttaatcgaggcttatgaacaccagactcatgggagattcaatattcataaatctgatcaaagttggtggttttaaggttcttatggacaataatccaataaagtagaaaaaatagatgtatactaatcgtgttttaggtttgagtgtcaaaaacgtatggtggactcaaggaaaaagatgaagcaagggatatggtcttcttggcagctgttaagtcagtcaaaaagaaggtcccttcacttcagcctattactttcattatataggttgtagggtttgctagtgatcctccacatgtcggggtgtcccacaaaaaaattttgtacatcctctttaataatgaataaaaaaattacaaatatataaatatctataaaaatacctttatttctaggccaaaatcccacaagctttgggaaatagttattttgcagctaaagatgcaccaatttgaaat

SEQ ID NO: 57808 - DNA, 961 bp, Cannabis sativa
acacacccacgggtcaaattagtctaggggtagatgacactacccccaccatagacatgatgacatattctaaggtagatgaggacatccacacggcatcatgactactcacaacgtagaaggagtctcgggggtcacccggccaagatgacaattgacactctcctcatgttgggtcttgggggtgtcacccccaagtgttaggttctatccccgaaggtggttaacgaccatatcacaccctcgggagaccctcattatcagtggctagtttaaacattcaaatctcacaagaagctcaaagatagttacaaactcactaaaatagtgagatattattacaaaaatcaaacttcaactacctccaaaaattaaggagatggttgagatagctccgcattggtcgcgtctcctgaagcgagaagcactgaccttttcccctatataaggagtcatcaaaagcttgggaaaaggatctacgattttgagcacttagagaaaaatactcttttattttttgcattcaagagcctgatctagacttttgcaactctgattaataaaacacaaggggagtagactattaccgacatctggggtcgtacctctttaaattatggtgtctttctttacatttattgtgaattttggtatcattaataacatttattgttacgattttagtttaaatctcatttattacgactcaacatcggtttggctaaacattcagtcaacgatggtgggatataattttgttgtcatggtatatatactttaattgtggtatatgattcagcatatactttaattatggtatataatttagtaatataatttttattattattattgttaatatatatgtatggtgaatggtatatgtattttttgttgtacggtatattattttttaaaataatatttaagttttattttctctattgtacttttgttgaca

SEQ ID NO: 57809 - DNA, 1250 bp, Cannabis sativa
aataatttattcgatatgcaatacttaattaagcaaccataaatcagagaacatatcatatatactaatttaattaaacaaccataaatagagaacatatcaaagtatttttgtaaataagattaattttagatacaataattaaaaaacctcattactaattctaatttgtttaaactgttattagtttatttttttatgctctgcaacaaataatcatactctaaattctttttttcttatccacttacattttatttttataattttgtaaaatacatttaacatatataatagtacaattttttttataatatagtaataacacaatttcaagaaaaaagaaattcattttatatatatatataaaaaaaaaaaattaccttcttattgtactatttttattttataagttttttttggtatttatttaatagatatttttttggtaaatatttggtcaaataaaaatacactatgattacaaggctgggttttatagggtatagtagactttttttttttttttaggaaaagtcgttaatatttcaagaaaaagtaacgagatagaacatctattttcaccagagcaagcatcacagaccccatagatcaaaagtagaactaaccaaactgttctcagatgaccgtcttgagaattgacatccataatcatcatttaatacataaaaaaaaaatatatagcttcaatcaatttgcaatgaaaaataaattaaagctaaaattatcataacatcaacataagaatggattcttgttctcatccacagctttggcaaactatgtaggaaggtgtcttaaaattattccaaatttcatcacttgatggtggtttcaataccattgaaacgaaaaaaatatcaaaaacaaattcattcatataacataaatcaagagattaaaatcccagatctacattgaagataaaaattaatataaaaagcaaatacgattaaatgattcagaagcaaatccaatgacctcaatcgatactaaagtatcacagatcaagtgttggataacattgagcttcatcctaatcaatcattaaccaaccaaacagaaccaaaacacattacgaaccaaccaaatcctaaagcaacgagtattatcaaacccttaaaatctaacttctccagttgccttcagcggcgccaccaccacttcctctgctgggaaccaccaccttcacgtcggcctccgtatccaccactactctcgcctccgta

SEQ ID NO: 57810 - DNA, 1307 bp, Cannabis sativa
tcagcatgcttctcacagaagagccaacttgctggttttatctagagaaagatcttttgacccagagacaaccttagtaggattttgagagtaaaggggaggagtacctcacaacaaataagagagaataacacttttacccttggatgtagaagaaacaacaacagtaaccgtgataggacttgaacccttagaacaaacaacagaatgcataaggggcattatataagaggttggaatgatactattcagacagacattaggtaggtttatagcaggggagagacttaacccaacacagtcatattagggaatcttattaactaacgtggtgttagctatacttggcaccagatattggttagcaaaatcctaaaggctctggttggaggaaatagcagtcccagacatttcctctataggagcaaagttagagagttcaaaaatactcctcttaaaaatcaatttggtaggggggctctaaggatgtccttataaatcaaagtaggagggtggctgagtaatcacaattcttcgaaaacttatcacacttattgaatgtgtgatcaagcataccacaatgatagcagtagtcttgaatgccttcataaagaaatttaagtcacttagtaatggaaagtttcctgaaattaaacattcatacctctacgcagaggcttagtgatatcaaccaagatcctaatcctcatgaaaggagcagccacctcatagagggtggggatataaatctcaataagatcccccacttcatcactaataaattgagcaagtttaaaagacctagtactgaatggtataaggtgaacttgcattcataaaggggcatacctaattagctgatcaaggagaataatattaaaaccattagaaatagaaaagagcataagagaactgtaacgtcgtaacctctaaggatgccacatgtatacttttacaaattaatttataataataaactaacaatttaattaaaaatttgtgatttaaataaacttaaactaaaaaagcacatcagtatatattatattttggggatcctctcttacaaaagtattttttttacaaaaggtgtattacaaaatatatagctaaaatactatacacatacaacgccaaaacatccctgacaactcggctctacaagccgaataggttgatatgtacatttttcggaggagactgctgactcatggctaccctaattaacccttgcccttacatgcatcataaagcatccttgagtcacaaagatgttgggttttgtgccctaaataaaaccctttaca

SEQ ID NO: 57811 - DNA, 762 bp, Cannabis sativa
gcccatgcaaaataggaaaggcatggtatgtaccctaggtattttaggggttaggtagatataatcctttatcccttcttgattgatgggatccctcgtaaagtagtcgtcactaggcttattaatcatagcgtaatagctgcagaagggggattacgccgtcagactttaatatttatggcagttccaatacgccttctcccatgcggcattaaatgcgagatgactattcaaatgtggtctgatacctcccggaagtgctttgctatagcattgctcttcgggagtacatggtcccttcatgccttctccgggaagtatttctctagctgatcctcttgatttaaaaaagacttagtcaaattataccaaagacatactcctcaggtccacgtgtcgtagtcgcattggtccacgtattttgggcaaaattaagggcaacacctatgatctatttcaattcaggaccaaacctggtctcattagcaagttaattatatctaaatcctaattagagatactataatttgttatatacaaataattaagtgttatatatgtatgtagtacgaataatctccaattctacagtcgcatatttgagttgaccaatagtagtattcttagggtccgtttggtacgaacgattggactgaatcggactggactggacaaaattagattatgctgaaagtaatcttgtgtttggtttaagaatagactggactatttatttatttctttttaaaaaagaaaaactta

SEQ ID NO: 57812 - DNA, 752 bp, Cannabis sativa
tattatttatttatataataaaaacattaaaaacatatattaattatatttttagtggattgtcttgtgttaaatttgtaatacttaattattttgtatatttatttttacgatattttgttaaaatttattacttagcaatattgttgttttagttgttatcttaaactttagttgcattatacttgtaatgatatttttatagagtattaaacttaaataagtagtgacatttactttttacgtattttttttcttcatatttttaagttaatattaaaatttaagtgtaattggatatccaattaaaaaatcgatcaaattcaattagtaattagatcaaattggattggattttgaggtctaattaaattggatcggatgagaaaaaaaaatattaaattagattgaataactactctaatttaatacagtattttccaagctaacataagaatataatttattaatttttaaattttaaaagctaattcaattcacatcgtgcatattgaatatgagcccgaccttgagtataggcgggctaggcctatgcttaaggcccgcctagcttaggggtccaaaaaaaatttatcccttttaaaaattacatatattttttttttactaattttgggaaatactatattctttttttctaaataagggaccaaaatatttttttttctgatgacccactaaaatttcaagacggatcctaattggatagtgtatattatatattggtgtag

SEQ ID NO: 57813 - DNA, 511 bp, Cannabis sativa
cttttttcaatttttaatacaaagattgccatgattatttgcagttttaggtgtagcttgtaatttgattatttggatgaccatataagtaaacacggtgctttaaattaagtaaatataaattttatactttgaaaaaaataaataaaactgctattatataataaagtaaatgatacgttttactaggtaaataatgtattttgaattaagtaaataaccatgctttataaagtaaataatgtgtattaaataagataaatagaacctacaacccttcttaaataaagtaaacaaaaactacatatatctatcttttcttcaaattggaaaacaaaaagattagtgatatatcttttgttggatgtcccaaaaaaaaattaataccacatatataatgtaggaaaattctataatgcacccccttaaaatggatatattgatacacccctatctattttagcattcgaaataattttttagtcaaattttttctcatagtcatgtacgt

SEQ ID NO: 57814 - DNA, 684 bp, Cannabis sativa
  modified_base (628)..(633): a, c, t, g, unknown or other
aaaccgaaaccagtctctccttctactattgttgatgctgcgatgagttcaactgggcagggatgactgccattaacaaagccgtcgagacgatgtccctaataacagtggagaccattgttttccaaagaacatagttctttcgatctaatttcagaggaaagggctggttcagtgtattgaagggttgggtatatgttgactgtgagatgggcgccggtgagcttgcagcacctgctgcagcggtggtcgttccctgaggagtctgagaatgagtagacattggcacgggccgattggagctctgataccaagttaaactatgcacaaaaatggatgaaaacaattctcaactcaaagtcggctgagaacaaacatgttctatttatatgctgcaaaaggagtacaaggacaaattacaatgtgacaagtggccctagtgttggagccaaagggaacaaacaaacacagaaaacgtacaaccttttacaactaataaccaacaattaaacaaagagaataacagaggattaacagggaatcaataataactaataactaatcaactttcttaacagatatatcgatgcaagttggatagccaaccttggggataatttgtccacannnnnntgggtatttaccctaggtggaggggcggtttcttgggggtctaagaaacaa

SEQ ID NO: 57815 - DNA, 1199 bp, Cannabis sativa
ttttttttttttttttacttcttgctgaccaaagtgtatttttgtgattttaaaattttataagtgtatttttgtaaataaagactttaggccataaaattctaaataaacataaaaaatgtatttatgaaaattacctttttttctcttaataattggtgactttactatcattttggattttataatgaataattatcatttttcccttgaactttcgacactacttgattttgctccctaaaatatacgacttcttaaaaatttttcctaaaatataacagttacataattatgccccttatgttaggttcttttttttaccattaaaaattagtatttttaattaccccttgaactttgaacaatacaaatttttgccccattttatttaaaatatttaattttaaaaattataatattctactaattctgaaaaaattaataaaaaattattaaaaacctgataaaaatattaagttaattaaagaattattaattttactcaaaaaagcttaaattattccccaaaaaaaatatttttaaatattattttatttataaacatgtatcttaaaaaataacactaaaattattaaaaattcaataaataatttaaacaaactaagatattttgaaaaaaaaaaaaattaaacttatttatatttataaactaatatcttaaaaaatcaataaaaatataaaattattttgaaaaaaaaattagaaattaaactaaaaaatattatgtttgcttaaaaaaaatttagatttttttgagaaatagaaaaataacttagacttgttccataaaatttagtttttacaaaaattaaatttttaatgtatttttttttatatctaaatggactttttaataaaaataaataattaagtttttcaatcgcttaattagtttcaaaattttaattttcttaatgattcaaaataattttttttaaaagatctaaattaatattttaatatttactaaaaaatattgatttttttttatttttattgtgagggggtacgatttaatagttatataattttaaggggcaaagttgctaatttacaaagacgcgtcattatttaaataaaataatgggacacaacttaatagaaagattaaatttttatggtgccgtttggtaacacatttttttaatagttttctgttttaaaattaaaaaagt

SEQ ID NO: 57816 - DNA, 569 bp, Cannabis sativa
ctaggcctgtgcctagggcccacctagctcaggggcccaaaaaaaatttatccgtcttattaaattacacattttttttatcaattttgaaaaataccacatttttttttctaaatgagagcccaaaaatatttttttccctatggcccactaaatttcagggccaaccgtaattgtatcgtatcgtgcctaaatttatattttcttttgtgcctaattatgtccgtactagtttcttatcatgtaaaaagctaaacacatatttacatcattatatagaatattgttttgatattttaatttttattttacaaaaagaagttttaaaatctattgtctaaaaaaaaataacttattatgaatttacggcgatcccatcttttccggtcaattagctggaaaatactttgtttttgtcattgaccttacatataatatgatttagattttaaataagtaacttattttttttttttaaaaaaagacaatttaataattaaaactacaaaatctcaacgtgtctaaaacgtaatgctatgtcatatttatactcataacacgatagcact

SEQ ID NO: 57817 - DNA, 1417 bp, Cannabis sativa
  modified_base (1358)..(1363): a, c, t, g, unknown or other
atgatgatcaatagtagatcgactgaaattctgagtaatcatgaactcctgtttatgttattagtttctttgattcactcgttaaagttcctttgagaagatgaactataaaattgtgcacaaatttaaatgagatctaaattatacttctactagtgaattaatggtactaaaggataaagaaataattagaatggtaaaatagtaatttgaccaaaaataattacgaactaacacatggagggctaatcactagaattgattatatcaatagacaatgtagtaaaactcaataaatataatgctatacttactaagagttcaattttatacttatagtggagtaatcatagaattaataaacaaagattatttgattgataagactcaataaataatctagtttaatagagcttagaattatagggctatggttcccgaatcgccaccttgaaataatatcaaggaaatgaataaagagtagtatcacgttgttcgaaaaaatctattatgaattggtaaaatagtaattatttatttttgtaataaataaataatttttcaaattaatttaatagaaaaagacaaaagttgttaagataaaatttgtcaagacaatatttgttgagataaaagttatcaggacaaaagatacaattaatccttgtctttaattcagacatggtaggcacttatccttaatgtagggtgttcctattagttttgtctttttagattaattaattaattcaatcagataaatatttgaatttgaaaagtggttaaagatatttcaaagtagttgagatattctctcgagtagttaagagattcccttataaatattagtaaccgaattcagttataaatatttatttatttaaataattaaatataatttaattaatagagatttaactactataaatagtagtttgatttaagaaatcagaagagatttgaatatgtatctttaaaatatagagaagaaaaatagttttctttctcaaattgttcttgttcatgtgttgagaaattaacaagaacacattatacactttattgtaatagtccacactattccttgtgtgtggtagatcaatttggaagacgctagtgtgagttcatttgcatcatccccatcatctggagtaaaagatacaacatacgagaaattttgaggatatcatgatagtcatcaagagatatatgttctaaacttgtattttatgttttgatttaatgtatacacatttggagatctattgggttatggtacaatgataattagataatatgaaatcttccgctgagtacttaatttagtaccatagaaacttgttgggttttgtgccctnnnnnnaactcatttcaatataatcagatctactagttaataaagatcataaataacatt

SEQ ID NO: 57818 - DNA, 2369 bp, Cannabis sativa
gagataaatcataaagcctatgctactcgcaaatggcaacaaagaggagaagagaagaaaaattaagtcgtaaagatgaagctcagcaaacttagtctacaagaacacttgaaagaattcttatagactagggtgcaagtgttgacccccaaaaattactaagtgtaatatttgaaatcattagtgttatgcccgaaagttttccaaggggagatccacacatcaaggggagctcctccacacaccaaggtgagctccacccatggggtgctcctcgcatgccaaggggagctccacgcaccagatcctcctctcaccaaggggagctccacgcatcagctcctcctcccactaaagggagctccacgcaccagctcctcctcttaccaagtggagctccacgcaccaaggggatctccacacactagctcctcctctcactaaggggagctccacatagccacccacagcctccggttcccatgtatctggtccactcatacaaatagaagcaaggagaagatatcaaggctaaagatgtttaagtcaagaatcacagacgagatagtgactacataacaaatattggtataggagatatggttcatttcatctaaggtacaagtaaaagaggcaattttagtgtaacttagggtgtttgaaacaccatacaacctgagatactatattattaggtgtgaaagtgacttaaactgctatgattttggagatctgtaaggttgtaaagtgtaaagggttcactataaatagagcccttgaattcattgtaagggaacttttttttgaagcaacatctgaatgaaacagtgattttcctagagagtgaaggttgtaagatattgactttaagtattcttctattaagaacttaaaataccatttgaagttcttgttattttgttaatgagttcatatcgtcaacaattatatatatacatgtacacttatgtgagatcttacaagttcatgaagttattgaagatagtttttaattgcacttaccttgtactataggtaggaacaagagtataattcttggctttttgaaaggagatgatgactaaacatatccatagttgggatacgaagctcatatttggtgtgagaaaggaaattttattgaaaattgtggttgaatctttaccattgtatgtgatgagtgtcttcttgcttctggtggggatatgtaaagatcttgactggttgatggcatgattttgatgaaatacgtcttctagccacagtaaaggaatagtttggaaaagttaggaccgaatggtgattcataaacattcaggtggtatggggtttcaatctttgcgtgattataatttatctatgcttggaaggcaaggttgacatttgttgttgtgaccctaaatctttggttacaaaagttcttaaagcttgctatttccctacttgtgagttcctacatgctgagttgggttctactcttggttttatttggagaaatgcgtggtttcttttttttcataaaaaaaggtggcttagatgtcgggttggctctgggacctctattttatatgttgggacccgtggttgacagtggctttaaatttgtatgtcgtctcttcttctatggggttggaaggtcgtagagtgtgtgattaattagttttgagaggagagccaagagtaggatgtggatttggttagggacatattcaatgaaagggatgttgagattatctcaggcatcccattagattcatctcaggaggaggatagttttgggagaaagaagctaatggcttttattctattcagagtgcttatatgtagcttcagtctttgaaagtaagaaaccatgttgatgataacttgggtttttggaagatgtgaaaagtctttaaaaaaatatttatttttttagcctaagctacagtggtcgcgatcacaaaccttctacttgtgattaattatatggtcgtgacgaggctattatatagttgtgactatgaattttatagagaggcctttggtttttaactttattgtagtcgtggtgagggcttagctattcgcggcaagggtccccaatcacctttaaagccctacttcaaaaaaaaaaacttggtgtatcctgatccggttctatctgtatgatcagccaccgccaccgaaccccttctgatgggggtctaaggtaagtccttatctctttggttttaagaacttgtatcttaattgtatacaaaaataaggaaaattattgggagacttctttaaaaagtgtaccaaagtactcctgattgacatatgtcaacctgggcactaattgatggcctgagagcctacattgtgcaccatggtggtgggaaaat

SEQ ID NO: 57819 - DNA, 955 bp, Cannabis sativa
  modified_base (881)..(893): a, c, t, g, unknown or other
ctctctcctgcaattctctatcgcttgtgattctcttctgcatcttctccgattcactttctctcttctccatggggcaattcttcctctgattcaacctacgctgacctgaaaaactcaaacaagtataaaattcaacaattccgataccgatagaagcaacaagcaacatcgccacctaaaaacaatgaagctctcaccttaaagcagaaaacaaaaaacttaagctcaaagcaccgatcaacctgcacacacaaaattcaatcaacaatcaagccaactccgattgtccctgtcaacaccgattaaaagaaatacaggtacatttatatacatattatgctatgtatattatatttatatatataaactgtaaaagaaaaatacaatgaatatgtgcatttgcaattcaaacttaaaaaataaaaatcaatctagaatgaaataaatttcataccaaaactatatcatcttgcattgccacataatgaaatgttgataatcaatctagattaagactatgaagtttcacaaacaaaagaaaaaagaaactgaaaaatgaaacattatgatacttttagttttagacatacacgctggaaaatgaaaaaattactgaatattattaatatataaccggttactataaattatctattaaacataaacaaatataaatgaatgttggaaaccagtttctccaatatatgataaaaaaaaacatatataatttgaaaacaaaataaaaaaaaaaaaaaaaaaaagaaaccgatttcttaatacattataatttttaactaacagttttcaaatattgtacaggaatggactcaataatgtgtttggtcaaatatgaagggcaatggaaagaggataaaacnnnnnnnnnnnnnataatgactggactactaataccaacaaactgtgatctaaaaagtttgttggaattagtaaa

SEQ ID NO: 57820 - DNA, 696 bp, Cannabis sativa
tctgggtccgccagccactgtatatatatatatatattttcatatttgatcatttggcctaattattcaacaaaattttccaattttcttggtgaaattttaaggtgaaattataccaaaaaatcccaacaaacaatatattgcaatattgtctatgtcgttcggtaaccaagtaaatgtttatttaatgagtagttgtcaattaataatgtcttattaattaaaaatactattggatttatttaagcttttgttcttctttttcttctcttaattaatttcttttttttttttctaataataaaaacatctagatgaaaaatgacatttccatgtgcattacttttgttattttgacattgatttaagagtcgaagtcgaacatgattttttcttctatattttggatactatgatgatcagttttgcctgatttgtagaatttttttgtccatttaacctatgaatatgaatgttctttccaaataataagattctttcttaaaatagtagatgcatgtggatattatagaaagagagttttattgtaaggttcacaccatggaggagatgactagtatcttatagtttgacagattctattacatttgaatttgttgggtgcaattaaagttctacattagtagatatacatcggtatgagatattttaaaaaggtgctcaaaaacaaattcg

SEQ ID NO: 57821 - DNA, 1216 bp, Cannabis sativa
aaaaacttagtctgcatgatgacttttttgtgttaacccttgatgatattaatctttgtattgctcatctaattagtgaggatacttgagtttggttaataacaattcattttttcaaaaaaaataaaaacctaataaattaggatgaaataaaaattaattcatttctttcattctaatttattatcactaaccaaacataacattagttagtgatctgcagttgcttatatggagtttgtgggtcgctattttatttacaataataatatttattttacttaaatatgtacatacttttagttgattaattgttagatttaaattcaatgcaattaattggatttacatttcaaaggtcctaaaagtctccctcgaaaggattgatttggccaaccaactattaaatatcttcactaatatttatacatattcaatgtattccaatttcttgcttgccatacaacaaattacatatgttcacaatcttgttgaacactaaaaaatttcacattattgtcaactttatatatttattatttctggagtaatataagtgttataagttttgcatcttaataatgataatctagtgtataatcaacacgtggactcattttcataaaagatatgtcaatggtataaacactaataatttacagtcctagctattaaaatttttatcattcataaaaatataacaagactgaatgtgataaataaacatattatatagtattataagcatatataaataaatctaaaaaatacatgtgttaattcaaaaagaataactcaaatagtgaaaatgtatcatccatagatagtgataattttaatctatcttgtaaagataatttttattataattttgagtaatgatcctctaagaatactagacttagatttctctagttttctctcttgatgaggaaagatgagaatagagttgacacttatttctaaatgaccactataaatttataatctcatagtaaggttattaatttaaaatatttcaatttagctcctcaataaattaaaaatatcgcttaaggtatctacacatttaacccataatactttaatacctatgacccacaattattaaaaattaaaatgatcaatttatttgggttaaacttcgaataccaatacaccaatacatatgagcctatataaattattttaatccaacaatcttccacttagacta

SEQ ID NO: 57822 - DNA, 589 bp, Cannabis sativa
caaaaaagaactccaaaacaccttcatcgcattttttcatcctccagggtcccaacctttgccaaacaccagttaaaatctttttaacaaccgatgctggcatgtccttccagccaatcaccttcccaacacaagccttatttgagacaacctcttcgagcgtgatgtcttcaaacagttccagcaactcctcatcaatcacatcaacgtgtatatcctttgccattgtagacgctcaacaaaaaaaccagcagaaagagtagtgagggtaataagaaaagagtataaggaaaaaaccttagtcttcagagagacgagactctacataaggagccattttgtctttagatatgtgaaatctgttaggttggtacctttactaatagagaaaaaaatatctctcactacaatacaatgagaacttaaaatttgatgttgtttctattgattattgggatcgaaagtttgatttttcatacgaaaattaaagtttgccttttcgtttcattgattgtaaaatattagtagaaagtttatgaaatgataattttgaatatatgataattttgagtgttaagtttagaaattt

SEQ ID NO: 57823 - DNA, 934 bp, Cannabis sativa
attttatagaatatattttttaaaaatactttcacttttttttttttttaaattaaactcttattaataagaaccagcgtttaatacatatcaaaaacaaaagatggataatcatcaatcataactaattcaccatccaccctaagtgcatacacaactaattcataagaaactgacatgaactagggataccttaggaaaactggaaagcaaactagcaaaaaaaactagctcattacaaaagggagagcgctattgaaaaacataaaccaaagctacacaatcagactccacagaacaaagaggaagaacaacgtgtgagaccaatccagaactaccattaacgctaattcttttgcttcaatgacttggagtaaccaataagtttacatcttctccaaatatctgtacacttaaaaatataaatacacaactaaacacataacacatcaaaaatacactaacaaactgaggaattgtgagaatacttaatcactctcctttatttacaaaaacaataaaatacgatgaaaatgatagttttgaagaaaaaaaaaaagcatctaaagtaagggggtgtacgtcgatctcaattttgggtcagtttacgttacattttatttaagatcgggttacaaaaatctaagagcaactcgctcaattaaggaaaaaaaaattaacccgcccaatgaattgatcgggttaacccgtccaaaaccaagcactaatatatttttttcacagtaagttgttatattttaattcattgtgataataaaacaaatataaagattgaattcaaagttcaaatcatccaccataaaaagaaaattaaatttaaaaaagtaaaaattcgatatagcaattaaataataagaaaaatttatccgtgatattcatcgatcctctaataatcattaaaatctccaaatat

SEQ ID NO: 57824 - DNA, 3677 bp, Cannabis sativa
aatcgatctgcaaatagggctgcccattgtgttgctagggtgtcttatttatcgtcaggttgtacttttaatgagctaaatgctctgctttctttgtgtgacattattaaggctgatgcctgttaatttttaatgaaaatcctttattcaaaaaaaaaataataaaataaaaataaataaaaaatccattcaacaacttttacaaaaacacatgactcaaaatagaaataacctaatgtatatagaaagttacttgttttatcaaaatcaattaattaatagaaatcaaactatatataatctcatgcaaaactattacgtttttaagaaattgtttggttgtgtttttaatttttattttttaatagtgagaatagaaaacaatttttgttattttataaatttaatgatgtttaactcaagtttcttaaaactattttattttttttactaaaaaaaaaatcaatattctacatcataccatgacatgaacccatcctaccccagattgagacccaaattcgaatccaaacccgaaccccgaagactcggacctacacccaaacccgaactccggacctggacttggacccgaacctcggacccaaacctagtctcgaacccaaacctcagaccctcggacccagacccggaccctgatcctagaccccggatcctaaccctataaccttgaccccggacccaaaacctgaaatcaaaccccaaacccgaacttggaccctggactcggaccctaaacccctttgtgagaattacattttttttggtaaataaaatgattatatttctccaaactaattatgtacatcaaccttacagtttattgatctttacaatccactcccttttaatccgctgttacactttactaaaataatctgtcaaaccataatctatctttatatcatatacacacaagcattgaatactacataggtatatttcctttctcaatcgactctccttaattacacctacaaatacagttcaaaatcccatcatattaacacttctgagatctaataccaacctagtcacatttttttatagagtaagacattgcttgcatttgttgtatgaatagcattgatagggacaatgcatgcaatttgattcaagtgagaaaactgctaaagcttttaccacctcttgtttaaaagttgctttatctagctttaatcaatgatttcaacaatggcactaagattaatatgaatttcactattaatttacacttttttagcatccaacatgaactaatataatcaattattgttagcgaccgagggtgtgcataaattgatcaaatccaatgaaaactgaccgatctaaccgactgccaaatattggatatccaattgtgatcagatcagattagatattatcttttaatatctaatcgaatcagatcaatcggatgttagatgcgatatccaaaaatctaattcattcaatcgaactaattaatatttttatttagtttggatgagtaattagatttatgttttatacttgaaaaaaatatttgtataaattttacttttttttttttggattgaatggatccaattcaattcagtagatactggatttaaaatattagatggatctgatccggtccagtaaatattaggtctaaaatattagataaattcaaattaaaccaatagagtaaatttcattttaccagcgcaataccaaacttttgccagcacatatgttggcaaaagtgacatttcttgtagtgagatatacataaaatatatccaatggatagagtcgatccaatccaacatccattaaatgttggatcgattggatgactgaaattaattggatcagatcggatagtaaaatctatatcacaatatataatataattggagatcagatctagatagacctaaaaacattggatgtgatccaatatagcgactacacaaaatatgtttttactgttagaaatttataaaataccaagatactaagtttcatataatttagaatgctaggagtaattcaatgatgtggaaaacttgcttgattgatccatatcgataattaattaagaaataatgaacgattagttgtgcaatatataacttactaagtcttctttcttagatctctaaaacagaagtaaatcatttgatcaacaaaaatatataaagtgatgagacaatatatgtatttacagagttagggtagagtcctaacaacaaagccctaattaaattgtggctccttatcgaagacttcaattaactagaatagactacactagcttagacttcacataaatgttataagcccattaattaaatccctaaccctatgagttaaaatgacaaagaactatttatgagctcatattacaatcaaattaaataatgttaatgtaaacccaaaataaaagtcctacacttacaataaattatttttcatacttttttttaggcattttccatacaattaaatcttttgattttaactatttttcatgcaaggtcaattaattaaaaacttattattatagttttatttgtaataaaattatctcaattttttttaattaataagctagcacaattggtggtatatatacaagaaaattcaaataatttcattttaaaactacacctaacaaataatttatgaattttcctctctgttaatgatgttgctctatgctaaacacgctttatctgtggttgttagcaaagtttattggccgagttatccaaattatattcgaagcattgttttggctaagaccatgcgttatctatgtgttttgaggttttcttctaaaaaaaataatttacaattatatttgctatttcatgtaacatacaaacatgatttataattattagttgtcaataatattgaatttattattagtgaattgtatctccctattttatatcaaattaataaatcaagtaaagttagaataatttttcaatgaaaatgaacatccatatatgcatgatgtgtctttggttatatttttcaacttaagttgatagctatataataaaatgttaaatcataatttgaaagcatcatcaaagaatgattaattgattacattcatatattaattgaatgagaaaacgcgtatatatatttatatacacatagcacataaaaaccctaaccctaaccctaaccctaaccctaataaatcacttataattaaaatcttaattgtgtgtgtgaaaacaatattgtactaattaaatttcccaattaaactttttacataatatatatagtaattaaaggaaaatttaaggtaatacttagcttaatctttttttggggccacaaaaataaaaataaaaagcacacctactctttctcacttatttatttattattattttaaatatatatatttatatattatattcactgtggagagcaaaggggttaccgacatagaagatttctgaagcggattttcaggagaaattattatattaatttagaaaataattaaaaacaataattaattacattcaatcattaattttactatgtgctatatttatttatgtatttatttctctaattaacatatctttatatattaaaagtgcctatttaacggcatttcttggtttaacattcttggtttaacagaatat

SEQ ID NO: 57825 - DNA, 616 bp, Cannabis sativa
  modified_base (583)..(590): a, c, t, g, unknown or other
ttaagtcattgtaatatctaattatagactaattatgtgtacatatatacatgcatcatgcatacattcatatttcaagtacatatatatataatattgtagtataatgtctgatgattgtttaataggtgaaagaaatgtttcacgtggtttccaagctttttcattgatcagaattacatgggtattaaggttttcaattttagaaggttgatatgctaatcaaatttaattaagtggagtaataagctatggtttgagaactatcaactttttcaaaataaattgtataatgtccaaacaactaggatgttttcccccttaatttattatatatacatatatatatatgtaaatcttgtattctacattattcacttttatttcttgcttcactttgtttccttcttaactacttaaacctgatcaattgagttagacgaaaagagaaactataatcttatagagataagcgtttctaatgttgttggaattggaacactatttctttgtttctaagattataagtttctctaaagcgaattgtgtacttattgtttaattaggtggcgtttggtaacannnnnnnnatcagttttctgtttttaaaagtgga

SEQ ID NO: 57826 - DNA, 1126 bp, Cannabis sativa
agtaaccatggctcatccactttgctagctacttcctctaattcttcccataattctgctctcttgttcacatcattaaatgcatagactaatgacacataaaatttccccacttgttgctgagattctacataacaatgaataagttggctcgagcaatagcaaatatccacagagtaaacactaggctgccacgcaacaattattcttcctttatccaaccaaggattattatttgtaaagcaccgaccagaaaaaagactagtatataaagctcccatatttttattttggacctttgtttcaaggaggctaacgaaaccagcacctttcgagaagatcaactgcttaatctcattatgcttctgctggccattaatcccccttacattccaacataagaatctatccatttgatgttgagggatctccctcccctcctgtattaaacttgattatctcttctacctctaaattagcaaacatgttcttcacaatagtctcctctgcttcattactcaccatcactttcttacccttgtttactctttgaaacccctcctcatcaacctgctgctctttttctggtttcttcttttttggcatccaaacatgcttcccttgctcttgtttctcctctttcctcctacattcttttgtactatgccctataccagaacagttatagcacacaagtggaatccattcgtacttcacttccaattccacttcatgatcaaactcatctatgaattcaattttgtcaggaaagctttgagccaaactaacctgaattaaaactctagggtactgcagccgatccctgttctttgttacactatccacttgcaatggttctcccaactgacttacaatcttgaacaaagatgattcacccaagtatttgatgtccagccccttcaattgtatccagattggaacattagtgacttcctctttagtgaaatcatcaattgggttccaaggtttcatcaccattggtttcctatcaaagaaaacatatccctgctgcataatcttatctctttgctccatgctttggaatctgatgatgaaaattcctttagcaagtaatccaactttaaccacctcttctttccacaac

SEQ ID NO: 57827 - DNA, 1008 bp, Cannabis sativa
gctagttgcaatacgggtttctatagttgcaatacgggtttctatacaatttgggtttctatacaattttttatgtttctatacaattttttattgcaatatacaattttttattgcaatttaaggattttttattgcaatttaagttgcagcgctagttgcaataggaatctctaggtagaattccgtaaacatgtaaaaaaaaaaaatattttaaagtgtaaaaataaaaaaactccataaataaattgctactattaaatttaaaattaaaagctataaaaaatatcttcttttgtgataggggtgtcacctaaagagttcctcatataataataatattttcagacataaaatttataaaaatatagatatttacgaaaacataaggaaaatttacatccacacgttgtatagaaattactttggtgctcttactcttctgtgctacaattccatttccaatacaaatatagtttcagttgttgcacttaaagctaaatccatagccatgactctccaagcttcttcatgcttcaccgttgccattccctccttcgctctccctacctctcgttctcgtcgtgcctgtgtaatacgagccaaaggtttaccaatttcttcaaagaaactcaaaattgatttttgtgccctaattttgagtttcagaatattatttctaagtttttcatatggctggtggtcattgatactctaatgatgtttaattttagggtttttccttttttccttttttttccttctggtgtatctgataatctaaagacgtaacttgaagagtgttttagtaataatatattgttcaattttgcagtggaaccatcggagaagtctgttgagcttatgaggaagttctcagagcaatatgcacggaggtctggaacatacttctgtgttgataagggggtcacttctgttgttatcaaggtatgtagtcttatctactgattcattcattttttttaaagcttctgtaatatagtatag

SEQ ID NO: 57828 - DNA, 796 bp, Cannabis sativa
atatatatattgatttcgaaacagctctcaatttgcaatcaaagtgtcatttttccaaattccaatgcataatttacatatccatgtgtgacgaggaaacttggcaacatggaaaatccagaatccaaggagataaaatacaatacacaattagctcatcaacatgtctccctccttcccctctcatcactcttatttatttattttatttaaattatatattcattgggtggaccttccattatattctattaatttattaatgtgtgtgtgtctggcatttgctggagaattttggttatttttgtatatataaaaaaaaaaaaagttaatttatataacatagatgtatggatgtgtgtctccttgttggaccttagattagttataatatcaaatttaaccattaggagtaaatattgagcatctatccaagaaaaatattgtatctaatctaataaccttttcataattataagactatatatatattagctagctagctaggctaggctagctaatgaatattcttcttatatttaatgaattgatcagatttatatatctataaataatgtgattgtgccactatatagcttaattaataactaattaatcataacaatattattcaaattattgtttggatcaaatctccatctctctaacttgacagatagtttatatgtttcccaaaatgaaacttaaataataatcatattacatatttgaatcttataaatgatcataacaatattattacatgcaaacgaaatcgaatctttaatatagcata

SEQ ID NO: 57829 - DNA, 911 bp, Cannabis sativa
aatttctaaattagtaaccaattaattattttaaaattatgctatggtatctttatattatctcagtaacattacttttataaagaaactaataaattaatatataatattttttaaatagaataacaaaatagtaacccataaatttgatggcatattatattttgttttaacattaaaatttggttacttttttaattaactaaaagaaaaataaactactcttgaatgttgtaattttaacatataatattatatttttttatcatcgccataataaaaaataactattgaattgtttatgctacttaaaatgaagcaactacgatgttacttttccatgcacaatacaaaaatgatctattcctttattagttataattatcctagttattgaaaaataaattagttgctttagatgccaataaaaaatgttattatgttgaaatttttttatggtgattaatgatattttaattgataaattaatgtagtaccaatatgttacttgttgataaaattttatttgtatacattgatgtataattaataagtatatcattgatatagtaagcaactaaataattatttcaattttaaaatagacgagaaaatatatgcttctcgtatctcaaaataattacattaaatagtagatcatcatagtactatttttgagattaaataacaagcaatgttgccaacaaaaatattttaaagtttggaaaaaaatcgagagataaaacatagttatgtattctttattattaatcaaaaggaaaataaaataaaaaataaaaaaagtaaatagtgtgtgaatatttgaagtaatatgtagtagaatgaaaggaatctcacgtgatttaagaaaaatgtcatcaatattttatataaacgttaaatcacaagct

SEQ ID NO: 57830 - DNA, 784 bp, Cannabis sativa
ctctctctctctctctatttttgtggaagatctgattgttttttatttcttctacgatcaagcttgctaaacaatttcttgattggttcctacaactttttttttcttaacgtctaatgtagcagatcatcccacaatcttttcatgagctcaatgatatttagagctggttttactggatgctcttagtataagagtaaatattttagcttgtttactatttatttcagtttttttattttgtatgtaattcttattgtatagtgcttgataagtgtctgataaaattcctcactgaacattgtaataatttggtaattttcaaatggctggttgattttgtgctttcataattttattcttacagatatgcatgcttttatgatttatgtcaaactacaatagtaattgggtgaagtagagaatagcaaataaaatggctaatggcatattgtatgtgggtgtacttgagttgggataggatagtataggtgggcacatgagttactggggtttttcatgtattgaggtttctttatgttttactttaccttttgagatataaaattaaaggccatgggtgccatgtcttgagttcgttatggatgtgttcttatttcttgtgtattgttctattgcaatttgtctcttggtttggttttctaatttaggagaggatcatgtcacattaatttcatgattttatttttgtatatatgataatgataattacgataatgatgattatacaatgtttgcgtgtaaaagtcctaaaagcattgaa

SEQ ID NO: 57831 - DNA, 1409 bp, Cannabis sativa
  modified_base (124)..(138): a, c, t, g, unknown or other
gattggattggatccaaaaaaaaaaattcgcacttattgcgaatcggatgcacaatgagcgcgcaaaatagtgcggattagattggacgaacacccttattagttgtagataaatatttaagtnnnnnnnnnnnnnnnaataatacttaagttatatttctgtaacttacgtagataactgaccgttaagtatcaagcaattgtccacatgcccttttttattggtatatatttgcaaccgaaaattaaacttacatatttatactgtaaattattctgtatattttacacatacactgaaacattaattttgtagtttttacacatattttaaatttttacttaatttatttataaaaatattagaccaattatcacatatattgtgtatcattaccactaaaaaaaagaacttttaaggtagtttttttggaaaaattcaaaaatcgtatttcaggagtcactaaaaggagttagcaacttcagtcatagggcccttatgtcgatggttattatgtaatagtcgttgtcaggcccgtctcaagccaatatttgaggccttgggctaaaaaaatttaattgtgtttttttatataggataaatattattttagaccctgtattttgtaaaatttactaataggaccctttgttttgttaaatgactatatggatcctgtattttctaaaattgtacaaataagactctgaactgatattttgtcaaaataaaacttaatagtaatatgatctagagatgttatgacaaaactggttacaatttatcttcatgatagaaattatcataaaagttagttatattaaaaataaaattgttgattgggctcatggtccaatttttactattttgaaaaatataggattcattttgtcatttaacaaaatagatggtccaataggtaatttttgcaaaacacaaagtctaaaatggtatttactttgtttatatgaaaatttttatgtttttttttttttttttgtatatataatggtaaaaatataaaatatatataatattttgaaaatataattgggtttttttttcttaataaaatatctaatgtagaatcttaaaaaataaataaggtatttttttttttagaaaatggttatatttttcaataaaaatggtaaaaatacaaaatatagtatatttaaaaattaaatttgggacatttttgttaaaggatcttttgggtctgggtgggaggcatagggcgtgggtccttgctgctccaccctatagcggaccctaattgctaccataggtcccttatggcgatggttattatgaaataagcatcaccatctataaggatcttatgacagcagttattgcataataatcgtagccataggagttcgtaatgcttttttttttttttttt

SEQ ID NO: 57832 - DNA, 744 bp, Cannabis sativa
aaatttattttaaaattaaattaaaataaaaaataaaataattttaaaataaaaaaaatattataaattttgaaataatttttttttataatttttagacaataatgttacatgtactaatataaacgtaccacatgtacaagaatgtatacataaacagtccatgttggcagttaactgtgaaaaatagatgacaccttataaatttgctaatagttcaacagtttggaaggttttaccaccaaaatttgagctttgaaagttaactgcaagtgaattgatagttaagagagttttgccgtagataactattaaaatacatgtcacttctcataatattgcttaatatttttctttttattatctttcggcaataaaataaattaagaatgatattagtcattatttgtattagggttgttcattcgattcaattcgtatttttttagtcaaataacatccaatctgtactaagtatgaattttataatttggattcaatctgatccgcatagcagtttaaattcaatctgcaataatacggggatcagttattttagatcgattacttttttttaataacaaattatttaatattttattaaaatggaaaaaaatagaaaaaaaaaatcattattgtttcttcatctcgaataataatctctactaatatacatatatgccagtatataatatgttctcatctcaaataaaaaaaaatcaatcattacaatatatatttaga

SEQ ID NO: 57833 - DNA, 919 bp, Cannabis sativa
  modified_base (281)..(281): a, c, t, g, unknown or other
gaatgtaccaaaattattacattatttgtatttttaaataatttctggatgagtggtattagcttttttgatggaagaaatagaagtacaaatttgatggacgagcagtgccattgtttatggctttggtgcctttcaagattttcgcgcctgatttatggctgggccctaattatttagggtaatttggttaaaattaaaaaatatcattaattataaaaatattataaaatttttatagagagatctagttgcttagtcttagtggttggttgattctnttcaatttgaatagttttctaattaaatttttaatctgttttttgatattttttttggtgaaaatttagtattttattgagtagggagcgttgttggaagatgttatagctttattgtctaaatttccgggagcagttttatcccatggggctcgctctaagattttagcagcctatggttggcaaagcatgctgtgcggctagacgatgagctatcctggttcgaggaggttccagcgccagtggcggacgtgggcgtcgtaaattcatgagtgattttaatcactttgtaaaaaaaaaaatagtttttcccaatatttttaaagagtcgtttaaagtattcttatcagtttttataatcgtcgccaaacgagcaaaatagacgatggttaaaaaccgttgctaatgtggacttcctgacggtttaaaaccgtcgcctataccctgttataggtgacgattttaaaccgtcaggaatgtaaaaaaaaagagaaaaaaatacagatttttctgccattaacaacgaactttaaaacacattaagtttatacaataacaaaataaatatatataataaataaataaatgtatttataccgagctcggagagagaaaaagagagagaaggagacggacga

SEQ ID NO: 57834 - DNA, 867 bp, Cannabis sativa
gaaattttggtctagcttgatggttaatggtgaaaaatttggtggcccttggttaatcttaggcgatgtaaattttgttctgagcaactcggagggggttgggtccaaggggagggatcattttatccccttcatttcggagctggttaaccgttatgcattggttgatttgcctattaaatgggatgtcatggcttgggataatcatagagacggtgctaatcacattaagtcggccctagacaaagctcttgtaaataatggttggctgcaaatctttcctaagacggtcgttcggtctctcaccacctgtaattctgaccatcggcccccctttattaatgccgacacttcggactctaacgccaaaaggcctttccgctttgaagcttggtggacaagggaccctcgtagatccttggtggtggatcaagcgtggatgtctgtttcccatgattggacccctgctaaagtgtttaagaaagttggtgcgacccgcctggccctgagtaattggaaccgggtgcaatttggcaagttggattcttgcatctctaagttggagggtcagttacaagctatccaaagtttgtatgctggtgacagaaattgggctacggaggctgaggtgaggaaagagcttaatgaggctttaaggcggaaagcaatttattggcaacagagattcatgatttcttggattagggatggtgataagtgtactaactttttctttatttccgccacgattcgtaatagaagaaacttggtggatagtatctcgaataaggatggtgtgtggataactaataaagaagagattggtaatgagtttactggttttctgggtgacattttcaaaaaccc

SEQ ID NO: 57835 - DNA, 1566 bp, Cannabis sativa
aggtgttgtggggatatcaatatgattctaacacctgcacctttttcatttgatgctccatcaacatatatcctccacacttttctttctgaggtcaacatgtcaaggttgtcatttatcccagtacattcttctatgtagatggccaatgcttgaactttaattgatactctgggtttgtattgtatgtcgaactaaatcaattctatttcccattttaggagcctccctgatgactctggcttttgcaacacttgatgaagagtggtggccttatggttggttagcacccttatgtcatgtgcctaaaagtatgatcttaacttctgagaaccaattagtaagcagcaggaaagtttttcaagcactggatatctagactccgagcccagtagtcacttgcttgcgtaatatactggaagttgtacctttccttctcgcacaagtgcggtgcttaaggcatgatcagacactgccaagtacaaaacaacaactgtccgtcaactagcttggacaatattggggccttcactaaatgttcttttacttactggaaggctgtctaacattttactgtctactcaaagttattattatctcgatctatattgaagaatggtatgcacttgtctgtggatttggagacgaatttgctaagtgtcgctattcagcctgttaaattttgaatatccttatgtttcctgggtgaaggcatatctagaaaggctttgattttctcaaggtttacttcgattcctcaagagctgataatgaatcccataaatttccctcaagagacttgatgagtccatatttgtcttataatgatcaatttatgtattaatactcttaaattgattattcaaattattgattagtgtaatattaattgttttggatattttaaagactaatcatgcatttggagtctttcggaaggattttagcatattttggtagaaaatggtggaagttggcgagctcagttttacaaggtacgatttaaatgcatatttggacaatcttagatgaataattggacttggagctcaacataaaagttttagatctcatatttctctttccagaacatctagaatcgtccaattccaagttgtattaaagaagttatggccaaaatactaaacaagtgcagaaacaaaaattgtgcagtgcccaattcttgcactataatgctggtctgaaaataaaaaagataatttctgaacataagttgttcagcaaatatctcatgggcgaaatagcaccgaattatcttttatatatatataaaaaaaatccttattctaaggggattcatctatcttttcaagcattataaatagaaccttttaggctaaaaattttggaaccctagagctacaaaattgagatagaaacttagagagagagagcaaggacgagagggagatcgcgacttcgaagtgttcttcatcatagttcttctcttctccttcttactatttattatgattatcattataatgtctagttttgagtagtttccttttagttaagggctatttcaaaacccgagacatgaat

SEQ ID NO: 57836 - DNA, 806 bp, Cannabis sativa
cgcgtcaagatatcacgatgttttttctagtggggtgtggactcggtttctccggcggtggctcttgaatgtgctgggccgtcgtctttaccccggccggatggagctaggctcgagaaggttggctcgaggcgcgaagtgactgtgactagtcggggtctccctgggaaaggtccagtgatgcagagaaaaaaatggacccccaagaaagtgacagcggagagagagattgtacgaggtatttctggttttggaaaaaagatgaataggaatttgaattttggaaaaaggcctcctgaaacttttcctaggattgagcctttgactatgggagataatgtgagtaacccgttgggtatttcaattcctaataaggaggatgtctccttgaaaagtgtgccaccttttgctataaaggagaatttgtcttttgtttaggggcatgggtcttttaaaagaatgggaaaaaaagtctctaggcaatttgaaaaaagagttgttggtgggcctcagttagtgggccgtgaggttgaagctattcaggttatgcttcttgatgggccgtctgggctgcctgggccgaagcacatttgtgtgcaaaaagagaagaagggaagtgatatggggtgtgggccggatgggaaagtaaatggtgggcctggttgtttgaactccaaggaagtggggcctggtggatctttaattgattcaaataatccaaaagctttttttgaaggggtctttgaggaagggggctgcgctattcctaggcctattacggaagttggggttgatggtgggccgcc

SEQ ID NO: 57837 - DNA, 1155 bp, Cannabis sativa
tatatatatatatataaaaaggattctttatattattaaaatggtaaaaaatagtctcttggatacaattttagtaacaattttttttgattgaacttaaattagatttgaaataattttaaaaaattaattgttaaaaataaatagtactattactctttttgaagaaaaaaatcactaaaaatatgttaaaggggactattttttactattttaattatcacataatcctttttataatttttcaaaacaaaagacccaaaatagaatttaacataacaaaggagacttattttttcatttaaaaaaaattatcctttctttttaatctttaaacctatttttgcttaagcatttttatttcacaagaaaaatctacaattaaataaacacaaacttttatttattttatattatttgttccaaactttattgattaacatattaaaattagttttgttataaatgtagaaatattcaaattacacatattttatattttatatattagtgtatatttaatctcaactatagatgtgatataatcttcacttaaaaatatatataagaataatatttaatgcatattattgtgagtaataatatttagtgtatatttaatgcatattattcaggttaaagactttcattatttggctgtcatattgtactgtgcattaattaaattatttaacgtattactaattttaaaaagaaaaatttgaatttttcatgcttacattacatttaaccaaaaatcaaaaaaataaaggagtttttttatttttacatttcaaaagagttttttctttctcaacccaaattgatatgacaactactagagcaaccatcatagtaattgaaaccgtaaaaataataaaaaaaagttaaaaaaatagtatatggagtgattcccaaaaataaactaaaggtgaataattaatattaataataagagtaaatgtcattttagaccctgtgttttgcaaaaattactcattggattctctattttgttaaatgataaaatggactctgtgttttccaaaatagtaaaattaggatactgagttcaatttttgacaaatttttttaatataacaaacttcaagattttcctaatacaaaaaaaaaaaatacataaaaatataatca

SEQ ID NO: 57838 - DNA, 674 bp, Cannabis sativa
gacactccaaactactaattccaaacttttaaaattataactatttgatgtgaaaaacataaaagaagcatcaacactcatactttatgagttgcatgcatcctagaattttccaatgcaatattctcacttagtatgagcagacaaaagagagaggaactctttatcaacttcaaatttggacatatcttcaggacttaagcaagcataaacctctatttcatcacccttttggttgtccataaacacaaatatgttacaaaaacacctgtcagcagagctcacccaaataggctttccatatccaaagtcagcatcataaacaggaaacctacataaactactgaacacaactgcacacctctctcctctcaccaatccctcattgcccatcctcatagattcaatgtattcatctgatttctcaaccccttgaagatcttccacaaactttttgtcaatctttcttatctcagctcctatcaccctcgccagctcgtgacaattctcattttcactactgatgatggacgaaggtaataaagtctccataccatgatagtagttgccgaaagagttttccggcaatggcttctcgaacctcggacgaatgttcacagggtgataggtacaacataactttgattttacatctaaaccagtagccacagcat

SEQ ID NO: 57839 - DNA, 1083 bp, Cannabis sativa
gataagttaaagtagtgctaattataatctcttattatagtgttttagtaaatttttgcgcctaaaattacacgccaaaatatttttttatttcaatttttgtaaatttttgaataatttacaatactaaaaatagaatttctaatatttaagtttatcatatttgttcaaaaaactttaaatttatttttgatacggtaaatttttcaaaaattaacaaagatgatgttgtgatagttggttattattttcttattactaatcaaattaaaaaaaaaacatataaattttggtgataattttttaaaagaactaattcgacatttggtaactgactattttttttaaacgaaaaaaattgacatagtagtaacagggtaccttatccatttttaagaaataaaatatgaaaaaaagacctcatacaaatattaaaattcataaaaaatgtacaaagttaatcttaaaattcttaaaattgccaatacgttttttctaaaaatatactactttaagtgttactttccgaaactaccaaattatgtcacctgaatcaaatttttgaaagaggaaattagatataatatgttttttttaataaataaaaaaaaataataaagtgataaatatgggatttttagatttataatgcatttttatagcttttttttttctttacatttttctttttttggttcttttagaaattagtattggtaactggttactatcaacaatttttaaataattagtcacctatgatgaattagttcttctaaaatatgatgaggtggtaaccaatttccatcatatcactaactaaataaaaagaagaaattgatactagttacgagttactactatatggctaaaagaaatccatgaaaaagttaaaagtaaaaagaataatatttttgtggcatttctatccatataaaacctcaattttttcaattgaaataaatggtaaatttgaaaatattaggggcctgtgatatttttgtaataggcggcaaaaatatcctataataaagatccctcaagacataatagttgagaatcccacaaagtacaagcccaact

SEQ ID NO: 57840 - DNA, 525 bp, Cannabis sativa
aagaatttataatttacaaacacttagtttagtttttttttttacagttttgttgcagttactttttcttacagcataattatagcttttcctcacagtacaactgtgtcaaattgaccttaaatatatttaaacgtaaatgtatttatgtttgaacatttttttttctaatcggtaccttactttattttaaaaatattttattaaaattttattttccttgtttattttattttacctataacctttaccaattttcattggcagaacttttaggctatagggtggccatgcctcccctatttttttttaattttttcatatgtatactataaatactaaaaaaaaaattacaatatagatacaatacataataattacaaaaatacaaaacaaacttattataatcacaacaaattaaacaacaacacatatgtttatttatttattttttttaaaaaaaaatagtttagataaaacgttaaaaataaacttttttttacaaccaaaataaaaaataaatta

SEQ ID NO: 57841 - DNA, 2049 bp, Cannabis sativa
  modified_base (878)..(881): a, c, t, g, unknown or other
  modified_base (1391)..(1392): a, c, t, g, unknown or other
acttgaccttccccagacggtgtgggattgtacagcttacccggtatttcctcttacggatcacaggactactgactgtcacaataccgatccaaaaaatagagtaaaatagccacttgtgatcaagaatagtaagccaaaaaaagtcgcttgtgtggaaatataatagaatatttaagataaataggctactcctcctattacaaattagttttgagatagaaccccattaatcttatcttaaattctaacattttgtatattttggaatttgatattttgaccttctattttattataatatattctattttttttgttgagtgtagcgtaatgatattataattattttaaaagcttaataacttaatacttttttataacactttctatcactatactataaacaatactttgatatatttacatataatttaatattttatcttttaactattgttttttttttacaatttcgaagtctttaaatgttcgggagctcaaggtgtacgacttgctcgcctcacttgagactcaaagccagtatataagtcataaaaattctttttctttacaacaacgatattcacatgaggagtgctaccgtcaacctcctgttacaacctcttagtcaaccttcacacctgaaaacacatgtcggaatatttttttaattttttttcacaggagtgtttgttatacttataacatcatcccggtaaattttgaaaaatttcgaataatttacagtgccgaaaatacgttttaagtttattgaacgtgcgtggtaaactaaaatatcaagaactctgttttcggtactgtaaactattcagaaatttttaaaaatttatagggatgatactgtaactataacnnnnaccgctatgaaaaaaaatatttcaacatgtgatttcagacgtaaaaattgactaaaaaattgtaataataagttgtaattaacacttatcatattcacatatatagggatcttctgctgatgactcattgatagtgaaaattaatatcttagaattacttgggaaaatggtgtgtagctagtactgtgtactaaaaatgacagaagaaaagagttggaaagatcaataattcaaaaaaaaaaaactatttgttattattgatttattattattactgtgtttgaatgagagagagagagagattttgtaagttttgtgaaagaattatttgtagtgtgattgtgtgtatctcaagaaagttgaaatgaatcttatttcacgtgtgcttgtttgtgccgacgattcaacacactctttctttttcagattacaccttattatcgggtaccagtaatatcgaatactttctagatatatcgccttatttgattagcgatattttttaaaaannattatattaaattatataaaactcaatactaaattaaatcaataataatattaacacgtaaaaaaaaaatattaaataccacaaataccttttagcatttcaaagaacatgcatgcttgatatactttttcttttttgtcccattttattattattattgttattagacaaagatccaaatctaatccatccaatactagctagctagctctaacaaaagaaaaaaaaacaaattacttcatctcattcaatttcatcaacagtttataatgaattagcaataacataaagttgatgtgttctgttctaccttttctcttcttttatgaccttataataatttctttccattttttattttttctaataaaaaccagaacttgatatgatagccttgccatggcccattaatacgaccacttttatatatttatgtgacataagcttcatagtatactatgtcttgtttcttgtacatggaatatatattattataaagaggtgttatgatcttgtagtttttttttttatctgttttgatataaaaatatagctaattagaatttttgtcctgaactttgacatgtattaaattatgtcccttgaatttttaaggtcgttaaaaatgctccttgaacatgttgatattattggatt

SEQ ID NO: 57842 - DNA, 815 bp, Cannabis sativa
ttattattattattattacataactactgtaagcttctatcatttttgtgtctagaaatattttgtttcacttgaaattgtgataataagttgcataattttatcatcttaaactgaaactttagcttgtaggtgtcttcaatcaattatctaaataaacacttatttttgttttaaatttctttgacttgggtatcccacccgatgaatgtgcttatatttattgatttcgatgtaggtgctgataggaagttaattctgtctcctagattgtctatgctactagactagaagttgttggtcgaagccaaccattatactcacagatcaaagaataatgtcggtcattattatcgctttttgttggattaccatactatgtacattgcttgatacatatggtatctagaaactagaaagtctaaaaataaattacactaattcatttgatatacaactttttctttgtaattaaaattcaaaactgtttacaaattgaaattcatttgatatattacatttaattgttgatgttgattaaatatagggttgattaatgctactaaatgttggcatacttgcatgagaataagggcgacattacacttttagggacaatcgtttttgctcctaatttgcataaaataggggtgattttaatacttttaggggcgacaaaaagttgcctctattaatcacttttaggggcgattttgtaatgaccgctttagtaatttagattagtaaaggcaattagcactaatttctgatattgttataattatttatggatttaattatttatgggccccatt

SEQ ID NO: 57843 - DNA, 7928 bp, Cannabis sativa
  modified_base (28)..(57): a, c, t, g, unknown or other
aaaagcaatttctgatctttattaattnnnnnnnnnnnnnnnnnnnnnnnnnnnnnnatttagggcacaaaagccaacacaggtaagttcctgttgtatttttcccttgatttcctaattgttttgagttagttttggttagggttctaaatatttcaggggctgtgaaatctattgatattagtgtataattttaggtcagtttatgaggttgtttaagcttgtaatagttatatgtaggtgttggttgggttgaatgagttagatttggtgaagtgagtttaattttcatttgagaatgtaattttgagcatattgatgagttgtggtgaattgctgattttgatatattatatttgttacaatatgcttttatgggaagtttgattaggtttggaggaggtttgggttgaaattgaagaagagaaccctttaattcctagtgtgccaaaactgatcgaccggttggttctggtgcacctgaactggtcgaccggttggttctggtgcaccagaactggtcaaccggtttccctgcagagggaattcccgagttttcttctggttctgttttggctcggggtattgcgtagtatctgttttaggttgcttatgagttgtttgacctattttagagttgttggaagtttatgtttggttttggactaaggttttatttcaaaattttagtttaaggtatttattgagttttgattattatgacataggaccgggatcgcccagcttgttttccactcaggtcggcccgcacgcttgagttatgaactgaggtaagaaaagtgttatgcatcacttagggttaagtgattagcaatggtattgtatagtctcgattatgatcgagatctagattatttatttgctaagcctcggttatgactgagggttggaaatggtcattaccatcacaagtaattacttctgaaaccacggatagatttcttacttatcgtttgctttactggacaatgatagtgacatattcagctcgtggttaacgagtggtaagggtactttatgaagtactaggattgtgtgagtatgatattatgtaaatgtttaagcttgttaatgtgagattgaatagataattattatattaattattgtttcattcacttttcttgctgagtctgtgtgactcacaggtgctatatgatgcaggaaaggaaaggcaataattaagtagccatgagtttgaaggtcgtagtagtaatgtacatatcagtcgcggtgttacgacctaatggacagggtgttccattttgattgtattttggaatataaagtttatgttgtaaaagcacttttaaaccaaaatgtaaatattttgaaaacatggggaccccgtaataattatacttatctttttggaaaagtagttttatatatttgttttaattagtaaacttttaatcaaccacacttttggtataattatataaattagtaaaaggaaactttgtaaacacacacacacacacacgtggcatccctattggacagggcgttacatcagtattgatttggatttcatcttataagtaatgtgtgattgtgattgtttgagtataaatgttaatattttaataatggattatatatttgttattattacttttcttactgagtccttgtgactcacatgtgctatgtggtgcacgtaataggtaaagacgttttgacaattatgagtgagaaatcttctccagtaaatgtacatatcagcttatccagcaagtggtgctgagttgtcaggaactacatttttaatgttctaaacttttaaatatattttataataatattgtaatggtatgtcttgaaatattttaaataggggatcctcaatcgtaaaaagggactatgccatgattttataatttaaatcagttggtaaaatttttattaatcacagtttatctaaactgccagcttattattgtaagctactttataaatgcacacacgtggtgtccctaaggattagggcattacaacatagtatcagagcaaccacagttttaaaggtcctgaagactagctggatatgtacatttatagtgaagaaaagctcgactcatgggtagtaagtattatttacatgttatatgattaattgttattcgatatcgttagcagtatatacgaagtaagcctgagttaggttaatagttgtatgttttaattgagatagtttagtagagctatatgattgattaatacgtaaaggaattcttattagtattgttcttatttaagaaatatgagtattgtgaaacaacaattattaaagtattaagtatgaaactcaataagaaaatttgtacagttcaatgggaaatttattgctactatgatcacgaagtgatgtgtgttcttttgcagtaaactagttgatgaaacaaacaacttaaagaatttataaactagtaagcttgtttgaaagtaagatgagtatttaaaatgtcatgtgggtcgtagaatatgagaaactattaaaggaagttgtttaagttgtttggaggatggaatcttcttgccttggaggtggttaagaacccctaaaggtggaacaatagataagtataattgtgtccatccaagatctaaggtggaatggagattatgattaagtgagttgtgttatttcgtgctacagaagggatgtttagatagaaatggatagatcccaagaaacgtgagttgaaccatgttaactaaggaataactcagttaatgatctataaggagataatggcgagaatattgatattactaagataaaggagactatctagattgctagtaatgttatgatgattatgataacaatggaaatacttttaaagtttgattagatggtaaatcttgtatatggaatgaccatggatgtcctaggaaaggtaaggtttactcagaaagtggaggagaacataacttgtgaacgaaggagatacactcaagttattgagatgtatattaataagattgacaaagtattagttattaataataatagcacttggggagatttttgaaagtctctattctatatcgagtaaggtagaggttataaccccattgattgaaaggatgaatttagatgaccttctagatgtgggtctcagttagaagtattaaagtattaaagtttctattagaatggaaataaaattgataagcttaccgaaatgcttgatggtaaaagatgttattcctaaagagaaaggctgtgtttaaagtcatttcatggtagggtgttagaccatgttatatattgttaagagaatgaggtacattgttacttgttaagaattctttatctcctgtaaataaggttaaattctctagtgaatgtagagaataaaatgtatatatatgggttgttttattggacgaccagaagtgttagattactttgttaagtaacagtgagagtgatagagttatgtctctataaacccattgtagagttaatatgattgtcttatttgggcaatagaagaaattggttactttatgaagtaacattgatcattggttatcttatttgataacaaagtaggttgttttattaaacaacgacccctataattaattgtaatatgagatttagaacaattcacaaagtatgaagattacattgattataaagaaaaaatggtaatgtatgaatcgaggagtgaaaccttggtggtaatgatgggaaaagaatacaagagtcttagattctgatgaatcagcattgtcaatgggagactcactataagttagtatggtaagtcataccaaagaattgttagtaaaattgagaatattcttaaggtgtgtatatttatggatatgtttggaaagattattatgatccctactaaaaaaagaatgggatgtcaagatcaaggtatgatctttgactaattattcttagttgaggaattgggaaaggaatacttccagtttagctataggtactcgatatgagtagtattgcttttatcatatgcgttgaatcagttaactttataaaattggttatgtgtaagtgattgagaaagtaacagttatgttagcttaaaaggaattgatataggatgaaataagttgagatgaacaagattcaagttgacattaagataggaactcctcaaggttaagtgaacaatactgataaggaattgtaagaggtctataaaagaataatggaaattagatttaattaacaaagagatgaaagtaggaaatacaattaggaacaacaatgacacatctaccttccgataacccacgataacttaccttggagttaagcatactcggagtaatctcaagatgggaaatgttttgggaagttatctcagaaagcgtacgagtgaggacaaagtacgctagaaagattcgtattaggatatagaagcagcagtcgttctagaaatcttcaagaggaagggatgtcctaataagtacagatttacaaggcatcaagatgaatatatgttagtagatggaagtaaggaaagctataattggatatctattagaaacaaacataaggcttgtcaataagttaaattagtacgtcaccaactattaagattatatcagattagaagattctataggaagaataaaaagacataattattgattatgtactgtgggatcttatgattttggccgagtagtagcggttggatataccgagttaatatgttgtctataagtgcagattatttatatagtaaatgaggatatggagttcaaatgaaggaatagtttaatcttgtgaaatcccaaagtttatatctttggttatgatattaagagttaaagaagattattgagaaccatgaggattaaagtaaaaatagtacaatgtttcattcttgatggatgggtaatcagagaggactaatagaatattagaaaacatgatgtgggcattgttgacagtgagaactcgtcaacaaagttagtggtcgaaaaaatgcaaagttatccaaaaatgtgataaagatcaagacaaagatgaaggtgaaaagatgtctaaatattcctctctctattcaatatttgagttacacaaaataattttacaaccccttctcacatttgagatgggggtatttatagggtctaatggccaaaagcacaaagtgctcccaaggggacaacgcatcgctttcaagttgtaggctgcaggtgctagagtttgccttgcaactcgtacttttgtcaggtcgcaagcctgtggtccctagctgtaggagggtgatcccgagttgaaagtgtgtggtccccaattacagcagggtgatcccaagctgcaggtgtgtggtccccaactataggtttgaggtccccacatgctagtcctaggtaagtgtccacagtgtacctttggttgggcctttagaccttccaggtctgttgtcgccgctactcatactcccttgcattcagatgcctcagaaggcatggtaatatgctttcccttgcatgccttgtccactgagttctcatccaacatcattcttgcctatatgccttcacatcatagcttatactcatatcccttcgagacacattaattcaatctcacacttggcacccttttcccacacacacataacttccccctctcgcacacacagcttgcatgggagcccccaatgggctcgcatgcaagcccccacgctcacagaccatgcaaacccctaccttgcacacattgctcgcatgcgagccccccatgggctcacatgttagcccccacgctcactcaccacgcgaccacccaccttgcacaaacggatcgcatgtgcctccacatttccattctacctttgcccgcttcaggctcagtttgccctgaagccctcacgggagctcgctcgcgggtcttccatgtacgcacacatgcatcttcacaggattcacggggtaactgttgtggtagtgcagacgtatcttgacattcagaatactgacttttagaaatatgccttgggaaagtatgctaacttggcacagttttgtgagtcttttttcccttaggtgaaaaatctcgaaaattaagaatcctaatttttggggttaacacttgccccagtctgctagaattcttttaagtgttctggtagactataggagtgggagagtttgtgttgctgtaaagtaattattgtccccttcacgcttatcgaggatttgtctactatatatagagggcttcctttgattgagttctcacttcaaatcactcccttggcatagtggcaatcctccttcctcttatctaggagttcctgagttcgatccttcctcaagtcatttctaatgctttttatttctattctttttgcatggatactttctttcctaaagttatactatgttggatgtcctttgcttttgctattagggtgaggctcaaattatctttactttgaccctggcaatagacgtcttcccactttgaggcaacctatccgttctctgcaacttcttttgcttcaagaggtatgttgcctccccttgttccttgtacttgtgttaactttactctatgggctcaggattctagcagtcatgacgtgcatgctaatcttacagtactagttgcattgtctgcatccctatcggggcgcatgtcctagtaaactcaacaccttaattttacctcatagatggagctatcaaggaaacacatcctctttgattcattttgtcctaagtcacgtccagtgttagctacttaaagcaatgtctccttctgccgaaatcattgacattttgtcctctaattcggaagatacttcacataatccattcacttgatatgctagactaatgtgtgagagggataacaactttgagcacatcatcgcctgtcaagagcgtgtcgagaggattcgagctaaaattctctcagtcttgaacgcagagcagcatgaactggttgccaatccttgtgtgtacctttctatacatagagcttctcttgtggaatcccaactccacttggattcccttgagggctctcttcctcccattcttgacattccttcatgctctatggctgctgaccctcctatgtgtaaggaatagtcagtttctttcgtcatcccccacttctgggggtgcctaggatcaagacacgagcttacaagaggtttgtagggaatagaaagcaagtgctgtgtgcttatcattgtttatatatgtctgcaggtatgtctcatctcaagtactcagcgacttccactgtgccccacaagtgtgcatcatcatacctatccaagcgacacatccctccgttacccccacagaagtagatttcgtgtatttagatatccgaagtactttacccgcagatggcatctgtaagataatggataccttcagggtgcgtgccacaaatgatctcattcttcgtagcgctgggtaggatgagtttgcttttgcccccatggagggggactcgcctttagtgggcacatcatggcggctggcaccactttgcccctccacccactttttatcgatgtcttggcatattttggtgtgaagctctccaactttcccccatggcttatgcgatcctatcgtgttttgttgttgccttcaaaggggtgaacggttgcttccccactgctgttgggatccactctatcttcaaaatccaccagacacataaatctccttgcacctatcacttctcaaagatcccctgcccaaaggtacatgtggtggccaggatgtcttcaaagatcttatttaagccttcggagctttttattatcgacgggaggcctactagtgtatccttcaggttcaaggttctgttggaaattattttaccaggatcttagatctactcgcaagtatgttgtttaacaccctaa

SEQ ID NO: 57844 - DNA, 714 bp, Cannabis sativa
tttgataaatattattatttatgtgggtataaataattagtgatatgtgtgatataataatgttgatatttatcattaattattatttattttgtataataatatgaataaatattattattattattattatagtatacgtatgatatatatcatagtgtacgtatatcacgtaactagaaggccgaatattatggaatgagaatcgttccacttttagttcaaatcaatctattttattcttgttagagatcgactcctatagtttagaagtcgtgcgaaaggaagaatagagagtgcgggtgatcaggagtaaaacaacgagtaagaattcgacgtactttttcgtttttcgggttggccacaatctgggtagattgggtgtttaggatttcttatttatgatttaagaaaggtattggatggtgtagaaaggaaaagagattactgtttcgggtttcaccattgttgaagcttcaaagatacgttcttgaaacgagcccaaatttgaatgtgtttaagttattttggaggtcaaaggaggttgtgtttaagtttatgggaccccaatgatcagttttgacgtgaagaaacagtgtaaagagctctgaaacaaaaaaatcacagttttggctccatatttggcggtgtatcgtgtttggagaagacaatctcaaaccggccatttcaagacgaaatatcagtggtatttgg

SEQ ID NO: 57845 - DNA, 1218 bp, Cannabis sativa
caaagttcattccaaaacttcgaagcttccacagtgtcccacgctcctttttctttctgcagcaggtgaaacgcactcttcaccgagtatataccactcaattcaaagtgccaagtaaaactatcaacagcagccacttgcagaatcgggacagcagtaattgctgcaatatcacggctgttgaacacatcttgaagcaactccatgtcccagctgcctgaaccaatttccattaaatttccaaccacaaccgagtctaaaactgggtgtgtggaagtgataaacggattctcttccaaggaaagccacggctcccccttaactgacacttgactatcaataccaatccgccaacgagctcccatcttgaccaccttttgagcttcaaaaatgctttgccaaatgaaactcggattatttccaatagaagctgaaagataggtaccattcgggtagtaccttgccttaaaaattcttgaaacaagcgaattgctattggtaagaagcctccatccttgttttcctaaaagagcaatattatgatccctcaaattgcgaaaactcaagcctccaacactcttatgctgacaaagcttctcctaagatctccaatgaatgccactctccttagagttggttgttttccaccaaaattttgccatacattgctccatttcatggctaatatctagtggtaacaagaacacactcatggcgtagctgggtaaagcttgagccaccgttttaattaagacttcttttcctgctttggacaagaatttggagtcccaattttgaactcttttacggaccttttcctttaagtaacccaggaccgcattcttatttcttcccattgtgcttggcaaaccaagatacatactattctcatcagcaactaccatttggagaaaagaaccgatactattacgaatagccaagttggtattagtgctataaaaaataaaagacttgccaaaatttacttgctggcccgaagcttgctcaaaaagagttagcaattcacgaacttttaaagcttcctccatggtggctttacaatagagataactatcatcggcgaacaacatatgagacacacgtggagcaccatttgcaactttacacctatgaagccaccctctcagttcatattttttaatcagagctgagaagcctttcgcacataaaataaaaatgtaaggtgaaagaggatca

SEQ ID NO: 57846 - DNA, 1595 bp, Cannabis sativa
  modified_base (1223)..(1239): a, c, t, g, unknown or other
tagaagaagtagcatagagtttgcatcctgttttgctcaagaaatctcggaaggactgctgccagaagaaagagcatatgtagtgtctaatcttagcagaatcatacacatggggtttgtgtacgagttcaaggatgattcagtggactacttgttagttagagagaatttgaagatgttgaatgaagacaacgagtttcttggttcgacattccttgctaccaaacagtatggtaaaagagcagcacgagtgaaatcagagaaaatgtctcccttcacaccttcatgcaagaagtcatgcaggaggttattgccttgagttgatcctcctggtatgaaaatgtcgttttttgaatgtgcctcttgttatgtttatatatcgtatctcactttttgatgtctcttatgggactttggcttttttatggcttgtaaatactccccaatagctaagcttctttgactctcgttgtgtaatctgagtcaatgtgttttgtaatattagattgccttgttctagttagactttttttgggtggcaatggcataattgcacattgactattttcagtgagcaagtcttctattctattctcccactaatacatattttgttttgttttttgattgatgattggtgattggatttaggcttaggcttgggattgaaatctggtttgggttatgtgtatgtattctctacagatgcaatgatgcatgatggggtgggaatatattaaatttagagggctaattatggtgactgactattgagtgtttgagaagggtagttgttagaaaattcaagcctaaagaaaagagtagtagagagagagagagttccttttgtcatttttggttatgttttgaggagtagtagagttgtatgattatatgtagaaaatgtagtcaagtcattttgtcaatttttgctatgtgttggagtgagatagaaaggtaaaagagtacagtcttagctaccacgtgtttgtctggttgcctaaataatgtaacgactcacctggtttactgctgtgccaatggctaaagctttttttaccatttctaggcgtaaataggtaaatttaactctcggttgcagataagtacttaagtttaatttttgacgataataataccgaagttatatttttaaaacttccgtaagtaatggctattaagtgttaaaattattattcacgtgtcatttttttattagtatnnnnnnnnnnnnnnnnnaataaaaaataaaaaattaatgaccttgactaatagagactgttacgtgaccattaacttgacacttaatgattagataccgaaatattaaacttaagtatttatcaacaactgaaagttaaatataagttttaatgccacaaattttttttttctctaatagggatttttgttaggttccacatccatgtttcatcattcattgattttactaaaacattcatcaatcacactataacgtatattcaatgtcatagtgagtgcaaaaatataataaattttacttttttttttttttctaatcttaatcaaaagcttctaaactatatgtatggagttatattcacaaactcatt

SEQ ID NO: 57847 - DNA, 1439 bp, Cannabis sativa
  modified_base (602)..(605): a, c, t, g, unknown or other
  modified_base (1045)..(1049): a, c, t, g, unknown or other
tagcttctggagcttaaattactatagatggctttttacatccttcttgaataaatcctccacccctagagtaaccaccatctctaatatgttatgagttggtgtagatataaggtttctaacacccctatcatctaacatatagttcactatcagaaatctttcttgattgtctcctaatgttccttgtttgattacatctttgatggcttccactcaacagtaggagtctggttaaattcgtacatagaagtacatttaacctcttactattggttcttagggacatcttgttgtgacatatcgtcttgtctgaaactataagttccttctagattaagtcatcaacatagcattctagtattaacagtaatgtaaaatacttgcttaagattaagtaatcattggagataccataaaacatttcatgaggactagggactttgcctatttcatgaggactagggactttgcctaagtcattcgaatagactttgcaaaattctcctattatatcctcaaatttgataagttatttctatcatatgaatggttagatttactttcccagttttatataaagttcctatcatgatcataannnngtaatctatcactagtgtcatccaaataaggatgggttagaattttaaaattctccaactcaaataaggtactgtgatactatgtccaagaactttgttggtatcaatttctattacaacaataacaagttaattggatcaaaatacaggatcaagaataagttctaataatttactaatttgttcattatactatatacatgtctaatcaaaatatgtgtgccatagagatactgtggtgtattgagtataatcttgagttcaaagaaaaatgtactgcatatatcaatagctccttccacccttaagtgttatagagatcttgtggagttatgaatatagtctagagttcaatagatatcaaagatcgttgaactgcatatattctttcttaacttcttccacccctatcagattaaaagatctttttattaaacaannnnntaataattgcttaagaattaacaattattcataaacattgattttaaactcaagtgtttgtgtggtatatctctttgcagagaacaatataccaagattttgcatcaataataaaacaaaaacacatacaaacatgataaacataaaatataattggtattggcacttacaagataaagtaaaatatgaagctcaattcataaatgtaattcataatgaaaatttcttaaagagaaaattttataaatattctcaaaaatatcataatgaattgtttgcaataatatgaaatagggaataaaatcccaaatcaataattgaaactaaatttttcgtaaactgaaacaactaaataaaaaaaaaaaaaagattcgagcttcatcttcactt

SEQ ID NO: 57848 - DNA, 2913 bp, Cannabis sativa
  modified_base (2873)..(2888): a, c, t, g, unknown or other
actaggaccatcaccaccatctttacccaactcatcaccatcaccagaatcagtttcaattttctctggatcaggtaatcctttgtcatctttctcatcatcatcatcatcatcagaatcttgggtaacaaattcatcagatgacttaacctagttgaaaacagtattgcaactgaaataaaataggaaaaaaaacaccaacaataaccagaaaaaaatatgaaacaaaaactatgaaaataaatacctgaacagaaggtcgatcataaatgacattaactttttcttgtgtattcttaataacagtcgtgacagacttgaaattaaggtcaacaaaacacctcaaagatataaaatcttcggccactgattcttgactggaaatgaccaattccaacttagattttaacatttctatgtcatctgaatcagattttctagaagatgaaccactctcaaatgtttgcttagttgtaccacgatcatcgatatattcttctaaaaataagtcatccaattgtaacttctgcctctcttcatcaaatggctgaatgttcttaacctttaactaaaaaaacagaaacaaaaatagaaaatgtaaaaccaaaaaaaataaaaataacaaagattaataaactgggacaaaacaaagataaaatagtaaagaaactgagaatcaccttgttcaatggcaaattaaaaatcttgcctttcaagtccctaaaagttggatttttggtcccaacctcattggtccaattcaaaattcttagaatcttggatgcaactcttttgcaaaaagtgtttaccatcgcaggacagcattcataaaaccagactatgaacacccaaggacagcccaacggtctgtaccaaccatcgtaggactgacctccctttccatttttttatttttcattttaataccatgctctattctgcctttgaaaaaatcaatagtcaactcaaatgactccctaccccaataatactcatcccatcgaccgcagtcaatgacatctaaatcaaacctaaaaacttcattatgagtagtattgctaagaaggaaacatttgatgaaatacaacacagccagtttcaatcttaggaattcatcctgtccccaccaactgccgaagaaagcgtcctctatagacttatgaccaatcatttttatgccagggaaatagacttcaattaactggtttgattcccgggaaaacaacagtttattgcaatccccaaaataatcaagaccagttatcaagtaaaactctttggcattgaaccgtatacaacgaccagcaacctcagcccaaaattctttaggattgggctagtaaacctcccttaaaagaaggttgtgaactagttgggggtgaaaagaaaattcagggatatctaagaaatgcccaaactacgtgtctcggaacatttttaacaaattcccagataatgtatttttaatattaacaataatagagaaattgctaatacatacgcacttggatctatagaaatcactgtgactgaatttgtttatccaatcttgcattttacaaagaaattaaatataatgaatgcgcatatgcaagttgcaaaactataatacaactacaaaacaactataaacaaaccaacaaacaggaaaaagtttaaaaaataataacagaaacatagatataaaaccaaacatagtacaaacaacaaaagaaacagaataaaaacataaaaaaaaaaaaaaaaagtagtagaacaaccgaattaaactccttcaatatcaacatccatgataattctaatttttacccactgatgatttataaatggacagcaaaccaactagttaaaaactatttcaatacaaacacacagagcaaggtgttaaaactataaaaaaaaaaagctatgaaaagactataaaaaaaatgaaaactgatcaaataaaaaaattgaaatgtaaaacaacaatacatctggaaaacagaaacatgaaagaaaaaaaacaacaataaatgtaacagaagttataactaaaaaatgaaaaataaaaaacacaataaaataacacatacattaaattaatataacagaagacctacaaaccaaaaaaaaacaaaagaattgctagaatgtaaaacctaaaataataaaatcaataaacacaaaacccacaaaagttgaatacgaaaaagtttcaaaaatagggggaaaccaaaaagaaaccgaaaacaaacttgtgatcgaagaggagcaccatcctaatcatttttttgagtaggagcataagaatttttttcaggggtagcaacttttgatttctttctaggaggagctcgctcacgttttgactactgaggagcaaagtcggagtcatcgtcttgaacaacaggacgttttctcttattcccattagctatagatttcaaactcattttaaaacgtttctttggcaagggaaaggagtggatgaagaacgagtaatagtcatatttataaatagattaaaagcaaaagaaagagagggaaaacggttatgtaaatcggttaatgtgagttgaaaaaaaatagaagattagaaagaagagggaaaacgggctgggatcgtggagggagacgagtttacctatggaggttttgtatttttaaaaaaagaaaactgaaaagaaattaaaaataataagaaaaagaagaaaaaaagagaaggaaatgatgtaaggtatgattgatagaagtcataaatcaatgacatgtacgcctgcatggaatgtgtgtgcaagtggtaaaattgtaataaaataaagttgaagagtaaaaatgttggtttaaccgtgtggtagttgttgggaataattttaccaggatcttagatnnnnnnnnnnnnnnnnttattaacatcctaaataagaactt

SEQ ID NO: 57849 - DNA, 1176 bp, Cannabis sativa
tatttataaattttactaagcaaagacaaatttgaaaagaaaaagaaaataaaaggtttatttgttatataagagactttgttaagtctaattaatagataagataaatggtaattttatttgaaagttatttataattattaaatagacaaaattaatttttataaacttaaaatagaaaaatgtaagtttaaataaaatggcaattttgaaacccacgagcttctaatatatagaattcagccatggggtaataaaaagccattttatatctctttttttattccattcaattctaactccaaccataagaaaatactataaatacctcaatagctctcactattctacacctctctcaatatgagattcacttctcttcacttgcctataagaattttcaaattcctctctctcttttctctctagtctacacgcatatatactcttatatataatgtatacagcttaggatgatcatagaattctagccagataaatgagacttgagagttattatattatagtatatacaaatatttttcctttgttattcttctctagttttttgtgagccacaatattgagaacttgcccagacatgtcaaggcaacacacaatcagtgtggaagactatgtagtctttcacatctcgaaggagattcgaggttatgttcctgattacactccacaacagaaaggaattaagggtgatagaacataatgaaatgagacatttaattccgctgcaatcagtgtaaggttttcttaaactttatgtgtttaatttgaattattttaagattccatgtttaggatgttagattagtaataatcaacatacttgtttagttaaagtaagatcctggttaaatatgctttctaacatatctctctttttatgtcatgtgtctctcgtccaaaaacacagataatattcaccccctaagctttcgagactctttgagctgcgggagcttgcagtcttacttcagatctttgaggtacattcatgatacgtggatgaatattgagagcactggcggatatttacatattgggaacatagttgcaagtaaattattaaaaatcaatgagaaatctaactgtagttggttgaatagagaaatgggtttgtgacagagatgtagaagattgtattgaagtgaaaaattc

SEQ ID NO: 57850 - DNA, 1290 bp, Cannabis sativa
cacctatacctgtacaaagcatttgttaaaaaaaaaacaaacatagttgcacgatgattataaacagaggatgaaattccttaaagataaaaaaagcacgtaaaaccgggattaaaagctgcccggtcagcctgttgtccaaaaaatgaaaaataattctaagtttaaagaccgcttggccggtcactttatcttaaaaaaaaggccttatggccggacaaataaaaaaaatgaagataaaaagagaagtgttcagactgctggagtcccaagctccttgtacgcgtcttcgaggttggtaggagatggaggatctgttgtctgggcagggggcatgtcaacattttgaccgaaagtagaagtggttgcctcaaactctccataggccacttggaaagcatagtactcgagatacatgtctttggcatcgcctaggtaatcaaaattcgcctgatgattagccttccaaaagtcgtaaaaaatctcgagaccagctgtctctaaggcatttaccttccctttcagcgtctctacttcagcattaatctcctcctccttgatcttcttctctgcttccaacctgcgaaagacagttcgaagaacctccctttcttgctgaaggctattcacttcttgggacaaggaggtcatggcagcttcaagttggtcagaagcctctaaatccttggtcagctcggccaccttcttctcggtagcaggaagctttttgttgacttcacccagttccattcggacgacttcaagttgaaccctggcttcatcagggtccttccttggccaagtccacttccgccctcatggtgttggacatggcaatgttcttggaggtagcagacttagcccgagaataagtgtaagccatcttcagacagtctgcacagagaaaaaatgttagaatctgagccaagtaaagaagggttaaagggaaatgtcaggaaagactcaccgtcataaactccttcaggactcctcccatcaacagctctagggaaggctcgttgtcagctccggccagttgctcattcacctcagggaccaaccgattcatgtagtgggtgagcatatcttcgccactcttggtctctggatgcattaatggaggtggggtagaagcccggatgtgctcagatccacttttggccagctcggatctgccctttggactacacagctttcgggtagaagggtccacaatggttagctcctcggaaagatcgacaactgcctcggcctgtgccttttcctagggtggtattgttgggttttatg

SEQ ID NO: 57851 - DNA, 609 bp, Cannabis sativa
tcataatttacttttactgatttctctactaaacaaactcagagcaaaaaaggatttttacttcaagtctgtcgtgagattcccaccaaaggcatccgaacagcttcgtctggacttcatttaggcttcaagcagtgagtaagttttcaatcttctcctcttttaacttttcatgttaaatttctgagtttctattgtagaaaatgccattattcctgacttgttgtagaagatagatagaaaatctaggctcaaaactttgtggttttctctgtaatagtctgtacggcttcatagtttacgacacttgcctttaatctcacattgtttgtctttcaccttgctcattcaaagcttcgtgaaatttaactcaaaacctaaaaatttcaaacttctgggttgtgacttgatttttgtacattttccgtccttttaatctattgagtactccagctcggcatattttcctgtttattgttcgatatcccggccaaacactcatctcgtgtgttgtcttttgtagatgaaccctggtgtgtttcgaggaggcgaacgccaaattgatcaggacttgcttcaacttctgtacgaggaccagcctcgtcttcg

SEQ ID NO: 57852 - DNA, 789 bp, Cannabis sativa
  modified_base (57)..(59): a, c, t, g, unknown or other
aaaattaaaaaaatcataaaaatgtttaaaatttcgtaaaactgtatttttgtaatnnnttttgttgtttttgtgtatttgtgaaattatcccaaatataaaaaccccaaaatattatctctatatcctcacaaggttacttctatatttttaccttttacattattccaattacactaatacctcttatacatgttatactaacttcacgcactatttatttttcctccttttttatcatttttttttagtttcatatcaatttttattgtacaacaaacagagttatttttttatgaaaaaaatacaagaaacttaattgatcaacaatattatataactatatacatatggatgtaatacatcactaataaaataataaaattataatgagcatataataggtaggacaatcaaagtttatacattaagaatatgttagagatcatattaagttatccaaaattaggaaaataagatttattacccttttactgataactaaaaattaactttcaactttgtagcgctgcacacttttcatggatcagtagttgttgtagttttctagtacacaataaatcttcgtacatgcacacttttcatatttttattattattatgatgagagattaaaatacaaacaaaacaaaatctaaaaaatagtagcgtttcatttcagttttcattgtagctttctatttaaaaaattttcctatgaacaaaactatttttgatccaaaaaaaaaaagaaaaaattcgtccatcttcctcaatcgccttcctcca

SEQ ID NO: 57853 - DNA, 1066 bp, Cannabis sativa
gctatataacaaataaagtctaaagattatatccatgatgaatgtatatgtataatattcatactctatacttatcgagcatctgccagctaacatatttcaacctttagctaaaatatttaacagtatatcctagtgagccatatcaaacaataaacgaagatcatctagcaagacaatttttttaagaaaaattgaatactacaaatacgaattagaataagaagtatttccattgacctgtttacattattttagaattggagtaaattattttaacttacgaaatactctttgttaatgttttttttttgggatatttttaaaaaaaaatttaattaaaaaaataattaaatgagagtaaaaatgatatttcataattttaaaaaagaaagggagtgacaatcccaccaacctcgggggactgctaatcttaattctcattcttaaattaatgtgagatccacatatttcatcctcattctttaacaaaattagagaagtaaacaaggtaatattctattatttaatcttattctttgatgccataagtaaccacaccaaaagtttttaaatcttggcaagaagagtgatgtggcgagtatgatcatgacatgtgtcacgagattacctgagactaatttataatatcctcttttttaaaagggtaattttgtaatttttttaaatgatatattgtagttatagtagacacacatcaagttttaaaaaaattatgaataattaacattgtcaaaatcaaggttcaaatggttagttacacatttatcttttctcaaggtttatgacaaaataaaatatatacaagcacaactatttaattaaaccataatttaatcttatgattattcaaaatttatatatacttttataattattatgtatcatttcatataaaaaaaaaattatacataatattttttattacataccaacaaaaatacaaaaaacatctttattggtagagtaaaagtgatacccactattttttttctcatactacttcattatttttctcacatatatattccttatttattttgca

SEQ ID NO: 57854 - DNA, 647 bp, Cannabis sativa
tgctaacaactcccactgcatgtccaatatctggtcttgtacaaaccatcacgttcatcaaactcacaatagttgaggcataaggaatcttagccatgaaatattgaccttcctctgtctcaggggactgacccttagataggcgaaaaatgacttgccaagggtgtactacctggcttggcatcacccttattaaatctctacaaaacacatttgatgtactctaactgagataactataaaattcttctattcttatctcttataatttgcattccaagaatcttctttgttggacccttcatgtcaaactcttttgacaattgttgcttcaatcttttgatatcatccatatctggacctgctactaacatatcatcaacataaagtgatatagttggacctatatcttttgaaatagcaacagtggtcagcattgcacttatagaagccttctttgaacataaaactgtcaaactttttgtaccattgccttggggcttgttttaagccatacaaaattttcttaagtttacataccatattcttcttcccattctttgagaaaccttccggttgatgcatgtatatctcctcatccaattctccatgaagaaatgaggtcttcacgtctaactgttcaagat

SEQ ID NO: 57855 - DNA, 1091 bp, Cannabis sativa
aaactctgtcctttcaattttttttccccaatttatttattttacagtttttatttttattaccatttctttaggtaaagccatctaatttctattaggagtttttgccggttaaattttcttaattattattttatttgtatttaaactcaaattttaaaagtaaaatcctccaaactattaaattggtagaaaatttaaagtgttatttagtttctatcgttagcggctaccattcattttaagctgacacttaattgaatgacaccttaaatttattatcagttcagtagtttgaaaaattttaccgttaaaatttgagtttaaaaaattaaatgcaagtaaagtcacaattaagaagaatttagcagcaaattcaaacaaaataaaactacaatttttttagtagaaaaggttccttttatagcatttttttttaaagaagcttttcattaattgaagcaatttttttggtagcttgttttttatggaaatttttgtgatggttgaagttgagtgtagtgtaatgtatattttccaaaataaaaaataaataagaaaagaagttggagtaatatacctcgaaaaatatttgtctttttccttataaataacctaataattgaaaaaatggtaagaaatccttacctaattctatgattttttttttcaattttattttctttccttgtaatataatgtataatgttatttgatgactatatagtatacatatgcatttttgaacaccaccactaaaaagagtactcaaaccactaccttcttatatatgaaactaatgttcatagtacttttctaacccaaaatacaattctcatttcttaggcttatatataaagtaaagggaattttgaaagatacttttctcttttttttaacagtttaaaatttttatttataaaaatacgtttataaaattttaaaattataaaaatttgttttgtttaaactcacgataactataaataaactataaaagaacaaaaaataaataaaaaaaacaactgcataacaattataatacaattataaataaattagaaaacaaaaaaaatattttattattttta

SEQ ID NO: 57856 - DNA, 3184 bp, Cannabis sativa
  modified_base (2912)..(2913): a, c, t, g, unknown or other
  modified_base (3056)..(3070): a, c, t, g, unknown or other
agttcgtaattcaaaagtatggtttgaaagttagttttacatttagagagttttgtgattcatattgagatgaactatgaaggccaagaaaaataataaacctctttttttgtattttttttatattgattatgttatactgtttattaaataatataatatggattataatattaaaatgtacaaataaatatagtatatagttttaaaaacattttatatgttatatagttattgtgaccaatgtaatataaagagaataaaaactagtaactgattaaaaataaaaactagtaataactaattttttcgtgagtaaaaatcttgtatattacaatttcatgagtgtaattaagagaattattgtacaattaatcaatttaggatctaaattatcaacatatagatattagaggagattattacactaatttaaattattaaaatgagataaaaaaaaaaacgttgaaagtaaaagaaggtcgaagaggagttacaaaactccaaaacttttgaaattaagccaagggacatgtcgcctagtcaggcccagcactgggcataggcgagctaggcctgtgcctagggtccacctaacccagggcccaaatttttttttttccttttaaaattatatatattttttactaactttgaaaaatactacatttttttctaacataagtgtccaaaaataaatttttttctgtagctcactttgtttgagagccggccttgcgcctagcaccaggtaacatggagctagagtttcatgtaaaattcctttaagacacggggttggtgagacttaatcctaacttcattctctaatatttatattctcatttacactcatttaaggactgataacaaccataggatgctgaaagttttaatcttgaaattacggttactaaacactattataggttcactttttgtgaaactagtttccatcaagcacattgttagaaactattttgtgataggcgaaaatatatttttggacaaaagtataaaattttattcaagtttggtaatactaattatcctcttatacatttgagatgtattggttgttgagattgttctcacacttcttctatttcttgctataaatctttgtgttttatttccctgtaacttttaatttggtattgtattttttttcctttactattaaactctatgtaacttttatttaaattagattggctattttatgaacaactctagctgccaccacctaaaatcatgatttttgcacgggtagtgttgttcataatgttctaccaatagttgattctttgctgaaacaaaatattaatgaagtagctatctgttctttatgttcaagtgattgggaaacaattggcctgttaggtcgtaaatatgctaagccagtttgggaacattcagatggaggctgtcttatatgactatttcaaaatcagatcttaaagctattaatttgcaccacatggactatccaaatgatttaataattaataatgagaatttgattttgattggcacaaccactaaggttctgggattttgagtggtaataagagatcattatgggaaaattatggctgctccatccaaaccaatgcaaagttattattatatatcttttttcttttaattaggttattaaatctcatgagatgtaagctaaagccatgtttcatggtcttaattgggcaatacacactcacaagcatctatttaacctatttatcaagttttcaggaccaaactaaatagaacaaaaattatatttgttttcgttccattaaaataaaacaaaaagctttcaatcccatcacattaacatccacaccaccctaacataacataaccaaaccttaaatctaaaattaccatcatttgtggactataacggcatgaaattacaattttaagatcattaacggaattttcttttctcaaatttaaaatactgtatgaacacattatatttaatttgtttacatcaacgaaattatttttaaaaaagtgaaggtatcatgtacggcacaactgatattcaaagagcgagaactctacactatctttattttttcattttaattttcaaaataaaaaaaagccggataagaatcaaagtacaaaaataaaacgacatcaatgcaaaaaaaaaagtgtaatttagagcacactaattgttatgatgcaaatgcataaagtaattcttagtttcttactagttccaaagacattttaactgggaaattaaaaatgaaaatataactgggcataaacgaaagatcattaaatttaaaagtgattttgaaaataaatggaaaagtgagagatgcatcagagtcatggaagttacaaggctgaacatggcttgtatttaaaaatatcaagcttctcataccacaaaatagtcatcgtcatttgcataacttctctccattattactacctataatataatagaaaatccaaaactattaataaattaacaaatatatgggatgaagagatgtaagaatagaatatcatataaatttttaaagcatgatgagtatttagaagagaaaaccagtcgacaatccctgacccaagctagggatttgagagccgactcggtcgagttttggaagtggaacgaagattaggttatcaatcttaacacttaaataagagacataacctggaatggatctcatatgaaacttataacaagcccaacattctaaataagcccaaattgttgttgggcctttagccctgaatatgaatgggagattttacacaatatactatggaaaatttacatggtatactaacttttattatttttttataaaaatactgctaagcggtaatttttacttttttattgtatttttttataagtttcatactacagtatnntgtgttaagttttcactgttgttctactggtgttttttagttgttctactattgtctgagttgttctgttttgtatgttactggtgttttataaaaatacagtatttttgaaaagaattttcgtgtgagtatttttgtaaaannnnnnnnnnnnnnnagtatttttgtaagttttcctatactatcttatcttaacatatattatttttaggctaattaagatttttttcccccgaactttgacatgtatcaaatcatgccccttgaactt

SEQ ID NO: 57857 - DNA, 944 bp, Cannabis sativa
tttatttgggctcttaaaatgagtgggtcctaggcgcgggcctagcctgtctatgcctagggcccgccttgggtaaatattgtgtttgatattgttagatagtcccatattgctaatgtgtggaaaaataacataatatataagaggaatgagctactcctcccattgtcaaataattttgaaatgtaaccccattcaacttatttaaaattataatatagtatcagagcaaaaaaaaaattacaaattattatatgttgatagtgtgtgcaatttaaatgtgttacaatcattagataattctaaatatttatgaaaattttgaaccaacaatacatatatgtttaattttgtagagtaattatctttataagtgcatctatattaggatgcatttttgttcggatgtctttatttttggcatttaaaaaagttaatatataatatatttttttaaaatttacttaaaatattatttttcgcaaaattttaatatttttacggtcaaataatttatttatatatttttacaagatttttttttttattttacagtttttttatttatttttaattacaatctttaagtgtcctatgaaataacatgaaataacatgaaaacaaatagaaaacaacatataaataataagaaaataacaatatgaaaaatatcaatagttcgtatgtaaaaaaaatacttatatataaatcgtaaatatatttaaaattttataaaaccgtatttttgtaattttgtatttattcttttaaatatttatgaaaacataatttatttatatgatgatatatattgtacttatattagatattctatcctgaattataaataatttacgatatgaaaaaataatgaattgtgtgtataaaaatataaggtaaatactattttaaaccttgtgttttgcaaaagttacaaattagac

SEQ ID NO: 57858 - DNA, 1757 bp, Cannabis sativa
cagtctcagcctcggtatagaaactaacgccatggtttcactacgattcccattttcgttttctcagtcctcaacctcaacccttccttcccctaactcaccaccctttcgtgcctccactctcgctgtcaccgtcgctgccacggccgccgtcgccaccattgctgccaccgcagccgcctcagcttccaccaaagacactggcgctactccaaacccaaaacacccttttctccaagaagcgctaaattttttcttcgctaatcgttcgttacctctttggggctcactctctctagccaactctgcggatccagtcgttcattctcggactggggtatcgttcccttccatcctagctgattctcggaaacttttgggaattgggttaaggcgaaagagcgttttggggttaaagaacatcgatgtttacgcatttggtatctgttaaatcttttctcattacgatcaaaattagcatatatatatttatataatatgatattgatgatgcttatgtgctgcatggaaaattgaaatgttggtttaaaacaattttgctttgcaattctgttttattttgtacattatagtaagctaaattgggataaaattactgatatgtttagtgatgctatgctcattactataaagtggagagaatagttgcttcatagttcatagtgtgaatttgtaaaacaatgggaatgggcagagtaacctgagatttgttttatgtgtattgtgaattgtttgtgatgaaaatgaaaatttaagtctttgttgagaatatttactatttagtctgtgcttgaattaattatgacacatgaggttaaggcaagtgatcaagctctttgctttttacagattgtagagtttagcataatgataagtatacatattatatgtataagttcagttttgcttataaacaggtgtttatgctgataataatgaggtgaagaaaatgttggggaagaagtacaagaaattgtctagttctgaaatcaaggaaagcaaagagtttactgatgatctcatagaaaatgatataagcatgactgttaggcttcaaataatgtacagcaaattgagcattcgatctgtacgaaatgcttttgaggaatcagtgggaagcagactgcaaaagtttgggggacctgataataaagaacttcttcaaaggtaaatctttattaaccacattcatggtatgaaaagaataataatatcataagccgacattttatgaaaaattggaatctttgaagagtctcaatcttgttaagttgcagttacagctgacaattgtttatacaagtcatgagtatcatttggtgtaagtttaacaacagcttaatacccaaaacaaattgcaggttcacttctcagttcaaagatgaatataagataccacgaggatctgtgatcgaactggcaagggaacggggctatgtacttcgaacgacaagtatgattccttaaacttccttatgcattagctccttcatttttagatggtttcatgatatgtgagaattttcaccctcaggaagtgatagctgtatacattttagaatgcgtacacgcaacaccaactcttaaaccaatgaccttttatgaatttgaagatatggtttcaggatataaagccttttctaattgattgaaaagattagaaaaagagaaatctatacaaaaaatggaaatttaatgtggatggggcctggagtatatccggagtttaaacacta

SEQ ID NO: 57859 - DNA, 1080 bp, Cannabis sativa
accaagtatcacaacatataatactattttatttatcactcaaatcaaagaagcatcattacatagtattaataactagaaaagtcataatatagggagtaaaacatatgttatatatatacactattataatagcaaattacattagccaaaaattataatcaacttaatagtagctaaaaatcagtttatattcaaatttatttttatttaaattataatcaacataccattcaagatcatagaaaaatctaataattgaaaaaataaccaaatcatatataagaaaaaaaattaaatgagtaaacagtaggaaaataaatattaaaaattcatatacacaaccaaacattatatttatcagaaaaataaggtcaagaaaaaaaaaagataaagacctgagtttatggtcaccaagaacaacgaactccaacacctgagaataatgaactccaatgcctggccgactgccaagatgcttacgaaatagaaaaatattgagctatagttctttccaacatagaaaaataaatgaaaagaattaaagaagagaagagaaaaaaaaagtcttgcaagttgtaaacttagaaggtgcggctggcgtgtggagagctgaatagtggtggttcctggtgcagatggctagcacagttgcagaactgaatggtggtggtggtgcggctagggtgggagaacattgctggagttggagcctggatgagtggatgggaggcacgacgatggggcagggagatgagtgtgagagtgactgagtaagagagaagagagctatggaggtctcagtttttttttttttttccaaaataaaagaaatggttgatagacagttgtgtttgaagttggagaaagaaaggagaaactagagagaggaaggatgatgttgttgtattaggtttagggtttgtattttagatgtaggtaatatatatattaaatatgttttttattattttagttgggctagtcgacccagtttgggttgattgggttgaaaaaccatcagcccaatgatcaacccattcagtgcgggttggtctcttttcaacccatgtgaggttc

SEQ ID NO: 57860 - DNA, 881 bp, Cannabis sativa
aaaaaaaaaaaaaagagagaaacaggggagaagagaaagaaaatgtattattgaaattaattgataacagatacaagaatttatatatagctgagatacaagagaactttggttgtaacaaactaaccaaccaataataataataataacggtaataactaacaaataaaacagtaaaaacctaacaacctctaataatattattggcaattgtatatatgcatatgagagagagttacgttgatgatgttggatggttttggtgatatatgatatcgaagattatataatggctttggctaaattggtttgttaggctcgtgcattgttaaaatacattagttgtaccacctaccttatgtgatctagatattttttttaataaatattaaattaaaaaatatataatatttttgtagcatttctcatttaatatacaattttaattaaaaaaattaagaggaagtcagtaaaggcctctctacattggatttggatttttgagtgagagtactctacaataaaggctaattaagatttttgtcccttgaactttgtcatgtaccaaatcatgcattctgaacctttaaggttgttaaaaatgtcccatgaactattgagattattaaatttaagcatttttgtctaatttcattcaattttactatttcagtgattgtttatatactaaaatatactttccagactttgatatctaccaaatcatgctcctcgaactttgtcatatactaaattatgtcccccggacttccattcatgttagactttttttactaaaattagaaaatagtccttaaatctaattatttcaatagtccagggagcatttttcacgatcttaaaaattcagggaacatgat

SEQ ID NO: 57861 - DNA, 1224 bp, Cannabis sativa
tgctaaaagttatactaaatttaacgcaagatataatattgtgccaaatttagcatacaataaatgtatcttttttaattacaattttatcattcattattaatgataaactttaacatatatttttgacttacaatgtttccataagctagtttttaaaatatataatttattgatgatcattagtaatattttaattttttgtcataacttatattttaaaatactattatgtaatagagcacaatatgtagcaaatataacatttatttatttagttgtttatcaaatttagcacaatatttagatcttgcatttaaaataatcttaccactaatgacacgtttattacgaactcagtattcagaattagaataaattaatagagaaatgtaacggaataaattaatagagaaatataacagaataaataaaaaataatcggaatcaatatttataatatgttgtttagtaaaagtgcttagaaatgaaatgatagtggtttatcttgtttacttcatcaagaaacgtaattgaaatgtttaaattgactaaattacccttttgagttaaattatagtatatggtagttatttagtaagacatgttttaaaggataaaattgtcattataaatttaatattaaaaaataaaataaaaataaataatatcttgagctattacataataactaaagacagctttccctccccacacgatttcaaaatctactccacctatgtgttcgattattttgtaaaaataaaagacataggccctctttatgtcttcaatcttttcggaacctaagtcttcgcctcaaacgacttcaacaacgagtattttttaaaattgaagataaattaggataaaaactgaagataaaggtttttttttctagtagtgtcacgctaaaagttatactaaatttaatgtaagatgtagtattgtgccaaatttagcacgcaataaatatatcttttttaactataattttatcattcatcattaataataaactttaacatatattttttttaattacaatatttccataaactattttctaaaatatataattttatggatgatcattagtaatattttaatttttgtcacaatttacattttaaaatgctattatgtaacggagcacaatatttagcaaatataacatttatttatttatttgtgtatcaaatttagtacaatatttagatcttg

SEQ ID NO: 57862 - DNA, 1040 bp, Cannabis sativa
ggaggcatttagaaaactaaaagaacacatggataaaccactgattctatcaaagccagttcacggagaagacttgttactatacttagctgtcttcaaaaacgctatcagcgcagccctagttcgggaagagaacaaagtccaacatccggtgtactacgttagcaagcgcatgataggggctgagatacggtatcctttgattgagatgttagtttcttgcctcctgatggcttcaaggaagttgagaccctacttccaggctcatcccattaaagtacttacaaaccatctacttcagcaagtcttacagaaacaggaagcgtcaggaagactcctcaaatgggccatagaattgagccagttcgacatacactacgtaccacgcatttccataaaaggacaggccttagcagacttcataacagagtgtaatgaggaagaagctagttcaagtgtgccagtgctgcggaccccaacatggaaggtattcattgatggagcgtcaaacgaaaatggatccgatgctgggatagcaatgatatcaccagatggacttcggctccaggcaaccctgcattttgcattcccagcttctaacaacgaagccgaatatgaagccctaattgcaagattgaagttggcaaaagccgtaggggccgtaagagtagaagtcttcagtgattcacaactggtggtcaatcaagtttcaggagaataccaaacgcatagagagaaaatggttgcgtacgtagctattatccgagaactgctccatgagttcacagagtacaaagtgaagagaattcccaaagagaagaacagtcacacaggctgtttggccaagttagcatcgaaaagtgagatagagagattggcggtagtacctgttgaacacctcgtggagccgagcatcagaatcaaagatgcggtggctgtaattgagcaatagccaagttggatggactccatcatcagatacataacgaaaggtgagttgcctcaggaaagggccatatccaggaggctacagtatcagg

SEQ ID NO: 57863 - DNA, 502 bp, Cannabis sativa
gtttaggagggatggagaatataacgaagggagagtatagtagttctcatctgtgttgtttagtattaaaggtgaagttgtaaggatagaaagaaaagtaattgttgaaattagatttcttttataagcttttgttaatttcttgaatccttccaccaatggagggattgaatttttaagaattggagggagaaggtctccctccatctctcctctcatttccactctcccatttgccaaacaagggatttatctcttttcatccctctccccccaccccttgcaatctatcctctctaccaaacagcctaaaggtttaggcaggagcctagtttcaaaaacaaaaaaaaagattatagctgttgaatgatacactattacaggagacaaagcttcctaaaatttctcaaatgttggaaggattgaacattggttaaagtttaggattcattatccaatttcctgatctattctcttaaatgggaaaatgaatccgaacaaa

SEQ ID NO: 57864 - DNA, 932 bp, Cannabis sativa
gtattctgtaactacgaaaaaattattttcagtatcagtttcattattccgtatttaattaatcacttaattaaataattaaactgagaatattaaaatacgaaatttcaggcaaatgctagttctttaatccaataccagtgatcaatattagaggatggggacaattcaatttggagaataagttctctatctctatcaatgaacaagtcactcaataaatccatatcccaatcatagacattatttttctgttttagatctttatgttgtataagcattgttaagtttttaatattttttactgtaatgtacatttaaaaaattgtgtgcttttttatctatataaaaaattgtatggtaattttttttttctttttagaattctttgaagttttctacataaatttatcatttcttttaataaacatgtatatacttttaaaaaaatcacacataaaattaaatttaaaattattttatactgattttattattcaattaatatttatataatatttacacatttaatataaatctataaaatgtaaaaaaaaaaaaaaaatctgattctaagtgattcgtaaattttatatttctaacatttacactgatgccaccatacttgaattactaactcaatttttattttatttaatatttttttaacaatttatgcttaaaactcaccatagaatgaaattaccaaaaacataatctgatgatatgattaggcagagaaatgaaattaaatgatatgatgatatgattacatttttacatatatatgtgcatatggtttagtcataaattcattgtttgctaaaaacagataaaaagatctaatgttctcaaaaataaacaaattgataacaacaagatacttattaaaaagtcaaaataaaaacaggttctttacaatttgaagttag

SEQ ID NO: 57865 - DNA, 1959 bp, Cannabis sativa
tcatatgttaagccttgtaaataggtgtatgggcgcctagatacaagttggtattatgtgatatgttatatgcttttcttactgagtccgtcgactcatagttctacttccaaaggaaatgcgaaagctgaacaagagtgagcactgagctgggatgaggttgtatatgtcatggcggggagacttagagtgttcggtctcgagatatctggggttgttattttgtagtcgatgtgcgatctgaatattgtatttcatatattttatataaaagtttagaaacgggatccagtacatgtaaatgattatgtaaagtttataaagtttaatatttaatataaaagttttaatttgacatgattatcgagaaaaaatttttattagcaaagattgcactgtaattgaaaaattcactgtagcgtgccttagctttagggcattacatatattttatcagtaacatatattcgagatcaattaccagtaaatgatgtactaactatgttgacgatacatagtcaaaattaataattaataataatcaataacatcatgttatactcgaaatttagctatgtaccagaagttgacacatgtcctacataaggaatgtgaatcaactcaaagaatataataatgatatggtatcatcaaatgtaatttaaataactcgttacaattaaatgcaagtttgatagaaaatattcaaactcgtcgactgcttagtcttacgcaagataagaataataaatattaaactggtattgatgagacatatatctgcctcaggataaactcagataaatatgcaacaaaagaatattctcccgcacgagcagaataaaagtagcaacactcaaccgcctcgcattacacatagcgtgatgatcacctcgcatcactaatacaaatgaaaggatataacgagatgaattatttccttccaacacttagtattttttttttttctattaagatggacaagaaggagaactcatgtctgacgagatacaaccttcgtagtcagcataactatctagtgaataaaaataaagagtggtcgggtagttattagatattatcccatgtgtaaataaatgaaacgtgaagaatgtccgcatttcattaacagttataaatgaatcaatcccaaaaagaataattgccaacctatattcctataaatagggatagaatccatgagaagagggacgataaatttaagagagaaaatcttattattcaaatattaatattgtactctgtatctcagaaaatatccctaataataaggactcgtagagtatgtagattttaactacaaaactgcgtaaaatatctggtgtcatttatcatttattacttatttatttctatagtgtatttattgcaaaaaaaggctattaatttggttaacaaaaatctgcattaacaatttggtgctttcattgagagcattggtgataaaagctaaaaaaaaatccctcctcataaacacaatctacccatattaaatggctgataacaatcaacacgacggtaatcatcttggggaaacaacccgacgtcctggcaaagaacctatgggatctcaaatacccaacacatctgaaacaccacgttcaaggaggaaggtaatttcaatgttgatggtgatcaaatcccagaaaagaggaatgaggatgcctatgatcctaccagatacgtaccattggtaaaattagagaacatgcaactttgacagtgattggttgaatcaaactgacaaaatgctgagttggagagagaagtcgcagcagctaaggctacacaggggacagttcctcaaaaccaacctgatcctactataaagagactgggaggaagacctcaaggctcaagaagggaaccaagggaatcccccaaatacccaagaggaacaacttgggaatacagttaatggtattgtcctcattagtt

SEQ ID NO: 57866 - DNA, 2146 bp, Cannabis sativa
tatatacaactgacatttgcaaaaacacggtttttcactaagtatttgatgttgccttctggactgccaataccaagggcatttctaatctcagatttcatcaacgtttttaccttccccccttgtaatttgaaagtcagattctctagaataaaattgaaatttgcatccttgtgtcttgactaaaataaagggagacctaagtatttaatgttgccttttggactgccaataccaatggcatttctaatctcaaacttcatgctctcggatgtattcttgctaaagaagatggaggttttaagtttattgacatgttgccccgaccaatcacaaaaattaccaagacaattccacattcccatagcttcccccacagtagccttcccaaccaagataagatcatccgcaaagaatatatgagaaatactagggccactccgactaattttaatacccttgatctcactctttttcacagactcctcaaatagtctaaataaaatttctacaacctagatgaaaagatacggggagagagggtccccttgtcccagaccataagagggtctaatcctgccaactagacccccattcagacaaacattgagagtagtagtagagatgcattaatcaacccattgacaaaatctatccaggaccccaaaacaccctaagacatgatcaagaaactgccagctaagcttgtcataggctttcataagatcaatattgattgcaaagaaaccctctctaccctttttcctattgaaagagtggatgatttcctagactataacattgttgtcttatatatcccttccgggaacgaaggcaacttgagtgggacaaataattttaggcaagataggcttaattctatttgcaacgatcttggaaataactttgtaagaaacattgcagagaaaaataggcctaaaatagtgtgtcctttttgggtttcaagttttttgggatgagaactaagttagtagcattgatcccaaggtgcatagtgttagtgtgaaaaaaatctttaatcatttcacaaaaattaccacccacaatttgccagtagtgcttaaaaaagagaacagacataccgtccgggccaggggctttattgatacccatgctaaaaagagttttacgaatttcttttgagttcgggagtctaagaagctcctcctgatctacttgtgaaatgaaatcatgaattaggtgggcacaattcagcctttgcccatggtggctatcttggaatatccacttgaagaactccacgaattccttaccaatttgattcctggaatgaagccagtttccatttttgtccaagatactttcgataacattccgtcgtcttttgaaagtagcagcaagaaataaaatttttgaacatttatccccctctttaacctacgagattcggggcccattgtttccaataaagagttttccttttcaacgccaaacaaatctcgtgttccacttcccaatctccggtccccgtagagagtttttgcatcttttccagtttaatttcaagatctttaataagcgtgtcaactttcccatactgaagcttattccactagatgagggcgacccgagtagctcctattttattaagcaatctggctggggcccaagaaaatataaccgagtcccacacatgagctaccaccaggttacttctttcatcctgagtccaaacctctacgaatttgaaactcttcttgaacttggcataaatacctccaaaatataagtagagaggtctatgatccgagttactagtaagaaaagatcaaaggactgctttggggaagagtaagttccatctctcattaacaaggcccctatcaagggcagattttacatgggccagatccggtcgattattatcccaagttaatttatccccttgaattggcaaattaataagacccagagaatcaaccaacttcgaaatgatagggataaaaaagtctttccctttagaaccttccctctcaaatttattgagcacaaaatgatattaagatgcaatcgtagatataccaactattgttctaactgacatgtcatacatcttagggttgaacatttagacccgcaaacccgaaaaacccgaccacccgcc

SEQ ID NO: 57867 - DNA, 1176 bp, Cannabis sativa
  modified_base (504)..(512): a, c, t, g, unknown or other
tgagcctatatatttacttttgggcttagatgcatataggaagctcatttatttctagatatttaaatgaactaggttgctagaataaaatattactttttattgttttatttaggcctaattagtattgggcttattaaatgaataacaattatttaatgaaaggttaaatttctcttctttgggccttgtgtgagagttagggggccagtagtagtgggtatgttaggttatattttagtattaattttagattaattttagtatatttttaatttagtttaaaccgcgtttggagcattttcacacttgttatcttttatttttgtagatttagaatagaataagattagaaaatatcaaaggaataagatgaaaaagacaaaaaaaaaaaaaaaatctcacaaaaagaagaatatataaagctgaaactttaaggctgaagtcgactatcttttgattagattttgaaaaaagttaaaacatgaaagttctagatctctnnnnnnnnnttccggaacatcttgaatcgtccaattccgagcaacaacaagagagttatggccaaaatactatcagtcgatgcagcagaaaaatcaccatcgaaacgaagccatctcgtgaaactccaacacgagccgcggcccgcccccctaaactgcagaaaaatcatctttttctcaacgtgggctttggtggttttctaattggaataggcatttaacatgtgcatttttatatatttttagtccctaaaagcctatataaagggtgaactggagttgatttggggaagcatttcaaagggaaaaaaaagcaaacaaaggagtacaaatttcagataccaaagtcaatactggaggcattcttcaaagggttttcagcattcttttcttctctattttcttctcttttcttaaagtaatatgtgtgatttgctttcataaacatgagtagctaaacacttaattagggttagatggatattgtttgatattgctttatggtattaatatgatttcttttccctccaatttctatgtattctatttcactcgtgcttaattacttttaactacctgatcaccaattaactgtctatgattttgatgcgagatctgagaagtaagtgtcaattatgttatagtgaatcagaactgaatttcgatataggac

SEQ ID NO: 57868 - DNA, 1170 bp, Cannabis sativa
tgttgtagggcagtagtgttattgtttgccacgataatgtcatccacgtatatgagtaatccaaggaatgtgtcatgtgattgttttatgaataaagagttgtcattcttggattgagtgaagccttggttgagtagggtggtcctttgcttggcataccattgccaagatgattgtttgagcacgtatatgcttttttcgcaatttgcagattgcatttttaggaattgggcctttaggtttgtaaccttgtggtaatttcatatagatttcttcatagagatcaccatgaaggaaagcgttgttgatgtccatatggtgtagatgccattgtttcattgcagcaagagcaagaagtaatttcagtgttttaaattttgctacaggagcataagtttcaaaatagtcgacaccttgtttttgagtgtagcctttggctactaatcgtgctttgcatctttcaaccgaaccatctggatttagtttgattcaatagacccacttgttgctaattgtgtgttggccagggggaagaggaacaactatccatgtttcatttgattcaacagcatcaaattctgtgtccatagtcgtgttccatactttttctttgcaagcctgtgcaaaggaagtaggttcagtgattttggaaatagcaagagcagcaactcagaattgtggggagaatttcttgtaagaaagaaactttgttataggataggttgtgctggatggggcacaattgtaatcctgtagatatgcaggtgttgtaatttttctgcctgatttggttgctggcagattacagactgctggggttcgatagatgtcgcctatagtataggacaggattataaatcgtcgggaatgtaagaaaaaaaaaagaaaaaaatacagatttttctgccattaatggtagaaaaatctgtattttctcccatttttttcctgtattagttttataattttacctaaattaaaataaaacaactaactaattttgttacaataacaactaactttaaacacgcattaaatttatacaataacaaaataaatatatataataaataaaaaagaatataaataaataaatgtatttatatcgaccttggagagagagaaagagagagagggagacgacaagaggtggtggtggtgcgacgtatg

SEQ ID NO: 57869 - DNA, 733 bp, Cannabis sativa
gaaacttgtcttttgcaaaagttatcgactggtcttccgttttgttacataacactgtattttttaaaatagtgcaaataagactctgagctcaattttcgataatttttttaatataaccaacttgaagacaattcctagcatgaagagatggagaaaatatatacaattttatcataacaactcttaaatattaggttattattaaattttattttaataaaaaatcaatttaggatcatacttgtaccattttggaaaataaaaggtctgttatatcatttaataaaacagagagtccaatcggcaacatttgcaaaatacaaggtccaaaataatatttatccttataaaaatcgttacaaatgtccccttgcaactgcattcttagaggtattgtttgtatgtttaaagccaatatattgtattttaagtagcttaaagttgttaaataagcttttctgttataattatacctataactcatagtcacataagctaattattgtaaaattaaaataagtagaatgtaactagatggaatatttttaacaatttgcatagttggaaagaatttttgcaataggaaaaaatttaaaggaaaactttacaaaatcataattcagagtgtaattaagaattaaatctcacattatatttaatacttatcatgaaaaattgataattaaatgcaaaatataatgtcaccataaaataatatttgagaccaata

SEQ ID NO: 57870 - DNA, 2103 bp, Cannabis sativa
  modified_base (1472)..(1478): a, c, t, g, unknown or other
aaattaagtattcccaaacataattgacttgttctgaaaaagagatcagtccaaatagattgattcgttttggtttcaaccttttttatggttgtgcctttagtattaggtgcattcatgatgtgatcattctagtgtgtatcatgtttggttgtctcctatagtcacaaatgtaattagagatataaaaagaaatatttgtggtagatttattttcttaaacacaaaaagaattaggatatagtctaggtgggaatttacattgtaattaaatgattggtgtttgtaatggtttttgtgcatattacaattttgtgctgatctactacttgtgtctaaacaaccttctcagtggttgagcccaaataatcatctttacatctgtaatcccattacgaggctatggcgacgccttcccacccctcctcagggcctccttaaccaatttaggtgtggattggtgtgcagcggcaattacaggtacaaagtagcagtcttgccaaatagagaccttccagtgtggactatgttttgttcagagacaggggaatggagtgaaccagtagtcactcggcctctgcctccgctcacgagacaggctcattttagaggacaaatattgtatcgcaaccaagatgttgattggcatgggaggatgcactggctagaaagtgaggatattatgcattgccaaggcatggttgttttcaatctctttatacaaattcaattgagatggcagtttgtttgtctgcctgttgaaactaatttgacattaccctttgcatccatgcattatttttgccttggaacgagccaggggaggcttctgctgtctcagatttataaagtcaaccattgttttgttttgaaagtttgggaattgaaggactacaagggtgattctgattcgtggtctttggtgcacaatgtcaagttagagattaaagcgaaactggtatttgttttggctttacatacaaacgatattagtgttgttttcttgtggtgtgatgaacaagttagtagataccatttgttggaaaaccaagatgatagaattgccaaaattccacaaattatcacaaggaatgattctacattcttatatttcaaccctattccccattgttcttggccatttacattataagtactactatttatttatttatttatttaaggctatttaatgaataacgatattcagctctttacctatttgtgtgcatttgtggctgtcatgacatagaaaatccctatttgacaactagaaatgcttaacactttctttttatttacaagttagaacttgttcaaaatttgaataggtaaataccaaaactaaaagaacattgcttttgttgttactatattatcaactgtcttttactttgtctgtttcacaatcacaactgaagtaccacaggtggcccattctaattcagctgctctctctctctctctctctnnnnnnntctctctctctctctctctgtgctgtttttctttagtttcttggcctgaatttctactttaaacattgctgcactcttttctgatgagtggcagtagtagctgatcacttagctaggttggttggaagatactataaatgtaaagaaacaaagatttcgaacataaacataattaataatttaggctctccccttgaagatctaagaggaaaacaggattttccgactgaggtgattatttggaacttttatatgtttctcttttgttttttattgaattttgaaacattcccttcttaaagtttgctaacaaagaaagacagctacggtccacggaggttgatcagtgtgttgagcaataaaaattacctctatgcccatcacgggcaaatacatatatacaaatattcgaaagaaagatgattatcaaggacaaatacacctaaacaaaaactgcatgataagaatgctttatttgagcatgagcattaacacaaacaataaagtggaataaattgctaaaagaattaaagtgcatgaaaagtgttcaatctttctctttcaaaaccagtccaaaacgtgtttcgaatttagaaaccttgtaacagatgattatcaaagttag

SEQ ID NO: 57871 - DNA, 1069 bp, Cannabis sativa
  modified_base (35)..(35): a, c, t, g, unknown or other
aaaaaaaaaaaaaatcttattaaagttttaacatnataacatatatactaatcatcaagtcataatatggaattgtctctaaaaaaataatgcagtgtatacatatatttattcttatataaaaaataaaataaaaattgtaaaaattggtaattttataatatatattatggtgcggtttgaatcacaattattaaatttaaaaccgcaaatcgcaccacactgcgcggtttgaaaaaaatgcaaatcgcaaccgcaccgcaaagaatttcaaaccacattttttatgcagtccaatgcaatgcaggcgatttgtacaatataagcagtttgatgaacacccctaagtagaactagggaaaagaaaaagcggttatattaattttttaaatttttatataaaaaaaattaatttttaattacaaatgaaattttaagtgttataatttttttttccttttttaagaatatgttatatatttatgtaaaatctgttatatgtgattattacaaacattaattataataaaataaaaataaaagtgagataaaattatcaattaatatatataaaggataagtataaggcggtgacataacgctctaaaatctcttcaaatacattgttaacggtttgaacttgtaaataatataattagattttctaactaacacttagacaaagaacttaaaagaaaactcaactcaaagaacgtttagaaaatttggaataaggatcatatatctttccaagtgttactgtttcattgctctaagaaaattcaaaaaattctccccctacaataaacttaagggttctatttatagtgagtaggggtgtacgtcggtcggtttagtcgggttatagcatatttttatcaatccaatataaatatcgggttgcaaatatttaatcgtaacccgcccaatcaaaaattagaaaaagttcaacccgcccaatgatttcgtcgatttggtcgggttaacccgtccaaaccgttgttcactttatttatataactgttattgttagtttctactattcaaataattagattttttaaaaaat

SEQ ID NO: 57872 - DNA, 1230 bp, Cannabis sativa
atcacttaggcatcataaagtacaggccctagaaattttttcacttacccaaggtctaggttgatgtcacatgtcaacttgggcgatgagatgtcaacttgggcactgaaatgttatcttgggcgctttatgtcaacttgggcgctttatgtcaacttgggcgctcaacccagaacaagcttaagtaaaatagtcataactcactcaatattgatccaattaacacgattaaacttgagtgtcaaagctatttcaatgccctataatatcatgcctcacactcaatcacaattctaaagttatagacctcaaatttcactcccaagtgagttacaaaaaataacctccaacttacacgaagcgggtcccgccgttgtgatctgagctcagaaaattgactataaaccttagaagttaattttgactgttagatcataatctactgtaaaaattagcccatttagattttttcatattttcaaagacctccttcacaaatagaaggagagcttctctggttcatttttcatatacagaatactacccacaagatcagagcatctctctctagaaattagagttgaaacacttgactatttttcattaataccatctcatgagatataaaaactcgaaattgatgtagcttcattactgtagcgatatagggagtgactactataaatttttgtgtctctctttatttatacttaacaaatatctcattctcgccaaccaggcgagggagtgtggcttggaaatctttgtccaaatttcacagtcaataatgacttacaattacactttctcggatgatgcttcttacattggggacagtattgataagtatagtgatcttcaaggccactctgacttggtttcctacgaaagatcttcttttgacttgagcccgcaaatgtaaatagagcttttctcttctgattatccaaggaaccaacaccacttctggcaagattgaaagtaaggggacgagtgaccccactaacaaccaaagtccctcgggactcttgagtaatctctgtagcactctcaatttgagaagcattcatcacatcttgatcttctaaaataacagatggtctttgcatccaaaatctcccatataatggtcccatttggtaactagcaataaactattttgctgccaactcttgagctatagtaattggtacatgaggtgaaggcacacatccatgtggcctcaactct

SEQ ID NO: 57873 - DNA, 1180 bp, Cannabis sativa
  modified_base (849)..(853): a, c, t, g, unknown or other
taagagattaaataattatttatcttattataattaatttattttaaatatttatattttttaatatgtaataaataagtaaatattattatagtataaaaaaattatattatagtcttttaatcaaaattgttttttctaaaagttaggttggagcagctttaacttttagctatagcttttctaaaaattattcaaaaagctattttttgactgcttaccaaacatatttttatcacagctttttcaaaaaagcagcttttagttttttcaaaagctgtaccaaacgggcccttagaaaagacataacagtaagtttatgatatctttttccactgttcaaatatcgattcaattctgatgtatagctgatacatctgatacaagtttacttatctaacgccatggaaaagatattccacttttacaagtgtaagtaaaccacattgttgattattgttgagaatcatgaggttctattttaaaaccaattgacaatgggaggagtagcccattcttatatctcacaatttatttccacacattagcaatgtgagactatctcttaagagacctttaagagaccacatgaccgaacgtaacatttgaaagaatcccataaggccaaatatcaagaaatttgtgggtgtacacgtcgagaaatttgtgaattttaaaacaggtaaaagacccaacactaaaaactggcgcattagctgaaaggtcccaaatggaggctaacggggagacatcggaagtatctgtttggattggcagcactttggctcacaacggatcacaaatggctttttgaatcggtggcaatttgggctcacaacggatcacaannnnntctgataccatgttgagaatcatgatgttccatctcaaaaccaattggcaatgggaggagtagcccattcatcttatatatgatcacaatttatttccacacattagcaatgtaggactaactcttaataattatcacatgagtgtaaatccagtgcactgataaattttgagactaaatagtttgaagtatatactcataattattttccactgtgtagtcacactaattataaaaataatcatgaaaattatatgttcgagattcaatataatttataggctaattaagatttttgccccctgaactttgacatgtacccaatca

SEQ ID NO: 57874 - DNA, 1131 bp, Cannabis sativa
atccctccagaactcgggagtttggcaaagttgaaaattttgagtctagagtccaatagattgattgggccaattccaactcaattgggaaatcttaaacttttataccagcttaatctcagcaataataatctgacaggggtaatccctacgagtctatcaaacttgagtgggctagagcatcttgatttgtcgacaaacaatttagcaggtgaaataccagataggttaggtaattgtgaaagattgttgagcttaaacctcagtcacaatatgttatctagtgaaataccaccagagcttggaaatttggtatctttgcgttctgtattggatcttagaatttacttgttggagagataccctcaagcctgtcgaagcttacaatgctagagatgctcaacatctctcataaccacctctcaggtagtattccacaatcattttccaacctaataagcataagtcacattgatttttcttacaacaacctaaggggtccaatcccgattggagccattttccaaaatgcttcaaaaagtgtttatgatggaaatcttggattgtgtggaaaagctacaggacttgagccttgcagaaggcatagaaacaaaataagcaatggtcttattttggtcattggtcttgtttgtggtctagtactattttctattgtccttataatcactctcatattgtgtcataaattcaaagtgtttgataagcacaaaaaagattccaacaaaaatgacacgcatcaatcattgatatgggagaaggaagcaaaattcacatttggagaaattgtagaggcaactgaagactttgacgacaagtactgcattggaaaaggaggctttggcaccgtttacaaggctatattaagatcacaagagctagttcttgcggttaagcggttgcacatgtcagattcgagtgacattccagaagttagtcgcacaagtttccagaatgagattcgagctctgactgaagtccgacatcgaaacatcgtaaaactttacgggttctgttccagaaacaatggtttgtatttggtgtataagtatgcaaacaagggtagtcttgctaaagtattatatgactcaacagatcttgattgggattcaa

SEQ ID NO: 57875 - DNA, 954 bp, Cannabis sativa
agtgtgcaaacactttgaaaaagaataagaaaattctgagaatgttgctctaaattctaatatgactgatgtgttatgtgattcacaggtgagagaaagattggtatgtttgaataataccattgaaaaagaagattctgactaagatgattctgaaatctttgaataatctcttggtgaatcatacaaggtcatgtatgaaaaatggatacaagttacttctgaaaatagagtcttgactaaagtgaaaaaaaaactgtgtcatcaaattgaaacttttgaattaaaaataaaagattatgagattgattttttcattaaagatgaaaaaaaattactcttttaaaaaagaaacttgaaagtctcaagaaaaatgtccaaatgcttaatcttggatcgtctatttttgaagaagttcagaatgcaggtcaaagaggctttgctggtattggatcgaatggtattagaagtactggaatcacgaaatttgtaaaatctagtgttccaacaaactttcctggtgttgcagaattgaagattgccacaacagattcaaaacctatttttgcaaaagttgtatctacaaaagcaaagtctccaagaattacaaaaagagtaagatttcagataaggagatttgttcctatttttcatttctgtggtagaaagggacatattagacctaaatatttcaacatgcagaatgtgtacaaaataaattaatatattcacattaagtccatcgaaatatttcagataaggagatttgttcctatttttcatatcgtcggtagtgatcataaggtcgtacttgatcttcacattaagtccatcgaaatattttccttcttactgaaatcggttggcagaaatcccgtggttaacctcgccaaccggttgaactgagtaatatattccgtcatgctcatattctctcgctgggtcaggggagcg

SEQ ID NO: 57876 - DNA, 1517 bp, Cannabis sativa
cacacatcacatgtgtgccaccagatctagctttctatctttctctaacaatgcttttcctcaattcgttgtgttacctaatggaattaatgtacctgtcgaaggcattcgaactatccaaataaacaaacacattattcttcacaatattttgtttgttctcacatttcacatacacctcttttcaatcaatgcattccttgaaaacaattttaatatagttgtgttttcccataattcttgttcaatataggctctttctccgagcatggtgattgggacagctaaaagactcaggaaattctatgttctacatcaagagttcagccctatagttcagtctagttgttctttttctttacataaaataatgtagaccaatggcatacacgccttcgccatccttcaatgcatgtctctaatacattcaataaaaaaatcaattttagtttttccattccagcaaatcaatattgtctgtttgccatcctgcaaaacaaagaaaatcactattcatatccaataataattttgctaaaaatgcctttgatctaatctatttggacatttggagacccttccatgtcactagcatagaaggatatatgtattttctcactattgtggatgatgcatcttgattcatttggacatatgcttaagactaaagttgatgtccacaatgtcattcccatgttttacaacatggtttgcacacaatactctacaccaattaaatccatttgatcttacaatgctaaggaacttgccatgttagcattctatgcctctaagggtataactcactatcattcgtgtgttgaacgtccacaacaaaattctattgtcgaacaaacataccaacacatacttaacattggaagaaccttatgctttcagtcacatttacctcttgtatattgggcatacctaattaccactgccacctacttgatgaatagaacaccttctgctctatttcatggcagcacatcttatgaaaaactacacttaaaacccccaattatgaccatctcaggagcttcaagtgtcttgcatatgcctctacatttacatctactaggcataaattttccccaagaagtcgtgcatcaatctttattggatatccacatgggatgaaggcttacacccttcttgacaattgaacaaaacaaatatatcattcctgagatgtcatttccatgaacatatctttccttttcttggccaaggttcaagcaatgacataaatctgcttttccagctgcattgcatacctgcccacaatcacattactacgaatttacacaccaacaccacacagggaacacaatctcaacttcccacacttcctgaacccacacaagcagctctagttgagcctcactcaacaacaaatggcactactttcacactagatgcacctactacaactagtgttgttcccacaccaactgcaacaattcaaatacactccaaaatagctactgatgttcacgcaccaactacatatt

SEQ ID NO: 57877 - DNA, 783 bp, Cannabis sativa
agagagagaaaacgaaattaatagagagattggacatgtacatggggtcctactttaataaataatatctaaattatatatatatataaatataatgatatatagaataatttatataaaagaatcatcttaattatccaattgttttggcattataatattgagaggaagaaagggttacaacatatatattaaacactagtgttggtataattattaatttgatcacatacaaagttgaatttctttgtttttcattgttatcatgacctttttagttatggctatggataatacactatactttaattgattttttagaggagttttatttattacacttcacaaaattataagtacacatgttttaaaaaaaattaattaatttgaaaaaataactcttaattaattttctttttctaaaattatttttcatatcattactgtatcaatttcattaattacgtacttatatatattttttataataatttagattttgttattataaaaaatttaataatttttttattataattcttttaaagctaattaagattttttttctcccgaactttgacatgtaccaaatcatgcactttgaattttttttgccattaaaaattcttcttgaactatttagattgttagatttaaggagttttgtctaattttagaaaagaaagaaaaaatctaacatgaatgaaagttcaaaggtcatgatttaatacatatcaaagcttgaggggcatgatttggtagatatcaaaagatcggaagagc

SEQ ID NO: 57878 - DNA, 2024 bp, Cannabis sativa
aaatatttaaaattccgtgaacttgtatttttgtaatttttttgttgtttttatatttttgtgaaataattccataaaaaaataagaaatattttctaatagtatttttcataataaatgaaaatagtgattatattgtgttattttcccttaaaatattacaatcaaattttatacaataataacaagagaataacatacttcaagccaaggactaatgttgtcgataaggataaattttggatatcgataacaaacttgtctttaatattaatatataatatttttttttagcttcatatataagttaatgataggtttgcctactatataaatgtttcattattgatttctgatataactagctttaacttttacgatgttcaattatgttaatttaatttaatcaattcaaaattgcaatatttaatgtttaaaaaaaataaataaataacttccagacttcaagtattggatatatatattgatatgtgatacataatcagacacaaaaattttaaaaataaaataaattatgtctaaacaaagtgtgtactacttaggttagtacttttcacaaaattaatttgttaggttaattaagagataaatccatgcatgcacattataatgtcatgattggctgaactttatatggtaattgattaattttttataacttaactataacaacattcttataattagataaagaaaatgaaaaaaaaaaattataacaatatcacttatattgatcatcaatatatctggacaagggaaggtttggattattggggtacaatcaatgaggtaactgaccagaaaaataattaagagtgacaaaataacaatactagaaggaaacagttatatgttagtgaatacatacatgatgttgagactataatagctatcttgcatattgcaccaatgtatatttatgtatcattattttatattgacagagagatttgaacttcagatctctcataatatatcatcatcttttattacatatatctataagtatgtgctctactttctcgccgacacatgcatctttcttcacttggccgacacctatatcatcattatcaatattgtgtagaaagataaaatatcgaaatgacatggtcagtacttggcttgtaccatgtcctttaatttatttaattatacaatctactttttttttttcttgaaagaacaattatacaatctacttgtaaaaataaacaaatatcaagagaaaagaaaacctacccagtcggccagctttgacaaaatatatgatgccatgtcctccactaatttattcacaataaattgacaacacatagaacatttactgcgaaagcttacatgtggaataaaaaaaattatatcttcgtccaatcatccccccatatacacaactgtaaaaactactgatataaatataaatatataaaagaggattatactgtgaggcatttaaaatagaatgtatttgtgcagatttaaaataaattggaatctagtgccttgtatggatattaaaaggtgcacatattgcaaatgatatatggtgttttatagtagatcactagaattggtatgtgtgggtcctatttttctgtgtagcactaaatgcattttatgcataaaatgacattctgttggagagtctcacattgttaatgtgtagaaagataataaaatatatcataaaaaggggctactctcccattgctaattggttttaagatggaacctcattttcattatctaaaattctaacacattcttatatttatttttttattattttatttttactgaataacttcattttttgactaaaattataatgtggtcgatttggtcaatggtcaattaacgtttaaaataaaaatcagaaactcataattaatccaaaaaatttcttgttttggtttataaaacactcaagaaatataaatatcacagatctaaagatatttctaaaagtgctttaatatagaaaaccctaaatcataaatcta

SEQ ID NO: 57879 - DNA, 842 bp, Cannabis sativa
aattaataaactcttatgctataattttggcataggtgaaattgtgttttgcatttatttttaatattctaaatgtgaaattttcgcttaacatcctggtagactcttctatctgtttcggcattcagaaaaaaaaaatagcccatttttttcattatcacatacatcgtgaaacattataattactctaaattacactcattttcaattaatgttgctgctgtatagaaaacaacatgaaaatatctattttttaaaagaaaaaaaaaacaagtaaaaaagcttaaaaaaatctgtaaaaatatatataaaaaaattgtaacaatataaatatatatatatgattataagtaaattgtttaaatttttcctgaaattttgagtattgaactagctactcatttaatatacacttgctttaataaaatataaaaatacctgcccttaatttgttttctttgtacaatgataatattttactttatttttatgtaatgttttattattcctagttttgttcgaatacatttaattaatttcatttactttaaagctagtcgaattttattcaaagacgacaatataatagccaaagaagcaacaactctttctattgtctgatgcccctgtaattagaagaaatcttcatcaattaaaaataaataacaatgttggcttttataacaaacaaataaataaataaaaaataataattcagaaacatacgtgtacacatatttcaccatttgggtaagcagctctcataagttgtaatacatctataccacaatcataatctacacattgcttcttatgaaatggctttggcataatagtaaact

SEQ ID NO: 57880 - DNA, 1630 bp, Cannabis sativa
aattttcaaatcacaaaccaatcaggcccttagagattcttaggtaacagtctagttaggtattccatactaataagaaagggtaatggggacaatcggttgattgccttatgctttattagtcttaaattaaagtttctataagaattttctctatgattattgcaaacgacttgatatacttatgtactaattaattgtgctatattaaaattatcttcttatgattaatctattcatgcatattttctttaccttgtaaaaaaagtttattgttaattatcttcatcatatacaaaaaaaatgtcattgtcatctaatttccatccctagctaggaaaggctaactagaggagttagtagttgaagtaaatgcaaataggaccacacacatagacacttataaatctatagtgggtctcacaacttatatccttaagattgttttattactattattgttattattttgaagagaattaaaggtagaagatcagacaaattaattataaaaggtgatatattaatatatcgacagattataatgatatttatactatatatatatttatataatttgaagtattaataattgagtttctttcttcattaaactaagatgatttaattcttgtgttgtggggtggaatagggacaaaatgaagcaacaataaaatttactgtagcccgaaagaatagaaactagtactattttgttgttgttgttgatctctgcgtatatatgagaaattatattgtgcactacactccttacaaattgtttgatgtatagatgcacattttagtatttttatcgtatgttcgactgtgtaaattataattatttaaaatattttgtaaatttttgagatattttaataattcaacgtgtttaaaataagatttaaactgtttgttacacatgtaattattattttatgcgcgtgtaaagtaattagtttgaatcttactttttatcctgtaagttattttaaattaattttttaaaaattaaaaattaaaaattttaaattttaaaaatatcttaaataattacaatatatacttacttttaaaaaatattaagactacaactattcaaatattaaaaatagtagaatttccatatcatggaacaagaaattaaagagtattagagcagctagctccaaaaagattgcatatatgttaaatgtcgacatctacaacagtgagttttcccaacagtttataactgtcttttatactatttcctaacggttcctaaaatcgttagctatgtgggtgtcataaaaatgcggaactttaaaagacggtttatagacgacgtcgtgcatgtgctgttcaaggaagctgcatttcttgcagcattttgtggttctatttacagtgcacggcatagttttttttttataatttaattgatatttatatatatatttatattattgtatttgtaaaatcaagaattattttttggaaaattttacaatgcacatttttaaaagtgatgtacgaatttactcatatttgtttcggcaaccgacagacttttttagtttattttttttttatatatagtagtgtatattatagttatttaagacctcttgtaaaattttaaaaaatt

SEQ ID NO: 57881 - DNA, 1148 bp, Cannabis sativa
aaaataataaaattcataaaatatcatacagaagcaataatgagccttctagtcctaacagagccttcaatgagtgcaactattaaactgggtgctacaaccagatcgaggggtcaaaatagaaaggtctatttttttaagaaaaacatgttatcaaaaagggaaatgcgaaaaaacttttattataagaactttctagcttttagaggatcaattattaatgaaaaatgaattatacaatctaattttataacataactccatgcatatgttcctgtgatggtggaactctaatctgaagtttctttaatcttgttctagtatggacatagttgtaaagccaaaaaaattcactggtaggaagatgtctaatagcatgaacaagggctacattgatagatgtaacatgacagatgaaacatccagttacccagctcgaatttcataattaaaaccacaaaaagatgtatattatatataaacatattgtcagtggtgcaaccatcacatagatcatatacctttgaggcaatagtgcaataccacagatctaaaataagcaaagatataccaaccatgtatttgacaaagaaaccaatactataaaagtagaatttcttcaccaaacataacagggagacacatttatgctcctaagaattttgtatttctattacaatcttcattactgttttcccaaattatgagtaatcaaattggtaactccaacaatatatcgactgtggacaaaactaacatcacaaaagctcactatcgcccagtaaagcaaaattcgttgttgtttgttatctcccaaaatacgcagggtttaatcgtgaagttaataaagtagaataatcaaacaaagtacacgatcgttactatggctaataaagcttcataaccagaaaaaaaaaaaaaaaagaagttggatcttacaggaggtgtgatccgatactccagctttatagttacacgtatacccaatccaactacaaattcagaaaacaaagaaaatagaaaagttggtcaaattttcaataataaacatctgatcgatcaacaataagacatacatacctatccaaaaatttcctaaccctaaccctaacaaaaaaaaaaaatcaaatttgtagactcacaagaag

SEQ ID NO: 57882 - DNA, 1716 bp, Cannabis sativa
ttgttgttttatttagattgtattaaaaatgttatgatatcatatgcgaatgatttattttattaaagtaatatgtgtgctatcatatttggttagtaaaatataattaggtatatttaagtcaaaacaaataatacttattatttacttatagaaaatttagaagatcaagataaaagttttgtaaaatttaaaacaaacattatgtaactaaaattaaagaaaatgttcgatcttaaaatagaagaaaaaattattaaaaaggtcttaatatatagaatattttttgaaaaactaaaaagagtatagtgaaacttctccctaatcttccattggttcagctgcttgaatagtgtattgattgtactttgaactcattgttcgttttggatctacatacaactgaactctccatttttggtcgataatttctctgtagttttttggacatacaacctatgtttctgtaaaaataattagtaataagatttaatatacttctatttatgaataggtataagttttatatatttatttttttatatttacctcgtccgaatatgactttaattgaactgcagtacatgagaatatgttttctgcaacatctccgaacatcacagcatctagcaactcggtaccatcgtcgagttgtacataggtccttgcactaataatttttatagaatatataacggttaatataaatatcaaataagttcaaatattaatttagttatgatgtgtttaccgtggtgtgggaagacatctattttcgcattttggattctcacaatctgttttttcattgtcgttgtagaacataagtttcttattacataaatcacacgacatgtaataaaaatcttggttgatgtagcaagatacacaacatatcgagtgttgttctctttagcaactctcaagctatttctgcaattaaattaagcacataaaaaaataaaaataatatacatgtggtatattatttaaagaaaataatataccacatgattgtaatgaaatttcatgtggtatatattggtagacaccccaagcatcatggaaaataaaaatgaattaaaaaataaataatcatcgatcataccaaaacaaaactaaaaatttcatttaaataattatctaggcttcaaagaaaaccactgtttggtaccttatgtttttcaagcgaccaccggataatgcatctgttgcataggctctaaaaaaatctttaactcatccatctttttatcaccgtactacaatctatataccatcagagcacaaattcaccaaaaacttaagcattcttcactttaaatattacactactacaaatatacaagtagttaatttgaataccacgtcttcgtatatgcaataactttgtagggatcttacctaataaaaataccggaccaaccccaggagtaaagcgacttgaatcaggatggctctttaaagaataagtaaattattaaaagcaagtactttatcaagctcctccacaacctgtgtaactccgttactcgaaatctaaaatttataagataatgcaaatgatacatgccaaaatataagtactctaaaaaatatcatattataatgcttttagcaaatcattgatcatgtttgatgacacaaacattaatgtaaaggcaattatgtgttaagtagagtatacatggctcttattttagacttcagtaaagt

SEQ ID NO: 57883 - DNA, 927 bp, Cannabis sativa
tttccataccacttggtggcttctttcacttagttttgacatattattgttgacaatgcattgttgacaaaaaatctcgcttcccctcttcatggccgaccactgccatttccttgtgccagtgtccatgaaaattgaagagcactgccatttccatatggcagtggtctgccagggttaaccatatgtaggaaatgatctctctcacttgtttttctttccttagtgttgagagaacacatttgaataattttcccttcataatttgtaaggagcaaccattgccattcccttgtagcagtacccatcaaaattgaagagcactgccatttccttgtggcggtgcccatcaaaattgatgggcacttctatttccatatggcagtgggcgcatatgcttattttcttaagggtttgatgccatattgacattatgcatgaactcaagtcatatttatgcctaaatgagtcaagtccttgttggtttccttggcggattgaggtttctagggtgaaaacgcccacacaggcccatgaaccctattttgggcacacttgggtttgtgagtcccgacaccaaatgcttgggtgatctttttgagtcctctaaaagtgacatggggccctcaagaaggatgtcttaactcatttggcctttgtaagtgttggtcaaagtcacagaattgactttagcgtcttcaaggcaatcttggcatgttggcccttgtataagagtagccatttaatttatttttttcgcaaaaattgtgtataagatatatgtttctcgaatatgttatgtcataatctcactcccacacattctctacttgcttgataaagtgtaagtatgttaacatgatttaaagttgcctcgttaaaaattttgtcaagaaaacccagtgagacaaaaactgagctaagaaa

SEQ ID NO: 57884 - DNA, 745 bp, Cannabis sativa
taaaaaaagtcttattaaatattttaattaaaaaataatttaacttaagtatatataattaattataattattttgagtctaaaaatagaatttttaatttgttatagcaagttatataagaatataattattttagttacatgtaataattaatcacccatatatataaatatatatatgaatttagagggtttttttgagtgtataattaattataaatcaatttgttttattatatggtgcctgttttattttatgcattcgattagtttaaattttattttccatattataaaatatttagaatttcttaaagtatgaaaaataagaaattaaccttataggatgatgcccctaagaagctactatatatatatgctttgattatatatcacttaataagctattaaataaagagtaaataacggcataagtacctaaaattttgagtttgtaagcgtcataaacttaataatttttttagtagcataagtacttaatgttagtaaaactacaatttttctctattttcgtcaatacaggcttcgttttaaatttattaaaaaaagatttagaaataattgatactacatattttttgtccagaccaaataatctaaaatttgggtcttatatgtgctctgtttaagtacttatgacactaaaaaaaattattggatttatgccgcttacaaacctaaaattttaggtacttatgatactatttacccttaaatgaattaa

SEQ ID NO: 57885 - DNA, 1458 bp, Cannabis sativa
aaaaacagtattatttttccaggtatatttattacctataaaaggaaaaggaagtaaatgaaacttatttaaaaaattagaaaaattatccatattagtattatcaaaataagtgcttccaattttatcactatgtagaggatagctattaaaatccctcatgatgagccaagggagattaggagcattgtaaaagattttatcaagaagatcccaagtaaaaacacgttgtgaggcagcaggagaaccatagaatccagtaaaatgaaaagtttcattatcataaagagttataatacagtctatatgattacaagaaaagtttaaaatattaacatcaagacaatccttccacaacaacataagtccccccctccccccaaaataaaatacttccttgggacttcaaaagcatgatcaaaactaagacctaatctaagtttgtcaaatgcatggataggaagtcgagtttccatcaaaaaaaggagagaaggtttgtgatctttcaccaaaagggagagtgtctgaatgcacgtgtactccccaaaccacgtgcattccagcttaataaactcatttttctgggcgagtgtgctccgcatcacctgcctattcaggttctgaagttgtagcagaagagccatcttcactgtcactagcacaggctcgctttagagtagatcttaaaaagccaccaataacagcttggtgaggttgaaaatagggtcgtttaatccctgaagctgaggctagacccttgccacgaacagattgatctggctggcctacattgacaccagcttccagctccatagtatgagagccaagagctaaactcccaccatttgtggctgggatagggacttgagaagtaaagccttccatagaagactcagaacaaaccagatgagtagtagcagctaccaagacaaaatcagtagaataggatgtcaaagtagaattattcgaggataagccaaggctcgacctactaaaagatgataacatttctcccaaattaggatttacaggagtagggatcatgatggcagcaaattgttgggcttgggtaaactggaagcaagaggtgacatgatgagtaacaaataagggaaatcgaatggtggatcccagagaacccctagcagggatgttaagatcaacaggagggatatcaagcaaagtcatggcaggtgggtgtggatactgaaaaggcatactcttatcagaaattttttttcccctctatagaatattaaaaggacataaaggttcagagagggtttcgtcacatttttgtaagaaagcatggcaatatcttttagtgtgatcaaggcgaccacaataaaagcaaaaaatcagggaggcgttcatatttgaaatcaagccacttaatgaactctctccccattcggataaacttgatgttcatacccctacgaatgggtaggttgacat

SEQ ID NO: 57886 - DNA, 923 bp, Cannabis sativa
ctctatcttcaaacctttgaggaaagctgtctgaagagcttggtctcccatcggtccgattgtcgatgctagcacttcaaatcttcgtctgtaatcttgcacagttgtgacctgatgatgaacaaaaaatctatcaaaaacagtaccctcagccttctgacaaaatctccggagaagaagcgatttgagcttcctcccacgaattaatggcgtgcagctggttttcccagcgaaaccagttcagcgccgctccttcgaggcacaacaccgctgcctccaactgttcaggtggtgatagtcgctgcaacccaaagtagcgttcagctcggtaagcccatttatccgggttgtcgccggagaagagtggtagttcaattttctgagcatgaaattcgttccgaggctcccctaacaccgtgtctctccccgtgaacccgatgccaacatttcttccattagaccctgcacctccggtcgccgttgacctttcgccttgaagacgtcgtcccgaaccatggttgccatttgagttttctctgagagatgctaactcatcaacaattctgccgtttgatataaccaatctatttaaaacttccttcagagattgaagctccaccccgtgagtcttcagtagaactccatggtcattgagttgattattaacacccgacacagccgactgaactcccgtcaccgccacttcgacttctttaacacgagattccattctcgttatcaccggcatccgccaagaacgtcaagctctgataccaattgataagcacttggtaattgattaacaactatagcagtaaatgtaacaacaaagatgaagaagaattcttggaagctttattgaattgtaaggaaaaaaggagactatagtctcatacaacaaagagaagagttctcatgatgca

SEQ ID NO: 57887 - DNA, 1359 bp, Cannabis sativa
tctctctctctctctctctttgtacctctcaatatttctctctcaagatcctcttgaaactcgtctaataaaactcgctctcttttaaatgctaagtggtggtatttataggttctggatatagatcctaaaggtggtggctgccaatgataagttgttaagttagttatgacttaacaaacttctcgtaacaatatattcacgtcagcttaagttgaagtgcttctggatgagacttgcacttcttagaagataagtcaaaccgtactttgaaaggacttcccagataggagaggcaatagctggagtcgactatttggggttcccttccaagagagaacaactggtcatctggaactccttttcgaagggattctagcttcattgaaaacttcatccgggtggacacgatagacatccaagaacgcccttccggacgacacctatcattccacgagactacttccagatggacaagttaacttttgagaacaccattctagatgaaatctaacttcttataaccaaaacaactttgaagacctttttattttgaaggaactataccacaaagggtgtgaagttttgggactaagcaagacttgagttggtattggcataaattgtgtcaattgagactgaagatagagcaaaacttacaagttacaagtagaagtggtaagttcaaatcaactattctttataacagcttgctccaagaaaactcgacacattacatgagggctttttggtgtagcataagtattcccaaacatagatttatattttgacaggctgttaattctcattttttaactagaaaccagtatttttggtattatatttccttagtttctttgttgtgtcccgggtgtggaatggggaatgagagctatgaacacttgttctttgatgtatatttgattggttgggtatggcctatgaagtttgctattagttggctcacttggatcacaattcagaggaaggtgttgtctataatacatattacaatggcaacttcagtgaataacttatgagtctatgacctaacatgaattgatgcatatatgatggttattcttttacaattttgcataaaaggatatccaacaattatttaaatacagatggtatatatagtttaataaacaaaaagttagaatgttgatgagcatatatttttttctccattttttcattagtgtttgtaattgcttggtttattaatgaattcttttctttgatacagaaactatatatatatactaggtgattgttacgtgccaagccacgtagtgttagttttatttaatattttagttttttattttaattaataattaaaatagtataatt

SEQ ID NO: 57888 - DNA, 589 bp, Cannabis sativa
actacttagatcaaacgcaactattgcattccttggaatatgcctccgagcaaaacgcattggccaattaatagagaataataattttccatgaatttttttttaaactataaactgaaactggctcacctaagttaccaaacatgccaattggcttagctaccactttgaaatcattgctcaatggcctcgtacccaaatccataattgagggattccaaaagtaaacataattataatactcttctaccaaacaaatcacaccattatcacaacctacaaaccttaactccttcgtcttatccttgtgatcatgaatattgggggatataccagatgaaatctcatgtaagttttccgagctacgaactgcgaacaataatttacaccacaataggatacgaggtacttggtttttgtggaggacattcatgaaacttgggtcgcaacatttgttcacacacttaagccgtaacaaggatttcacatctaatcttgacactatattttcaattatttcaatgggtaatttcgaattacagaacaccattgctaaatcaactctagaaaatattaattgaatatctct

SEQ ID NO: 57889 - DNA, 1211 bp, Cannabis sativa
  modified_base (1002)..(1002): a, c, t, g, unknown or other
taaaattcatgttttggttgaaattcattcttggaagagcttaatgacacaagttagatagtcatcaatactcattgatggaataacaatttggtgtagtcttcctcatgtgtatgaaaattataatcaagttggctcccaaaagccaaattacttatttcaaatatgcatgtaaaagttcttcaattgggttattgagattttctaataaaattttacaggctgattgatcaagcttttgcagaaagttgatgtatgcagcacatctgatataaggcagtatatgctttattgggtcttaaagtttatatttttcgttgcaagttatacgcttccacttgagatttaatttttactagagccaaatcttataatgggaataagtacttactatgatctaaactgccagttttttttagcttttaatcacactattatgaaatattatttacaagtatttcatattagtttgtataatttagcacattctgttgttttttttttctgttttataacagatctatgtttcaggttgccggcggttggggatttgctttgcacctataagctatgcttgcgtcgtcgagattcggggttctcaagtagctgttttttgcgttgtcggggttcacaggtggctggttttgttttagaggttgggcgtttggagggattaggagctcgccagcaaagtgaaaactttatcacatttattttgggtttcataaatttggttctgatttagtaatggttaatgtataatgatgatgtatatgttagtatactaataatttatctctaatttgattataatttttatatggtgttatggaagaatttgtctatctctattgtaattaacttgtaattaaattaagtttttatttaaataaaatatatttttatctatttctatagtgtaatttataaattttacatttagttaaattaaaattattattgttatattaattgtatttgtatataattaatataaattantatttataatatataaaatttgaactaaattaaattaaatattattttttttagaaaaatatttaatgtagtggcactttttgtgtgtcactatatctctaaaaatattaataaaaaggaaaaaaaaaaggatatagtgacactctctgtgtgtggctgttacatatttagtctgacaaaacctgactctatacgcctatagtgacacg

SEQ ID NO: 57890 - DNA, 1293 bp, Cannabis sativa
aattataagtgattttgtttcatgctattattttatttttttagcttgtttctaatatattcgagaagcattccaagagccctaaatcgtttatatatataatgagcttaatcaattaagtttattaaataaagagaaacttgatttcaccactatagtgattaaataaagtaaattttttaacttgttggaggagaagttttattttgagaaaaattaaagtttgaggttagagatttgtttctacaatcactgaagatttggacattttttaatgagatttcaaattaaaatttaataataatttgacctgatgacgttatgattagactagactaattacatttgtttgtatttttttcgtgttaaaaattaatttcaagttggttatattaaaaaaaataagctcaacaaaacaaataaatcttatgatagtttgattgttcatgaggaaaattcgggtagattacggggtcttaactttggccgaaatggattgacagtttctcatttgtttttcgcggatgatagtctagtgttctttgaagctaatgataaggaatgtgaggtttttaaggagctgctggataactactgtaaaacttctggacaagtggttaattttcacaagtttgagatgtgctttgggaaaacagtgcctcaagtgacacgggataggctggctgctgtcatgggagttcgggtggtagaaaattatgggaggtatcttggccttccttccttttttggtcgaacaaaataagagctctttgctgtgattaaaaataaagtttggagcaagattcggggatggaaggcatctttattttctgtggctggaaaggaggtgttaattaaagctattttgcaggccattcctacttatacaatgagctgtttttgattgccgaagagtgttattaatagtcttcatcgtatggcggccaaattttagtggggttcgtcttagaaagccaataagatacattggtgcaagtggagttatctttgtaagccgaaggagaaggggggctgggatttcgtgatttgggactgtttaataaagcttttcttgccaagcaaatttggaggtgtattagatttcctgactcgttgtgtactaaggtacttaaagcaagttattttcctaatggggggatgctggaggcaaagtgtggatctaatgcctcctttgtgtggagaagcttggtgtggggtaaggagataatccagcaagggtatagatggtgcattggagatggtaataatgtacgtgtgcttgaagatccgtgg

SEQ ID NO: 57891 - DNA, 555 bp, Cannabis sativa
aaaaaaatcatttaaactctatttgaagagtgaatacggtccaagccgatgataaatagaatattatctgcagatttgtgctagtcatctaaacaatgattgattttccaatttgattttactaaaatatgtatttattatcctcatttggtggaaaaagcacaaacctaacatgactaagtgtcactaagataagattaatatatatgtgtgtgtgatcttaaattaatattaaatattatttgttgcttacacttagatatctttaggcaagcaaggaataaggttggtgagatcattagacttttgagtacaaaagaagagagcataatcttgtaccaatagtcagttggggggtacaaaaactgtaaaggtcaactcatgtacaattgactcaagccagctaaactccaatgaaattatcacaagtaagcaaatgcaagtaagctcatgctggtcttggcacagaggatcaaatctccagcttaagaactaaactggtagagaaccaccgacaaggagtcagtttgtaaataacagctaaactactattca

SEQ ID NO: 57892 - DNA, 747 bp, Cannabis sativa
aaaaaaaaaattacataaataatgactattgtggaattttaattgttatccaagttgtaataagcattttcaatgcaataagcaccattattactcaaataacttgccattcaagacatgtcatttaataaagagaattgtcaattatctgatccaacccacacacaccattagattattaattagctcaattctcagatctagaagcagtggcacactttttcaattatctaaaagcctaataattatgataataattattattattataataataataaattaaagtgaaaagaaatgaagaggcatcattaggcatcagatggttaatggaagaataattaccatacatgttagttgaataagttgaaacattagttttcgtgaagaaacagcaatcaataaagatgattttgttttagcaaaaaaaaataaataaataaataaataaagttgattttgattttgagcatagaagttcacaatttgacttatgaacaaatcaaataagtttatgaccacatatactaaataagtttttgaagtcatatctttctatttctttctgccattttcttagtagccaaacaaaacaacaggattgacatattttataagaatattaatgatctgaattaattaatacattaatttttctttcagtatttaacatgacctttagaaaaaaaccaaaactcttccaaatacacacccataacaccccccacaaaactaataatctgatag

SEQ ID NO: 57893 - DNA, 954 bp, Cannabis sativa
tttgaggccgataactaatgcttcgtattttgctacattattggtgcacatagctagaatatggaaagagtaaggtatcaggcctcttgacggtgttacaaagacaattccagcacctgccccactacttcttgttgtcccatcaaaatataattgccatgatgaagtatcaactgtgaaaacttcttcgtctggaagatcttcttgcaactccatatcatctggaattgggtgtgctgccaaaaagtcagccaaagcttgtccttttattgctttctgcgggacaaaattaatttcaaattctgacagaaccatagaccatttggctagtcgtccagacaacatgggttttgatagaatgtatcttaaagggtcagattttgacactaaagtcacaaggtatgagtataaataatgttgtaattttgtgacggcaaaaattagagccaagcacaccttcagaattggagggtagttttgttatgcccctactaaagttctacttaagtagtaaagagcaacttctttttcctcctcattgttctgtgccagcaaggctcccaaggagcgatcaagtgaggtgatatataatatcaatgactttctaagattggagctctcaacactgggggatgtaactggtgcttcttaatactttcaaaagcattctggcatgcctcatcccaaatgaatgtggcatttttctgcatcaatcttgaaaaaggttgacatcaaccgaacatatttgagatgaaccttcagatatatgcaaatcttccttgtagtccacttagttgacgtaaattacgtgggggaggcatttccaaaattactttgatttttgcaggggcaatttaaattccttgatgtttgatgataaacccaaggaactttcctgaagttaccccaaatggacattttaaaagattcatctgagattgtgttgcctgagcc

SEQ ID NO: 57894 - DNA, 1024 bp, Cannabis sativa
ttaaataatcaaactgggaatattaaaatacggaatttcaatgaatcacttgaatttatgtgtaatattgatattacaatatggtctttttcctctcttttcttttaagaaaaaatttcccaatctcattctttttgcattcttctctatctataggctaaggtgtgggatatcctaggttatttggcacatccttcctttacctctatgctctatatagccttttttctatgtacaagaaatgatattttacaatgagtgtattaggtgggatttgaagtagaaatttggagagacaatactgggcgtgttcgcgactgatgggacaaagtaaggagtagtcgtcactgaacgtttatgggggcacacaatgtcagaaaaagtatgggtcaaatccctataaagcatcccattttttaaggcgagttcattttgtcatctgtgttgaaagagtcatttacaatgttctgtcttgggagatgtgttaggggtatggatgactcgctgatgctaaatggttcaggaggttatcattctcttggaggccaaagttgtgactcaactttgggaacccttccaggatctttgttcacttttggatgctgacacatctcttgaatgcctaccagaatcaaggcgttaatatccatttattatgtcttatgtgcgggcctatcgctaactctcgatttgccacatgtttttggtaaaaaatacaaatgacagaatatatcttaataaaaaaatattaattttatgaggtgaaaataaaatactcaaaattaacatattgaaaatttagtttataaaaaattgactggaggaaattgactcaacttaatgatatacataaatgttgaaaatcaatatattgtataaaaataaaagaagaattttcaaaaatactatttttatattttatttataattttacaacttaaaattttttattatagaaatacgcttacaaagttttaaattacaaaaatacattttgctcaaaaagtacaaaaaaaaaaaaaaa

SEQ ID NO: 57895 - DNA, 724 bp, Cannabis sativa
  modified_base (492)..(500): a, c, t, g, unknown or other
aattatttcggataataaaacagacaaaaatgtatcggtgcatcacttttgagaatgtgtattataaaatttccttattattattattcaaccatttcattttattaaattcctttaccttgtgaccatgcttctgtgggtaaaactttatttatttttagaatttttacacaaaatatttaaaattgtattttttttcttcacatttttactatttttttatacattttcacaattttttttctacaagtttttttagttatagttttatgaaaaacaacatggacgtaaaaacaaccgttcattaaaaaaaaaaaatcataaataagttgaaaatattatagagtaattctacaatacaccccattaaaagggatgtattgatgcatcttttacttgtttcggtatttagaagaattttttagtataatttttttcatattcatgtacgttatagctatttaagatatcttataaaattttgagaaattnnnnnnnnnttacaatatagaaaacaatattcaaacagtctattttacacgcgtatataataaaatagtcacgcatgtgacacactattttaacgtaatttttggcatgttaaatttttctaaatttcttaaaattttacaagatgtcttaaataattataatttacataaccatgaaaaaaaatttaactaaaaaattattcagatagtaaaatagatagagatatgtatca

SEQ ID NO: 57896 - DNA, 1251 bp, Cannabis sativa
  modified_base (298)..(298): a, c, t, g, unknown or other
aatggtccacctttgattaacctgtgaagtatatcatagcctatataaccaagtcgtaaatgctatagatatgcttcatcattattatcaatctcttgcttttcatggtttctagcttaacaacattaaaaagtttgttcatgagcgcaattggtaaatctggtcttaaaacataaaatcattgttccatgtgatcaacacataattgaatgccattacgagaaatagtagaaatagaactcgaaaaattcaatatattgataactttgtgtatgtaaacatgaaacactaatcaagnttctactaaaatttggaataaacaaaacattgtctaaaatcaaaaattcattctgaaacatgaggcaagctttttctctagcttggaccgatattaatttgccattcctaattttgagcttcaactcccctggatttaagtaatcccaagtttcaagcagctgcaatgaagagcaaacatggttagtagatccagaatcaacaatcctaatggatttgtcattctctaaaacacattattcaaaaacaaaagcattaccttcgttcttatggttcagaagtctgtgacatcttgctttaaaatgtcccttctctccatagtgaaaacatagaagaatatatttgctcagtttttatttgattgtctctattgccagttcaatttgaattctagctcttaaaattgaactcaatgaagtagcattgtcggaggtatcatcctcaatatcttcagctttccttttgcccttatctgcaactctagagcgagctctccttgcaagtgacgatgtccgctcataagcacgcattttagcttctagcttatccatgaagacgagttaaagttattgttcattttttatactcaggtgaaaggttgttgaatatgaattgaacccatttctctttcgataaaacaattcctagcaattttgctttctgaaactttaagttcatcaaaagtaaggtgaagtgacgctctaactaggagacatcttcgcactatagagtttatttgcaaaggcatataatagttgaggattggggtgatggtcgtttattttgacactacaaatattaataaacaaaaataaattacttggttcaaataaattcttacacaacttcaaaaaataacaagtaaaaaaaatatgtttgcaaaaatacaaaaaattaaaacatattcaattattttccaagatttctaataaactgatacagtgtcccgtttag

SEQ ID NO: 57897 - DNA, 1116 bp, Cannabis sativa
  modified_base (808)..(808): a, c, t, g, unknown or other
gatggcttatgcttattcccgagctaatttggatgcctctaagaatgccgctgtttgcaacactatgcgaacggaagtggactcggccaagaaggacaccgaggaggcccgggttcagcttggggctgtccggatagagctgagagaggtcaataagaagcttcttactgttaagaacaaggtggccgaactgacccaggatctacaagccatgccatccactgaatagctcgaagccgacattgcctccttatctaaggaagtgaccaaccttcaagaagaatgggagactttctagacttttccgcaggttggaagaagagaagaaagccaaggaggaggagcttagagctgaggttgagaagtattagacataggcttggcagtataaatctaaagtggagaggcttggagggaaagtgaatgccctggagacagctggtctcaagtttttctatgacttttgagaggccaatccctaggaaaattttgaatacctaggcgattccaaagacatgtttcttgagtactacactgctcaggcgacctatggggaatccgaggcgaccacttccacctctccagcggacccaatagacccgtacaaagagcttgggactccagctatttgaatgctttctttttctatctctttttaatatgttcgaccataaggccttttttgaaacaaagtaaccgtccaagcggtctttaaacttggaacttatttttcatttttcaaaaaactagctgaccggtcagcctttaatccctggtttgtaagcttttgttatctttaatgaatttnattctctgtttataatcatcgtgcaattgtgtttgttttattttttaccaaatactttgtacaagtataggtgtcccccaagtgactgagcagacttatgactcttggtgactttttgtattttttacaagtgtgcttttttgtctgttcggggttttgggctcgaccaaaccttttgtacgcacttgatggtaaattaataccatgctaatagattcgactactcgcaatctgagctaacacgtcagtagtcgtgatttcttcccttagaatttgtctaagagtatagcttttgaactgtgcgagca

SEQ ID NO: 57898 - DNA, 1261 bp, Cannabis sativa
tgttaaaacgatacgtatacttgcgtgttaaaataccacaaaataatttaattatagatttaattagttgttggttgtttattgagtttttttggcaagtaataatgtatatataattatagagattgaagagaggtttaagagatatttgagacaaagttgtatatagttagggcgttaataaattttagtctacaagttactatattagaattgctactgagtttacaataatagaggttcttagaatttttgcatcgtgatggcttgaaccaaaatttggatccttgtatagcaaagtgatgactttatttataggcagtcatgtaagtaaactggattagatggaacaaataacctgcaaataacctattatcatattatagtactcattaatagaattattacattaagccaagtgtgttatgctattaattctcaatcttcaggagttgacttgtcacattcattgtagtcagcttctcatgttgtagccacttgacagttgacactttgagaattagggttagccttgagataaaatgagtaaagagtacgccttagggtccctaacattcaagtcctaaattgtaaaaaagttaattaagtatataaataaaatattaaataagaagataaaatcattctaaaagataacattaacaaaaaaaacaattctaaaatcgacccgaaacttaggctaaaaatagcctaacaatttcctttaagtgttaattctgaaattgaaaagttgtgcacaaatttaaattaaataatctaaattatattttcactagtgaattaacaatattaaatgataaaaagtaattagaagggtaaaataatttctatccacaactatttacgaaccgatgcaaggagagctaattacttgagttgattatatcaatggacattgcagtaaaactcagtaaatataaatctataattactaagagttcaattctatatttatagcagagtaaccatggaattagtattgattgatgagattcaatagataactagtttaatatatagagcttaaagttataggtcaatggtctccgaattgccactttgaaatactgttaagggtagggataaaaattcggaaaaatctatgttgattgaattatcaaagtaataattatttatttttcacatttattatacttaaataaatgtgctttcttatttttacaattcaaaacagtttttttttttttgcatttttacggaattctacatagaaattcct

SEQ ID NO: 57899 - DNA, 860 bp, Cannabis sativa
tactattttgttgtataattattgaactaaatagaagatatttaatttttttttacactaactttttttttagtgggggccacaatcttattagtgtgtccgtccctgtgtggaaccctttccatgcaaagtgcaaaatttaagtggaattttaactctcctaaagaattttcaccaatttgataacacttatttttattttttgaaatttagattgtaatcactttgaactatgctaaacaatgctaaagttacgattaatccaaaactagcattttgctcagttaatttattagggtaagtttagtattatttttggaataattttttcttacatcttaaaataaaatatatttatgcatcaaaaatagtagaatcattcaattgtagaaaaatgatttagtttatctttatgttaagtttgactagagaacgacatgtcgttgatattgtggctctcgcatcgaacggctgtgatcaaatcacgttgattcaatttgcaaccgaacccaatccaaattcttggttaaacccctcaggaaagagtgttcattgttctctaagcctccgccaaatatgaatatggggtcaatgagtttcgcttcaatcttcgccaacggttgccgtagtctaagctcccctgctctcctcgttcgtaccttgggtctcactcatatctctcttgttgattactctaacaatcttcttccggtaccttggtgtccccggactccgactccgactccaaataaaagagcattttcatgtgaagctacgaaaacagatgttgccgatctcattaccgattcttctgcaaatgggtaccttaaattttccaactttaagtgtttttcaccaat

SEQ ID NO: 57900 - DNA, 1741 bp, Cannabis sativa
  modified_base (1700)..(1712): a, c, t, g, unknown or other
actatggataggtttaaagagttagattggatatattagacctaacactcaatattttcggatatttagaaatattaattcaaatagcaccgaaaagataatgagaattgactttctttattttgtatggatatgattataattagcgggccaagatttaattttaagatgaatttagttatacatttaataaaatttaaaacataagtttgaatctagtttaaaccttatattttgttatttttttttaataaataaaatgtagatacacattaaaataaatagaacaaggggattcaaaacatggtctcccatataaactcaaagcatcttaactaattgttccatttaactactgcgtatatatgtaagcagcaatcatatcttaatatattttcaaatcttatggtgggttttagccctccctcaatacttctgggtccgcctatgattataattatttacgttctaaatatgaatttaacaaaaccagaaattggttcatttttgacaatattgtcaagcaactcgagtttcaagccttattatgtgttaaccaacttattagtgaaactgttacttagctaactgtttgttacttggttagttagtgtagttaactaatttcagttgtaatcttaatttcagttgtaatcttgttttttgttgcttctgtattaaaatttagtctataaataaagtgcctaactcactctgatgagttgatgctttcattccaaagattctttctctgttcaagtttttctttctttgctttctagctcaacacatgttttatcttttatatggtatcatcgtctttgacttacgtccatggagtcttcaacctctgatccttagacgacgacgcttcctgctgctactactattgctactcctttggcaacagtcttgaatacattctcgaattcactcacttcttctcttacactgaagctagatcatgtcaacttcctctcttggaaattcaaagtagttcccagtgtaattggccacgatcttgatcaaatcttgttctcaaatgtctcccctcctactactctagtcatcagagctccaaatccaaaatttgtgcaatgataaaaaaagattagctcatgctttcacagatttgattatcgatgctagaagcaattcttgctttagctgtcccttttcactcatcctttgtggtttggagagctctagaacaacgtttctccagccaaaccaaggctcatcttctccaattgaaaggttaattcttccattttcaaaaaggtaatttatccaactttgaaatatatcaataaagctcaattgattgttgatgctcttgcaattgttggttcccctgttagcactcaagattttatgctgcaactgttaaacgatcttggtcccgagtttgaatcaattatttctagcatcactactcaaagtgatcttctcgcttttgaaaaaattcaggcattattactctcccatgaaatttgtcttgaaaaccacaatgttttcacaaacttatctctaaagatgcaagccaattttgtttttggttcattaagaaaaggtgggcttcctacacaaaatggctctggttgagggattacttctagtgaaaatggttgtggtcgtccctttagtcatggaaatggcactcgattactatgtcaagtatgtaacaccctaactagcannnnnnnnnnnnntgatttttaaacatactgtgcaactcgtt

SEQ ID NO: 57901 - DNA, 1548 bp, Cannabis sativa
  modified_base (960)..(964): a, c, t, g, unknown or other
ctatcgtccgtgcaggtatatgtggtgttttgtttgaaatatctccttcgggcaaatatggggagtcgactccacgtatcaccagcgtgtgatgccacgttagagtgcaaaaattgggataacatttgcccctaagtctgcacgggacttctaaagttgtgtggagactttatccgagttgcctttacatttgaatgggtgacacgtgttaggtgcatctattcgtgattcgatgtgagtctgaccaggcgtctctttggttttcggctaattaatgctctaacttaattagtgcctcgaaacacggttttcttcgcatgctttgacggttacacttgattgtttttaatttcctaatatttacttttgggggaaatcgaaacgtctgaggtatttcgaaatgattacctctttttaccaatttgcctataaataaggttggaacatcctcagaaatcactttcaccattttatctacgaagcaaacccaaagtaaaaaaggaattttcttcaagtttgtcgtgaggtttttatcagaggcatccgagtagcttcatctggactacgtttaggcttcaaacagtgagtaagttttcaatcctctcctcttctaactttgcatttttaatttctgggcttccattgtagtaaatgccattattcttgacttgttgtagaagatacatagaaagtctaggcttgaaactttatagctttctctgtaatatttcgtacaacttcatagtttacgacatttttcctttaatctcgtattgttcaactttcacctttctcattcgaagcttcgtgaaatttaacccctaacccaaaaatttcaagcttttgggttttgacttgattttttgtgtgtttttcgtccttttaatctgttgggtggtcctagtcggtgcttttgcctgtttattgttcgatatcccggccaaacactcatcttgtgtnnnnncttttgtagatgaaccatggtgagttttggggaggcgaacaccgaattgaccaggatttgcttcaacttctatacgaggatcaacctcgtcttcgtgccagtccgtcctcttcaagtgacagactttctaactcgagctttgaagattgggaagtgagtagtgatcgttctcctactccagaacccgtagtgcaacatcactcttactccaagcagatcgtaggagaagagtacggccgcttcatgaattgaagaagggttggaggcgttatcctccgtcccaactagaccataacattgtctggctagggtgttgtttaccttcctgttggccgtccaagttttggtaactttggcatcccaatagttgtccccgtcgttactgttgcacgacacacacatcagtatccgtccaggggaagaatgatggcccacacaaagcagacgatgcggaaagtcaacgcatctgatcctcacgtggctcagctcaccatgctgccaagtgccgagcaggatccgcccgccatggaggagggagatcatgagggggacattgaggtccaaaagatagaggagcaggacga

SEQ ID NO: 57902 - DNA, 1052 bp, Cannabis sativa
atatgttaaatatgatatatgtgaatttctcattttctgtgattgtgttcggaagctgtggaaagcgacgttgggcattcagagagtcgcattttatatgttttagaatattattactggggtagcattgttaagtattggaggagttggaatttttggggtttgaaaatgacttatttacccttgatggacatggtagcttttattttaatcaaggggtcatataggtcttttactagagggcttttgtctttatggacattattatgagggttaatatactaacctaagtgtttaatattagagagatttattttaaagttgaaggaaaaacctagaattctctaagtccctctctttttctttcgaacaccaaggggaccagcttggaattggctatggttagctcaaattttgtgtgatcttagctgattagaggactccaattcaaggtatataactctaggctcttctccatgattttcatttgctcaaagtaagttttatgcatgaactttggtgtttaggttgctgtaggttttggggtggtttgatttcatgtcttggggttaggttgggtgtatgttgtttgatttgaggtgatttggtaagctttgatgaggtttggctaaggtttgagtttaagaactcaagccattccctttaatggtggattgaatttctaagattgttgatgagttttactggttgattatgcttcattatagtgcttagaggtatactggagagtttggtaaagtttggtttggttttgcggtcatagggtcgatttttactttcccagcacagaattggtcgaccggttctgggggaccattagaaccggtcgaccggttggtacccaggaaccgggctttcggttgagaaccggtctgacggttggggatttttctagaaccatagttttctccgtttttgcgttatttaaggtgttagcatcctatttatcgatagggttatccttaatttcaatttttaaatccccgataagtgttttagcgtgtctctcatcaaattttgaacgttatggt

SEQ ID NO: 57903 - DNA, 944 bp, Cannabis sativa
atttttatttactccaaaatttctataatgagaattttcgtctagaattaatattcttatttctcaaatagaattaaattaattagaatttttgttagaattttagtatgttagaaattctatattggtttgattttgtatttgctcttatgttatcaaatttatgagattttttttttctgaattactattcttatttctcttctttatttttctttacaaaataaaattattattataacattattattgttatattaaattgtatttttatataatcaatataaattattatttataatatttataatatagtgacactttttgtatgtcactatatctccaaaaatattaataaaaaagaaaaaaaaggatatagtgacacttcatgtgtgtggttgttgctttttcagttaaaaaaatttgactctatatgcctatagtgacacacaaaaaatgaatgcaaaaggtttcagtgacacacgtgaagtgtcactaaaaatggtcttcccagtcaccctcattagtgacgcgcgttgacgtgtcactatacacttttagagttactcaatgtgtgtcactaaaacctaattttctagtagtgattattgtaaagtttggggaaaaggcagtatttttgtaactttctcattattaaccattctcccagatgctaaagcctagcacgcgccaataattcatatttattgtctttgttaggtctaaccctcaaaataaggaccaagcctgtattgttatacgtgtcgtaccatacttttattataagagcgggattcgataaatacgggtcgggttagtccatttatgtacacctatttttatgctattcaaagtaaaattatattaaaaaataataaaattaaaatttgatataatttactacttagttattatttaacaaaaaatataatttatttcatata

SEQ ID NO: 57904 - DNA, 570 bp, Cannabis sativa
ttattatttttatgatatattttgtttagtaaaaataaataaatattatgtaatatataatattttattatttgtgtattataaatatattatttaaataatttagagaaaaatataagaataattatatatggtgtaacgtaaaagtgtgagctaaaatagataattgaattttagtaaagtattttaaaagataaagtgttgttaggagtgcttaaataaatattactatgcgatttataagtttgagtaggtacttagctataattttttattactttcatgatatcttttttagtttagttgtaagtgtaaatataatataataatattttattatttaaatgatagaaaaattgatgtataatgtaatgtttatgtattagtaaaataaaaaaaatgaaattttggtttagatagtttaaaagatagaataaaatatggttggaagtactttaactatctacaacaaagttaggtatatatttattgactgtgtgctaatttaaaggcatgaagtgaataatgttgataaaaaagtaaatgtataatgtattgatagggaaagct

SEQ ID NO: 57905 - DNA, 905 bp, Cannabis sativa
ctaaaataaatatgaattaatattttttattagattatttaaaaattaatatagaaaacacacttagtttaaataaatcataaatagtaatttctggtaactaatttatatttttctaatatttaattaagtagaaagatatctttgagttgaaaattagtttgctaattttaggccaacttaaattataatatttttcttatctattaaattaaaattcataattaagttgatttattgaagatacttaattatttgtttctaattttaatacatttaattaaataaataattatatttaagttggaagttttattttcaaatcaactttaagttagaataattttcaaaatatattttattttattttattaatattattttattaaatttttaattgcatttattttaaaatgaagattttttgaaatttttaaaaaattagattcaagttgaagattaatttcttaattaacttttgatcaacttaaatcaaataattttttcatcaatgacttattaaaataaatatactaaaatatattatattttaattttagaaaatcaataattgggttgtgaaatatctagatggttattttctaagtagacttttggtatttttctataaaaaagttaatatttaagtttatttgttcaagatacttaaatattggatatttttcttaaagaaaattaactaaataagaaaattatatttatgttgaaaattaacctattaactttagaccgacataaattagaataatttttcagatttattttactttattttgtaaattttaaaaatgtattattttttagtacattggatttcgaatttagttatatatatatacatagaaaattaaatttgagcggaaaattaattttaattaatcttg

SEQ ID NO: 57906 - DNA, 1185 bp, Cannabis sativa
atgaatttctctaatgatttcgtttgcttctgcgggaagaacacactgaagtaggggcattgaataccctcttctatatagttttccttcgatcattgtgtaactaggagctgtatgcaaaagtttttgcgcctcgtttttgtcatttggaagttgctcattgagtaaatagttaacaatagtcatcaccaatgttggagagtaatctatcatctcaacgtcatgttgcacatatacttggctcgctcagcatttctaccggaaccaaatttagttcgtccatatcattctacgaggccagttttgctaaggcatcggcgttggagttctattatctcagattttgttcaattttaaagtaatcaaatctttccaatttcttccgaacattctctaaatactgtcattttcaagcctttagcctggtattccttgaggacttggtttaagatcagctgcgaatcactatgatagatgagatttttgactttcaacgcctcgttattagatgtgtcaaattataatctcagagcatagtgaagcttaaagccttttggtgatattaatatcacccttgcacccaaaccctgctcgttggatgcaccattcacatataacttccaggtttctgcatctcgctgattagatgggatttcttctggggttatactttctatcaagcagtcagctaaagcttgacccttgatggatgttcgaggatggcatgttatgtcaaactgcgccaattcaatcgaccattttataaatcttccagaagcatctagtttttataaaacttgtctgaagggctgatcggttaacacttttatggggtgagcctggaagtatgaccgtagtttgcgagatgcgtggactaggcataacgcgagtttttctagagggggatacctggattctgcccctagtaacctcttacttacgtagtaaataggttgttggtgcttaccctcttcacgcactatagctgcactaatcgcatcttccgagatggctaaataaagaaataatgtctctccagttagtagttttgccaaaattgggggcattgcgaggtacctttttatgtttcgataggcctcctcacattcttttgtccacttgaactttttattgccttgcaatatgttgaagaacggtactgtaacgcccgtattttataataat

SEQ ID NO: 57907 - DNA, 1079 bp, Cannabis sativa
  modified_base (43)..(65): a, c, t, g, unknown or other
aacaagccaaattgtttttaaaaataattttctgtttttaaannnnnnnnnnnnnnnnnnnnnnntgatgccaaacatgcactaaatattcaagcaaattaccttttttttttgataagtcattcaagcacatttccttacttctgtatacagtcgttttgcaacaacacaacaaagtgatacttagtgaatataaatacctctttatatatattatatatatagaaaggaaaagtgtatacataattaatatttattcttttaataaagaactatagtagtactactacaataataattattaacgttcaatttctaatgttttttttttccttaaaaaacttaatcgtaatagaatataaattataataggagaaagtgtctttgaagattcagaatttaaaattaaaaaatgattgtatttttccgagaatagaaaaatgaacaatattattcactttggtattgttcggtaacaattatataatcaattttttgattaattaatcaaaaactgtgaacaaattacaagattttgttaagtgaaatttaaaaaagtaaaaaacaaaaaatttaccgaacaagcctttacaagccttttatttctattttcttaatgacagaacaataatttgttattttgttataaatgaaaatattaaaaagattaataatgtgattaaaattaggaaaaagaaatatctagagaacattaataataattaaataaatggaaacttgcatataattttaataacaaaaacaaaatgttatataatacaagcttaataaaaaattaggccaaatactcctttattccatagagcaataattgaaagttaggactcttgttggagtgaaaggaactcaaaaaagaattttataaaccacaaaagtttacattcccatacatatatattttaaaaaaatgtatataattatcttctttttttttttcctgattacttattaatgtcttttataaatatatgtgaaagacattatcttgaatattgattttaacgaaaaaaaaaatatataaatggagataaggttcagaacattattattcagtaatt

SEQ ID NO: 57908 - DNA, 731 bp, Cannabis sativa
  modified_base (383)..(395): a, c, t, g, unknown or other
aattattacacttaattatttaatttttttatataaatatttaaaaagtaaaaaataaaatagattacggtgagaaagaagagatggacttaatgactgatagtttgcaactgtgatagattatagtgagaaagaagagaggaaatattggattccacacaaatgtgaaagattacattcattttccttcagcttcttcctttaatgattttcattcccttacttgaacaaaaccctcagaaatccatagctgagacagtcttccttttggaagtgaataatcttctggaaaagttccaaaatacaataagcaagatttgaggtggaaagacaaatcaacatagctgagagaaagaaattcaaaaatttctacgagttgaggnnnnnnnnnnnnntcaaaatcaatatcattaagaacttttttccattcaaattggaccttcttttttctatatagtaaatcagctatggcccctattgcaagtggcaagcctcgacattttttgagaatctcataaaataatttcactaactcttgagagcaacaaccattaaactcgtgtctaaatgtctttttagaaaatagctcaagagccataatattgtaagaaaaaattatttaaaaatgtattataagcttgaggcctcattatctaattgtaaaaaaaaaaattatttatttaaaaaattattataaggataaaattttaatttatataaaaataagttta

SEQ ID NO: 57909 - DNA, 2239 bp, Cannabis sativa
tctcttattgacataatgagttgcggcgactcctcttactttatccagtactgcaacctatgcatattcattcttcaagcttgataggagatttatgttaacaattatttttatatttttgaataatgtgaagttattataagatattaagaactttattttagtttctagaaaagaagttcacgcttgacacattatttgtgggggactaagttgataactttccatctcaccttttagctatttcatacccttgagaaatttggctatcttgtatcgttagctgtcttattggcattattggtgcattgtcaaattctatagctgtttaatatcattgcaaaatcattttatcacacagttactgttttaaccaagaaactttactgctcagggtcgaatttcggattcctagtccaggtctgcatctggctctcaatgcatgtgcagcagctgcagtggcaactcatttaggggttcctctgacacaagtcgggcattccttgtccacgttttgcccagttcacatgagatcagagcttcaagttgctaaaaatggcatcacaatagtgaatgatgcatacaatgccaatcctactagcaccaaagctgccattaacttactaaatgacattgaatgcaggggcaaaagagttgccatacttggagacatgttagaactcggctcaaatgagataaagtttcacgagatgattctcgaacattgttgcaatgcccatatcgatttaattggccttgttgggacgagactcttaactgcggccaagaatctgaacttggttgagcataaaaatgttgtagttgcccatgatgcaaaaactcttgcactagaaattcttaagtggattgatcctgatgatgttgttttggtgaaaggtagtcgcggtatggaaatggagacagttgtgaatgcattgaaggagacggaaatacaaagtggaaattagagttctacaacattgatgaattatccaactaacagaagctacaagcactgatagtaagtggagataaaaaaaaaaaagaacaatgaagtagtttcatgaaataatgagtgactgacctcgtgtgtggaatggaaatttaaaagcatatttttttagccattagcttaaatttgcaatatttaagtagtaaatttaaaaatgtatcgtttggtttggatgcttctctgtcatattaccttgttgacttgattttcttaaactgttggtatttatattaagaaagcattttactctttttaactttcaactcagcttaaatcttgacgagaaatggctaaaggttttgtttttattatgtttgccaggcatgtgcacttgcttggaaaggaatcaaagtttgttcatggagtcctaatccaagtctgaggctacacaaaatgagctgctagctgaaagaaaagggatccagattccagatgacctacagaatgacattagccatacatcatgggaatttacaatccagctaatgttaggcacgttcctttctggggtcgggtcaggtccatcaattaccaatcagtaggaattctgaagttatgggcgtcatgctcgaaaactatatggcaacttttttgaaagatcatgattccacttgctttcgctttttgcgcatttgcgttcttctggatgcatacaaaccgcttctttggggtaagaggctttagtttgaggatttccaaaccagtttatgggtggagtttaaatatgaaagacttgctgaattctgtgaattttgtggacgaattactcataagacagatgaatgtcccctgtcttaaatcttcaagaacaaggacttccttctgaacgtacctatcctccaattcgcactgctggtcttcccatactcgctttactcgagcctccagtagttcgtccttttcaacaaattcctgtgataattcctcctattcctgtggtgcattcaggaaattatggttttaatatactctatatattacctatatgttcagttgttagcaaccttttgtgtgttgtagtacatttaccctttattcaaccttagtggcttcctatggatgggtgcaaattattattttaccccttattgatatttgttataactattaatgtaacccaacctctataaatgatctattgggtacaaattattattgtaccctttattgatattttattctcaaactcccagcaagctcctcgtaaatgatattttcgtaaattta

SEQ ID NO: 57910 - DNA, 1927 bp, Cannabis sativa
  modified_base (371)..(377): a, c, t, g, unknown or other
  modified_base (1878)..(1881): a, c, t, g, unknown or other
aaggaatggcttaacactcaattcgaaatgaaagatttgggtgaagctagttatgttcttggtattcaaataattagaaactagaagaatagatcacttgtccactcgcatgcagcttaaattgataaggtgctagagcgattctcaatgagtggcaccagaggggcagttataccttctagacctagtacccgtctatctaaggaatagtgtcccattgatcccgaagagataaaagacataagaaaggttccttatgcttcaccagttggaagtctaatgtatactatgttctacacaagacccaacatttgctatgtagtaagaattatgagcagatatcagccgaacccaggagaggaacattggannnnnnntaagcatattctgaaatatttgaagactacaagggattgtgtgttagtatacaagggtggtgctttaaatcatgtgggctataccaactcagatttctaggcttgtcttgatgacataatagtctacatctgggatggtacttactcttaggggtgaagcagttatttggagaagtgtcatgcaacttgtaatattagactctaccatagaggccgaatacatagttgccgctgaggctgctaaggaactaggctggctaagaaagttcttcacagaacttggtgttgttcctagaatggaaacaccatttgtttttctttgtgacaaaactagtgctatagccaacagtaaatagactctaagctacaaagaagcaaacaatgagaggaaataccacatcattaaaaagtatgtggcgagaggggacgtactggtggaaaaggttgatactgaagataacctagctgatccattcaacaaaattctgacaatcactacatttgaaaagcatagagagaatataggattaattaaaatgtattgactattttatgttaatgaaagtcggagtttattgggttttgcgcactacatacaaccattttcaatgtaatcttgaatattcgtttatcaataaagaaacagcaattcaagccagtagcctttttcttcttcatggtgtttcttaaggtattccttgaggattttgttgacaacttctacctacccattttcttgaggatgggccacgacaaagaagctcttgatgatgccatgtctattgcagaaattagtgaacatgtcactgtcaaagttcttgtcgttgtctgacacaatctcctcagaaagtcaaaatcagcatataatgttcttgacaacaaactcaaggaccttcttaaaggtgattattggcagaggttcagcctctgtccttttggtgaagtagtctactacaacgacatcaaactgtacctgtccatttccctttgggagttgaccaattaggtctatcccctaaactgcaaagggccaaggagactgcatcatcgtgagctcgttgggtggagctcttgcttttttaaaatctctggcacttgtcacattatatgacatagtccatcgagtcttcaatcatcattggccaaaaatacccctatcattatgtcttcttggataggctttaccccatggcatggttgtcgcaaaagccttcatgcaattataccgttagtcgttcaacttcggctttggtgacacaccttaagagaggcatggaaaggactaagtacctactagcttttcttctcaattttctcgcttcattttttgtcttatgacaaggctccagtcaggaggtaagctgcgatagttgtcatccatgttggagtgtcatccaacatgtcaacttcttcttggataataatgcttaattcctttaggaactgtatgggatcagagtttgctttgtttgcaatggggatctgttgggttttatgcccnnnntaaaactcatttcaaaataatcaaattacttattaatatagatcag

SEQ ID NO: 57911 - DNA, 691 bp, Cannabis sativa
caggcttcctaggtcgaacggaccccccgttggtctgaaagtaagcttttggtcggccagcttgtgtctaaattctggctggccatataagctcatcctggccagcccatagactccccttggccggccagaaatggtggtgcaactccttgacgactcgcttaacttctttcgcttgttgctcgactggtttgccatgccttgtaaggagactttgtcttgcttttgacaaggctatattcgtactctgtcttggcttacttggacatgacacgttaagtggataaaatttaggataacaatatataagagtaatttgcggcataaatatctaagtttaactctcggttacaaataaatacataagtttaatttttggcggtaatacctaagttataattctagaacttccgtaagtacttaccattaaatgtcaagttattatgcacatgttatttttttattgcatatttaaattaattttttaaaacaaaaataaaaaattcaataacctagaccaatcaaaaattgtcgcgtgacaatttacttaattaactgttagatacgtacctacaaaagttccaaaattataatttaaatattattaagcaaaaaattaaacttaactacttatttacaactggaattaaatatttatgtaaaatttaaatatattttcaactagggttta

SEQ ID NO: 57912 - DNA, 1043 bp, Cannabis sativa
tatttggttgatgagactcaataaataatctagtttattggagcttagaattataggtctatagtccccgaattgccaccttgaaacactgtcaagagggataaagagttgtatagtcgttcaaaaaaatatattttgaattagcaaaatagtaatgatttatttttatagtaaataaataatttttcaaattaattaaataacgaaaagacaaaaattgttaatataaaatttgtgaagacaagatttgttaagacaaaagttgtcaggacaaaagtcgtcaggataaatgttgtcaggataaatgttgcttagaatttctctcaaaatacgtggcagttcaagaggaagccagatggcaatgggacccacgtcacatgacacatcgccttaattactcttggagtccattatttcaaaggattaatgacaaattagttatctccaggaggatccagctggactgcgagcatctcttgtttattcctctccgcgagtgaagtatatctggaggatgatacaagagaactaatgaaagatgacatgtcactcaaagaccaagacactgtatatgcatttaatgtatcatggaaagaacgttagacaccttattctgacaagcgtgtttaagcccattattttccaattttatgagctcccatacatcaatcgacgactgcataaatgagtcgtcaagtcataaataagagataaatcacatcccactaaacacctatagacaacctaaaatccatcataaaatatgcaattatgtcctaaatcaaatttgggaaattgtaccaagtatgatgcaaacaaacacgacaataatggccttttaccaccattataaatctacaaatactccaaggataaatagaaatggggatcggccaagaaaaatctctttaataaacactctcataaatatagtgacttgtggattaaggctcattaatgtcacaactacgtaaaaatcttatcttctaacttctattaaatatttcatacaactttaattattggtggccaaaaatctcggt

SEQ ID NO: 57913 - DNA, 2672 bp, Cannabis sativa
gaaaactctgataggaaatgcatagtttgtttgaatgatgatgtttcggttgttttcttgccatgcactcatcaagtcatgtgtgctagctgcggtgatgattttggattaacaggaaaagctcattgtccctgttgtcgggttccagttgaacagaaaatccgagtttttggggcgagttcatagctggaacgaacaagttttgcatacagtcatttcggaaagatggccacctgatttgctttgcattgtgatttggtgcatcagcagaaacaatgtaaataaaaagaaaatatttttcagattttttttttcttacacagaatatgtcttgttggttttgctgttggcttgttgatttgtaacataagccaatggtttttttgttctctggaaataagccaaagtttcgtaaaacatttgagccatatgatattggcattcttccaaaaaagatatgtttatgctattttcttaaaatgatttgttgatgtggtataacagtagaagttgaccaaatcatatgcatatattttgtgtttgacttttgaataacgtgacattgtaaaaagttatattgagaaaaagaattacattaaatgtgtttttttttaatacaagtttggtacatatatgattttcaacttctttcttactttgtctttttttttttttttcaaaaagaaaagagaaatttgaataatattcatgcatttgggtaaaattggtacacttaagtatatcaaaaatcaaaattagttagatagatcatttttttactaaactaaaaaatatccttctcataactcacccctctctctctcttcctcaattctttctgtccctcttcttttcatgcacacgaaaaccctaacaacccatggctaccaaccactgtgcctccaactgaagaccaccaacccactaacgactacaaacctaagacatagaatctccgaaccagcaccatgaatgtatgtttttcattttatttaattgtattcggtgtgatttaaggttgaaatgtattgttttatttataggtttattgatttaggaataaattgtatgattaatgtttgttatctgtcagttaatgttagatttagggtcaaaacagtcagatctgagttttggataaaaaactgatttttttgccaagcccaatggtagtctgatggtggtccgatgtcttcctgctgttaaaataagtaaatgttgaagatgaaggtctaatggtggtccaatagtggttcgatggtgacctgatgctacctataaatgtaggatatggttcaatagtagtcagacggtggcctgatgccttcccgacgagcttagtgaatggagcttaacatctataaatgtataatatggtccgatggtagcctgatgctactattttttttatatacaaagataaaaaaaaatgggtaacatcaagctaccatcggaccactatgaccactattggactcttagtatggatgagaatggggagtatggatggcgaaattagaagagaagaaaaaagaggagggtattatgggtattaaaataaaccgtgcctattttttttaattttagtaagcttatgtttaaaaaatttaatatacactaaatgtatgcatgtaaattcaaattcttcaaaaacaaatattaatactagtattaggttactaccacatcaatctttacccgttacaatcatatcacaaacaaaaggtcaaatttaattgacatattaatttttagaataattaattcaatactaataaccagttatcatgaaaaaaaatagaaattacataaaatataaaatatgagaaaaaagttaagtgtttactttttttttcttatatataaaactagttttattttaatttatatgtgagacatctaatgttggtgacttttatgacgacgatgacattttcagtgactttttcagtgaattttttgacaccaatgatttttctagtgactttttcggtgctggtgactttttcggtgactttaccagcgctgatgactttttcagtgacttttctggtaccaatgaattttcggcgccaatatctattccgatgactttttcgacaataattgttattatatattttaccaactttatttattatcttttggttaatttttcatattttaattagtatttattttttgttctcatattcttttgcattatttatttttaaattctaacatatgaaagtaaattctattatttttttttccatatttataaaacaaccccttcaatttatcatacttgtgtaaattttcctattaacaaacaactatgtataaaaaattataaaataaaataaatgatatatttccaataatatatatattttgaaatcgatatataataatactattaatatgaaatttcatattactatatgggaagacccataataatataattaaaacatgtgatgttaagctattctaataatttgttcaaaaaaaagaaaatagtagacatatttcttaattaattcttgttcttgggaagaagcttgtttcataggtcagccacatcaatttcaccaatatgattctctggaatccaatatcctgtttttgggtctctcatccaaaaaaatccttcttattttttccattcgcaacacttttaccattgt

SEQ ID NO: 57914 - DNA, 700 bp, Cannabis sativa
gatacacgtgtcagtttcttattgttggtcaaaatttaggtataacaattgccccctaaaaagtgttgtttaaagaaaaaaaaattttaaatgccttcaagggtacgattgtattttttcattcaaattttgcatgcttttattttgatggttcaaaactttgaggcaaatcatttcaacatttaatgccctggctatttcgttctcgtttagttcccatccgttagatttatccttctcttaatcgaacagttaccaccgtttgggtataaatttcaaatttcccttcattttcgccatactgcccacaaaacccttagaattcaaaaatctctcaatcaacctcatctctgaatttgcatgccctcactatctttcactttttttcttcgaatttcatctaatagcatccctcgacttcagaatcatcaagacccagtttctcaaaaatttgagtttcaatcgcaaagttctttgaaacccagaatatctcattaaaccagtaagtgacattcccttttgctgactttcttttatattttcaatcttaatttcttggtatgtgttcttagtttgcgttgtttattgtttgggaaaactttatatgaatgttcgagtaacctagggctagaaaatttaaagttatgtgattcgcaggtcctacgtcttattgtttgaaatattttaccaagatctagat

SEQ ID NO: 57915 - DNA, 1559 bp, Cannabis sativa
agattagacggaactaagtacaaggcaaaagacatacagagagatatgtttcaggactataacatcaagatgagttataagaaggcttggaggtgccgggagaaggaacttatgtatgcgagagatacgctagtagaagcttatagtcagttacatggttaatagtacatgctgaaatagaagaatccgagtactattatagagattgtcatagaggacaataggttgaagtactatttttggtcgctgggtgcttgtaggaggggatttaagttttgtcgtcctgtgattagtatcgacatcacgctcttgaagacaaagtatgggggcacactattagttgcttgtagcggcgtaacgatgatgctgcaaacaacaaccaattgtttccgattgcctttgtaattattgatagtgagaatcacaactcttggaagtatttcttgcagaagttaagggaagcgattgtggagattgaaaatttagtgttggtatcagataggtatcaaagcgatactaataatgacattttaacgatatcgttaaactactaaaaaacaatcgaagacatgtcgcaactagatgtcgctacatgtcgtgaaaacatcgataaaatacacaacttttacatattgttatttgaaagagatatcgataaatgtcgtgaataatgtcacaacatgataatcagcaaaacataaaagttaaactggcaacaatgaaaatcaacccaaaacatgaaaaaaaatagagaaaattaaactacttacctcttttaatttgatgcctttaatttttaccctcttatttaaaatctattatgtttacttcttttttcaatcattctaccaattttatcctatcacttcacgataaatttcattcttctctaatcaaaattttgtcccaacttttctacaaacctacacatccatctacaaagaatacaaatttattattatgtttgaaattatgtcttagttatgtgagtgtgtgaggataatttgggtacaatactcataaaaagaggtatgtttgaattaaattttatttgaaggtaaatttggttaatgtataaaaagaaggggtattcttcaacttctcccaaaaaaataatccaattcctaacaatcaagcatttaaaattcaaaaacccatttaaacaaaagaaaaaatttagaaaaataccttttttggcgattacgttgtgggttccaagattacgatgtggtttcgcgattagatgtggattttgcgattgtgtcgtgggttttgcgatggggttgtgcgacttgggattgggtcagggtttcgtggtagagatgaggctggcgatcatgggtctcgtgcaaaggtggtggatttcgtgtggtcggaggtcatggatttgtgagtcttttaggtggttggtgagagttagagattgagggagagggagcgtaaacgagagagagagggagagttgagttttgaatagaaaagatattatttggcattaagatttttagagtattaaatttctatattatttagaatagaatagaatattaaaacacttt

SEQ ID NO: 57916 - DNA, 828 bp, Cannabis sativa
atttttgacattcccaatgtctatctaaattgcctctctatttctaaaatactaaaccatacgaaaatatgactctattggccaaatgtcgtgtttcactattatgggacataaaatatgaaaaacatgaaattccatatataagataaatagcacaccaagaatttaaatatatctccattaattcgtaaatcataattaaaagtctattttcaaattaaactctaattatcttctaattcttgtattaaagttaagcggtcattagaattattcacctagtgtagctagctcccattattaagggtaataaattgaatttaagcgagtgtccaaataataattttgaaagagaataaatgaagaacattctttatgcttctactatcaaaagcctattgtatgcttaagtgtgcataagacccggcattgcctactctgtcggagtgttaggaagatttcatagtaatggggatagaccattggaaaactataaagaagattatgaggtacctttaggatactaaaaattacaaacttatgttcaaacgaacaagaaatctagaagtagttggctacttagattcaaattttgctagttttaccaattcacgcaaatcaacatctagttacgtatttatagttgctagtggagctgtatcatgtagaagtaacaaataacccttgatcattatttttactatgaaggttgagttcgtttctcgttttgaggctacatcacatggtgtatggctaaagagtttcatttcaggccttagagtggttgattccattgcaaggccgctaaagatgttctgtgacaattca

SEQ ID NO: 57917 - DNA, 1595 bp, Cannabis sativa
tcttaactgccgctggttgacaaccagcttttctttgtagcagctctgtacaacagccattgtgagccgctatttaattacctcgcaattcttttgcataattactttaccagactaactgccccttgtccaatttttcttgcaacatgttccctcccaaaataactgaggtatcctttcctcctacaaaggaaggttatggtccctagtcgcttgggttactgggtggatcgggctcatcatgggcattgtcctgcccctttacatattgctgaaagtgtcctcgcgctatgaggccttctatctcatctttcaactaacgacattcttcaattgtatgcccaatatctccatggtattcacatcgtctggtagggtcccttttacgtctcacatgtttcatagtatttagttcgctaaaaaggacctccttttcatgcgcgaggtagatactttcccgagtttgattaagctcactgtagtcagtataaatgggtacatatttttcgtgtttcttctgtttcttatctttggacaacttcttggagtcgtctttcctctttgatcctgaagcttcctactcgaattcttcaacagactcgcttcatgattattttcctggttcctcgacttgatgcctcctgagcttattctccaactcatctattcgcaaatggattgaatccctttgctttggaccaagttgttgacgaagatcaggtttttttcgattcaagcattctcgtagttctaattggccaagacggctggcagatcttgctccatccataaactatattatgcctttttgatcatcgctgcgacgagtattctcttctcctcgcattgatcaattatgaattaccgtgtgcctcacagtagcactcgcctcttcacgtcctgctcttctccctaaggtgtgattcgtctcgttccccctattggggtttgtgtgagctccttccctatgagcttggagagaaggttggctatccctgaacgatgacccatgtatcccaggctgtgtccccagatttccccttgtcctgtggggaatttctggtttcttagctcctggttgatcatatggcattcaccttcaaggtatcccccagtttcctcaggttgtctctcctgaatgttttggggatgcctttgggctgcctcctgccccatggtttgcgagtcgcgaggttcgcctcgtggttctctttccccaaggtcatgttgattttaggagccattcccctgggatgccttggctgtagctacctcacgctctaattcagcattacgccagtttgcttcctccaatcaatgcctgaggttgcggttttctaattcaacaattggtatgtaccttgttagattataagttccatcctcgtcaactagataaggaggggaccaacagttgcttatcttaggaccttcaagtctgtttcccaaatcttgagttttcccggagcttatggcctgttaaaatgatacgtcaaatgatccttggggactcattgactcttttccaagacgatgagtggctccttcataaggattattttctttgttgccagccataagaggaatattatttt

SEQ ID NO: 57918 - DNA, 537 bp, Cannabis sativa
ttgttgaagatcgaataaagcttgaccaaagggcagttcttcttgaggattagtcaacacagaaagaaatgatgaatctcgttatatcttgtctctatattatttaattttattttatatttattttccgattgatgttcattgttgaatcaaccattttaatactttagttcttagtttgtttgattcttgaaccgtgttaatttaccaaattaatacatactacattaatatgtatgtaaatttgttatatatattgatgaaacaatttttgtacgaaaataaatttgtttatttcaatgatattttacaattgtcaaggaaaaattaaatttttactagtctattccattctattcaaataatgcttcattatttcaaccaaacaatataattatttttccatttaccattactattactataccattatcatttatattcttataattcattccatcctaaacaaaaaagagaaaattaaaaaaaaaaattaaataatataaagggagaggtggagcaattaataagactggt

SEQ ID NO: 57919 - DNA, 890 bp, Cannabis sativa
ttttccaagttgatttatctttccacacatcggatgggcagacgccgaatccaaacatgcgaactgatccatgtttttccccacccataattttagaaagtgaatcattcatagtcttttcttttgatgaatcctcattcttttcttctatctcttgtaattgtaactatcattaatttcacattatagacatgttaattaagattgaactaaactagctagcaatatataatacataatttaagaataatttgatcataccatagttgcacgcgttggcgtactcgcaccacccactttctacagatgaacataattaataagtaataaaaccatatctaatttggaaacaagattcgacttttaatgttaaaatagttttcaaattctacctgtaatgctctaagttgtgcaaaactcttcctgccagttgtatgattattgcacgactacttttgtgtttagcacttttgctctagaacaatattataaagtacaatttagttgattaaaatttctgaaaagatagtaaaaacaaagcaagttaatttaaacttgaacaaaaattacctgtgcactttctgtaggccaatacttgatcaattcttcccattgatcatgatacactcttttatctttacattttttttgcacctcaaatgataagttctccaaataataagtgtttttaaggaatgatttctactctcgaagtttcttacgaaacattctaaaagtccaaatcttagcatcaagaggaatgtcaaatttttcctacaataataaaacacttattattaacaaataataacaacgacgacaacaacaacaataataataataataaagatcaatattaaaaatagattaatctaaactttccattaaat

SEQ ID NO: 57920 - DNA, 1762 bp, Cannabis sativa
  modified_base (1694)..(1719): a, c, t, g, unknown or other
ttttcccaatattagtgtcatattgttctaattttttgatttaatataggagcagttggaagcagctcaagcaactcgttctcagatagattctgatcctgggtcatcatctgatcaagccaacatctttgaagaggcattgggttagaggaggggtcacgttcgtggaattggtcacagattgaagggtacatattcaactagtcgtgcccaatccacccaatcacaggcaccttcacaagatttgataaatgacatgagtgcgatatttactctcaattcatctcaaatcaacccatcaaacatggaccctacaaagttagcaatatttaatatgcttaagagtaagtactccactccagcgcctcaactgtctcagatgcacatgtctcaaggttcccctgcacattctcaacattctgcagcatcatctcacatgcacacatctttgacatcatagtctcagcacccaccacagctgctctcccagcctttgccataaccatcacaccctccactgccttacccttacatgtatagaccactgtacacacatccatacatgtacggaggaatttcacagtagcatccatcctccttctgcttgctttctttccaggtaggtttgactgatgtgggttgatcatcacagcaagctcagccagcctacccatatcaatggatgatgggggcaccgacaacagccgttataaccaccacatacatctcagccgctacagccaccacatacatctctgccactacaaccacctcagacatcacaaccgctacaaccacctcaaacatcatagcgccaaccatcgagtcatttagagttcgatgagaacgagagatcaaatgacttttttacctcagctgtaaaaccaaaagactactattatatttttatggtaagaactattataattttttttttctttaagttgtcttagttactaatatttgtaagaactatttaattttattatattattgtgcaactatattaatgaagaaatttatatttgatattaattattattttaaattttatttgttattataattatttttaaaatattaaaaatcaatatttcaaataatataaattataatataaaaacctttaggggtaacattgtcacccctaaaagtcaaatacaacaattcttacaacaccacgacattatgggtattaggagcgacattgttgcctctaaaagtaaaaaaatagaaattcatgtattacttttaggggcaacattgtcgcccctattttcaggcgacttttttgtcgcccctaatagctcttttaggcgcaaattattagaggcgaccttttaggggcgacatgtcgcctgtaaaagtcattaggggtgatttaatgttgttttaggggcaacttttgtcatcctaataagtgtatttgttgtagtgggttgagttatctggcacaacaaagcagcacaagacgattggcagactgcgaatttcagcaagcgatggcagtaggcggatgacaattgagtgagtagcaagtgacgattgttgtttgtgggtgaacgacgattaggacttcggttgtgagctgtaacatcctaactagcataggcgtattacgtgatttttaaacgtactgtgcagttcattgctaataacgactaattacgaaaagcactgttgtcccgaggatnnnnnnnnnnnnnnnnnnnnnnnnnnacatgtacaatcttcatcagctcgtcctcacggttcctaagcc

SEQ ID NO: 57921 - DNA, 1017 bp, Cannabis sativa
gtcactaacatttttctattttcttcccaattaattcttttttaataaaaaaaataataattctttcgagatcaattatattttttctaatctattatctattcaatcattcttttgcctcttatacaactatatttttatttatctacatgctttctctttattacccattctttctccttcactttcttgtacaactatattcctattaatagattttttatttctaatatacttccaaagccactagcaactttgtgaaatacaaggaaagggaaggataatactttaggtaaaggcaaaaaaacaaacgtatgtacatacagatatttttttattatgtgtgactcatatttaatacaaatatttaattaattttttttatattattattattttttttaataatttgtgatatcaataaaaaaaattaataattaaatatataatacactcttaataactctaaaaaaaattaaaataaaaaaaaaaaaagcaaaataataacaactgccaaaaaaaatgaaaattttttaataataaaaattttaataatctatcttctgaaactagtgtctgacaagaagaatttattataaaattgtgttctttccaaactctaattgttaatcatctaatgaaagagaaaactttttaacttcattaatggaagtcaccaaacaaataaattctatcaccaagtctttttattttattttttttttatgaaaattcttacactaaaatctctcaaaattgatatttctattacttctctttattagggtaatattttttttggcaattattattattttgtttttttttttcaaaatcttttttagaattattagggtgtatcatatatttaattagtaactttccttattgatatcacgaaattattaaaaaacaaaaataaaaataatatatgagagtaacacataataaaaaaaatgttttattaaagcattatatcctatacttataattattactaacctatatattatataa

SEQ ID NO: 57922 - DNA, 833 bp, Cannabis sativa
tgacatggcaagttctccttctaatattctaaattatctaatttgtggattttttgaatttttatttgaaaaaaatatgataattatttaatatatttaatatattaatatatttaatatatttaatatcattaatatatttttatcagttataactttttatcattaatatatttaatatcatctatttctcttcctcattatgaatataatgtcttttaggttttatttaatgttattattattttaatattgtttctataactattataccatttaaatttgtttcagttttaaaatttactatcattcaatacattgtatattttatttatattactaacaatcttttccgcttcttcaatatatatatttatattgtcaagatatataacacatactataactaaaaaaaaactcaaaccgagtaagtgctctaactcaatctattctttttctgatttcaaaaaaaaaaaaaaaaatctattctttttctctctctctcttttctcaactcatcatgatctttgaactttttttttttttttcgattttataataaaaggtttaatcttattttatggctcttatatatattttttatttttgctacacatttttttaggaaagacaattcttttatctgtattgaagattaaataactcaaaatagagtctcagtacatgacacatgcatctacaatcacaggttaatcttttctccattgaaatctctcctcaaatgtaccctttcatctaaacatcaactcttatttctcattctttattttttccttttgactggtacaaaagaaattttttcagtaagttat

SEQ ID NO: 57923 - DNA, 1155 bp, Cannabis sativa
cgtcccgatatgatatatgtatatatttaagttttaaaatcataactactacaattaaaaaaaaaacttcaagctttaggctttttattgagtatccatttttttacttccacttaagtttattgttttattgagtttttatgattatttttttttaaaatctctttgagatatcaattttttttcaaaaatatgtatgtaataggtactcgatgggaattcttcccccattaggtaatcctcgtcacgtccccactttaatttaaacggataatattggacgggtatgaggtgaatttaataagcgtgtatgggggtgggagagcaattctcgcatccgtcccgtcccgtttatatccctattcgtaaatggtaactatatgtcaccatcttattttaatttaaaataataatataagcaaattaatccgcatgtcatattctaattcgtgtaaaacttaattttcataattaagcttatgactaacatttgagtaatgtgtttaactactcaatcttattattccaaacaaaaaaacaaaaccaaactactcaatattccaatatgaaaaaaaaaaaaaaaaatctgagattattttttgaaatcaataaacttctcattaggcaaaagccgaaaataaccaatgatcaaatacaagatggacacctgtaagcccaattcctttcatgttttttatcatgtgtaatcaaattttatttgaaaaataaccataaaatgttctgaaaaaaaaaaatactaataataactatttccttgtttgaggaaaaaaatactaattagaggacagaaatattatcattaattgctttgaaaaatatataagtagtttccttacacgtcataattgtttaaaagttactttattcctttgttattgaaatatagcattgttattgagcattaatggtgtttagcatttgtaaacatgtggtcttgtgtttgactagtaatactctttaatgatacatttactacacagtattcagaatcggaataaagtaatagaaaaatgtaacggaacaaatgaagaacagtcgaaatcaatatttataatatgttgtttactaaaactgtttggaaatgaaatgatagtaatttatcttgtttattttatcaagaaacgtaatcggaat

SEQ ID NO: 57924 - DNA, 701 bp, Cannabis sativa
ttgtttattataatattattttatgaatataataaaaatattttaatactaaatatatataattatttagatttttctcttaataatattatttaattattaaaaatttaaaaaataaaaaatagtgtggtttacagtgtcccactaaatttggtggaacattgtaaacaaagctatttatgagtataattttagtgtcccattagagtaaatatagtgtgaaactacactagttagtgttttagagtctgattgggcatctccaatagggaaacttaaatttggtgttaattcaactagaaaactactatttcaacactatcttttttttcaattccaaccacaacagtaaaaattacaccaaattttatattccttattattttattaatataataaaaatatattaatattaaatatatataattatttagtttttctttttaaaagtattatttaattattaaaaatactttataaaaaaaagtgtggtttacagtgtttgattaaatttggtaggatactgtagacaaagctatttaggagtataattttagtatctccttaagtaaatataatgtaaaactgatcaaaatatataaaatactaggacagatatcttcttctcagcaccggaggtaaggttcattctggcattcttttatcttgttctctctttaataagattagagttaagttct

SEQ ID NO: 57925 - DNA, 1077 bp, Cannabis sativa
tatgatgatcaaataaaaacagcgattttggaacatatgatcccatctattccgatagcaataaattgggatggggacataaataacacatctctttgtagaagattgttaggagcaacaagatcgtacgaagaagatgcaagtgtgagtttttctggaaaacgggttaaagtgagtgattatggtacgtgttttaattttttggtaatttatgatttcatttgactatataaggtctgttattattggttttatgattattttttaggaaaaggataatcaacaaaggactttatggaaaaaggagagcaaagtgaggataaacgagtaaggggagggtccaaaggagaaaaggaagagttaaaaactaaagaacttctcttatctgagggaggtcaaggaaatgaggagatggacttttactctggaattttccagtatggcaatgaaggaagcaaatgaagggacttaatattgtcttgcaagttatttagtttattcaaataatttttaaggagttctgattagttggtttcagataaattggatttattgttttgaatgttttttggaagttttatttatcagtttacgttaaaaatggaaataagtatcttcttatgtttaagaagagtgtttctagttttgatgttaagaagtttatttgctcaagtaatgtcttaaataaaagttgtttttgcatgataattattatttagtggtgccatatttacataaaatatatctttaattttattatagttgaatattacacttaaaaaatcacagagactattcacgaaaaattggttacaaaataatggtatagctgggttttgatatgtgatatgactagagtgagtattggttgataaatagtttataaatagcatctaaagtaaataaacactaagtaaatgaaatattaggaaaacgtgatgacggaagcaaaatgatttatatatatatttatagtttataaatataattgaaacttatttctacacatatatttaatggttaaagtgatttgtggaataagcattgaaattattttccaaaatccttacagaaaat

SEQ ID NO: 57926 - DNA, 2519 bp, Cannabis sativa
tgagagagaattattacgattaaatttttgagattgtattctatatccaaaaaaatatccctaataagaaggactcgtggagtatgtagaatttaactacaaaactacgtaaaaatatctggtgtgatcttatcatttattacttatatatatttttgtatagaattcattacgtaaaggctattttaacttagttaacaaaaatctacattagtagtttgttgctttcattgagagccttggtaataaaactcagaaaaaatccctccttataaatttgatctaatcacattcaatggctactgacaatcaaaatgatggaaattgccttggagaaacaactcattgccctggaaaggagccaatgggatcttaaagaccccataccactgaaacatcttgatttaaggaggagcgatggtggtggtgatcaaattcctgaaagaataaatgaagatgctaataattcttccagtacgtgcctaggagtgaggatgctaatgacccaactagatatgtaccatttgtggtgttagagaatagacaactccgacaacgcttagccaaatttaaccgacgaaatgctaagttggaaagagaggctacaacggccacggcgacacaaggaagaaatcctcagaattaacctgatcctacggtgagaagaccacaaggtcaacctcgaggctttagaaccaggagacgggaaacaaactagggaaaaccccaaaacacccaggaagaacaacctaagggtacaagggatgttccaatggataatcaaacaaataataatcaagagaaatggtgagacattcctcaaggatcccaaggatttataaactaagggaacgaacaaaatgatatactagaagcgtctcgcaggaatgaggatgtgagacagcctcgaccaaggaaccagggaatccctcatggaaacgagagaaaccctagaaactaaccaaggtcaagtgggctacctccaagacaccatcaacgtccttctcgagcagagagaggatgtatacacatacttgaatagaggacatgtatttaacctcttttgaagaagaaggcctccgatacaagataaggcaagttcaagttcaagacgttaaaggtctcgaggacatagtcgatcgagtaggcaaacgggagaaggaagtagacctcgatgttatgctgaccaagaaagtattagccattcacaaagttatcaatctgaaagttattcggaggcaagatatatgagtaattatgagcgaaggtagcttgaccttcgagaacacttaaatcgaagacaaccagatcttcacgagcgtctgaatcaaaatgtacctaatttgtgccatcagcttaaccaaaatgcgaatcaacagcaagtggatccaatccaactgcaaataaatgaactagaagataagtttaggaagtatcaagatggagagcatggtaaatttccaagctacgattcggattaggaaactgagtcattcaatccagatatcctaaattttgaatttccccagggatttaaaaacccatatgttttgtagtatgatgggagcacaaacccagtcgctcacttgaactttaacactattatgcgagccagcaatgtcacgaataatttgcgttgcattttattcccgacttctttaacaggagctgcaagtagctggtttgacaaatttacttatcattctataacgtagtgggaatagttgtccagggactttaaaaagtaatttcaagtcgctagagataggcgacctgaagcatcgtccttaaccaacataaagcagcaactaggcgagtcacttaaggcttacttaagtcgctttagcattgccgctacaaaggtaaaaaacttgaatgatagtattcaactcactgcacttcaggtaggggtcacagctgacctatccacggctggagcaaaattgtgcgatgacctacaaggtcgcccagtgaggaacatcaatgaatttaatgaaagagcacaagtatttgtgtgcaaagaataagcaaaaaatgagatgaagctattgaaaactggctcgggaagtaaaccaagcacgagtacagcaacagcgagtatggtcttgactaaagaagataattctagtggtttaaacacaaaaagaaaagatgattcgaaagaatcatctaagaataaaaagaaacagaaaaagcacgacaagtagtttcgatttattcatatacaccaagttgaatgaaactcgtgaaaacatattttttgcaaataaaaataggattgaattttgcaaacctaagcccatgaggaacgcaagacataagcgtgattccacaaagtattgccgatttcacagacatagggcatactcttgaagaatgtcaacaactgaaagacgagatagaaaatttgattttgtgaggatttttcaaaaaatatgtaagacatcaaggaaacgagctaaaccagccaaattaccctaataacctaaataactagagaatgcaatctcccccagttg

SEQ ID NO: 57927 - DNA, 1405 bp, Cannabis sativa
atgtctcatccaacatccgatccgatccaattggatttttaaaatttgcatctgatccgatctaattatgattggatatccgattctattggatcgattggaattggatcgatcattgggattggatcaatgactttctacacacccctaatcatatatatgtttttaacacaataacgtgtaactaatcaaatcacacaattaaaaataatgtggttcttatttatttttaattgattaatattttaatacaattgtgtaataagtgcatacaatttaagtgtgtctagctttatatatattaatgtttttttgaaaaaaaaaattaaaatttaagtttgattaaatattttttatatataaatgttcaaacgaattgacaatctaaaagtagttggttactcagattcagatgaagctggttgtactgattcacgtaaatcaacatctagttatgtgtttatatttgttggtggagctgtgtcctggatgagtaacaaacaaacaaactttgactgctactataagtatggaggctgagttcgtttcttgttttgaggctacagcgcatggtgtatggctaaagagtttcatttcaggccttagagttgttgattctataccaagaccgttaaaaatgtagtgacaattcagttactgttttcatagctaagaacaacaaaagtggaagtcgaagcaagcacatcgacattaagtacttagctattagagaacatgttaaagaaaatagagtggtcattcaacacattagcattgaattgatgattgtcgatcctataacaaaaggcatgccacctcattaattcaaggatcatgtagagaacatgggacttggttcccttgtgtaatttgtacaaataaagttattattaatgaaactcttattataatatttttctcataattatgcgcatcttaattttacatttgagaaaattttagaggacctgaataaacctaatgtttaagatttattcgcttaagtaaattgccacataaagtacattgttatatagtaaatatattgtaatacatggaagataatacttgacatataatgaggacatatccctattattcatatgtttattatataatgatcaacgttgggtttgaatgttttagtctatatactgaccaagtgggagaatgttagaatattttctatttatggaataaaataaagtaatttattttgagatatatgaatattttatattcattgaatctggataaaattaattacatgatattttatatatggttagatttcaatattcattacctgatttggtttcttaaaaaccgacgaaaatactcccttttgtagtagtgtattttgacaattaatgtggcgcagatactgatggagtatctcacctat

SEQ ID NO: 57928 - DNA, 970 bp, Cannabis sativa
aatttaggagaatgtcacttacataactcaagaggtctccgccactgtgtaattcattgaaaaaattgtttctcttgccactgagaattcctagaagcaacacaccttattaaattttggtagttaatatgctgtagaaagagattgttgtcatcttaagtgtagcctccccaaagattccagatctagcctaccccagtttaaacattcattaaaaattgttgattactgttaaagtttaggtcataggtaatttaattaaataaataataactttaataaataacaaaatattcaatataaataataataaaaaagacaattacctgatggtcaatatcaatcgttcttgttctttaggtattattaaggcatttaagtccatgaaaacacaacaataattgatgatataatatgttatcatggatagatacacattgttgtaacacaacaagccccaaaggacgccagagctcacactctcacaatgtcttgttgacacggtggtcacagatgtcgcatagattgacggggcaagcatcattgatacatatacatcaccctatattcttcattttttatttcttgggtgggtttcaataagagattttgagagataaataaagaaaggaagatgggttcagttctgattttcgatctttaaatttttaccaaagctacataaataaagaaaggaagatgggtttagttcaattctgatttgtttaaaagaagttatcgagcgtggaatgtttatcatcacatggtagaatgtaattctctaacttaaattctccttttatggttaaaataaaagatatacttatttttcaaaagattaattattaaaataacattaaaaaaatatttacataattttaaatttaaattaaaatttctttatataaaatatttacataatttttatttttaaaataaaaacacgttaaaaaaaagtcaccaaataatt

SEQ ID NO: 57929 - DNA, 1587 bp, Cannabis sativa
attgatgttgaataaaatagattacattgaaacggagttttatttagggcataaaacctaacacattagaacccgtgaaagtgcatcagctgccttgttcttgatcccgaggcgatattgaatctcaaagtcatacccaagtaacttagttaaccatttctggtgttcctctgccactaatctctgctccagcaggtacttaaggcttcgcaggtccgtgcagactataaatcggtgacccaacaaataaggacaccatttttgaaaggccaacacaatagccatcaactctcgctcatagactgactttacttgggttcgaggcgatagagcttcgctgatataagcaatggggcgcttgttttgcatgaagacagcacccaatccaacacctgaagcatctgtttccacaataaaagggctggaaaattcggataaggcgagtaccggcactgaacacatagcctccttaagttggagaaaggcttgttgggcttccgaggtccatccgaaagcatctttcttaagctggtctgtcaaagggcgagcaatagaaccataattcctcacaaattttcaataataacctattaaccccaaaaatcatcgcagctctttaatagtccttggtattggccattgtgacatggctgccacctttgtcgggtcagctgaaactccatgggctgagacgatgtgccccaaatactccacggtgtcagtgccaaacacgcatttcttccagtttgcgtataattgatgttgttatcggcgtcttagaacctcttctaaatggttgacatgtgtttccatcgatgggctatacaccaagatatcgtcgaagaaaaatagcaccgtgtggcgaaggagatctcaaaaaatggtgttcattagagcctgaaaagtggcaggtgcgttagtgaggctgaaaggcatcaccaagaactcgcagtggcctcgtgtgtgcgaaaagcggtcttcttcacatcttttgctgccattcggatctggtggtacttggatttgagatctaactttgagaacaccttcgttccttgtagttcatccaggagctcatcaatgaccaaaataggaaatttgtcggctaccatctctctatttaaggcctggtagtcaatacaaaaccgccaactcccgtccttctttcgaactaacaaaacaggacttgagaaaggattgttgcttggtacacaaatgtcggactgaagcatatctctcaccatttttctatctcatccttctgagtttgggcataatgataaggacggacggagattggcccaactccttccttcaaggtgatgcaatgttctgcagcgcgcttcggaggtaactcggacgacatatgaaatatcgtatcatatttttccagtaacgccatcaattcttcaggcaccatctgctcttgctcactggcttgcgaatgtagtgacccaaaatgtactcgaaaactgcaccccacctgctcgaccgtatgcaccattgccttcaatgagatgggagacttacaaagagtgggatctccttgcaaggtcacccatgtacctcctgttgggttttatgccc

SEQ ID NO: 57930 - DNA, 936 bp, Cannabis sativa
agtatttagttacaagttgtcactaatttaattttaatcacaataagtattgtgactaataatacatttagtcacaataaattgtaatttttggaattatacttttagttacggaccttttagtcacaacataagaatcatgatttataattagtcataattttttttacttttagtcataaattttgttataaatgaagtaaatttcttataatgacactaggctaatattatgcacgtgtaatgcacgtatacttaaatatatgcattgggtgaaaatggagattgtacaatgtagaaatatagatcaaattcacattcctttttaggtttcaagctctttgaatttgcatgatcataccaaacattttgcaattttttaagagcatctatagtggaaagttataaatatagtatattgtatttttttaaatattttgttaaaacttaactctaacgattatgtaaaatgtgtgccaaatttggcctaagctaaaaattgtatcaaatttaacataaaaaatatcatgtgcaaattttagcccacaataaatatttgttaattactttttgcgctattcattaatgaaaaggtttttaaatttattagatattaaaataatgagcattgttattggtcactaatggtgccccaacaccttaggtagctccccacgattgactaacaatattctctaaaagctattttattttattttttaaaataaaaaagctattttctatgagacctgataattaattatattaatagttgtataacactgaggagagtactaggctccagtaatgcttttttaataattctctaaaataatataaataaaattaattattttgtatattttcaatgagcatgacttttatagctaattaatttgtaccttatgcatacattgaagtacaaatataaaaatt

SEQ ID NO: 57931 - DNA, 984 bp, Cannabis sativa
gaattttgggtcgactttcgctatgaacgactccctgaattttgctttaatgtggttgtctaggctacctgtttgaacgatgtgttgcttttatggaacgaatggatatcggtaatgatgatgactttcaatatggaccatggatgaaaggtgcaaagctccctacaagtggctatgacagatatcgcacagatttcactaaagcaaatgcttggcctctccttactagattggctagaaattcaatctcttcctcactgccaaacattcattcacgtggcctgccacaaccgagaatactttatgatggggagtcttctaacccacaccttcaacataacacacatcacaaccattccaacatttccatccctaacaaaacatttccatcgcccactaacaccagacttcaaccttcactaacgggtcttcaccttgctgcaacaaatatcagtacccacaccagacacaacacagttcaaacaccctcttcatactctcacaccacatcttctctcttgcctttgacattggactcaactgctgcaataaattatcctcaaaccagtcacctaatagaccaaacgccttctccttcaactcaaacatcctcttgttatggctaccactcctagtactaaccattctaatatcactgcagatctttcccatatctatatgcatgatattgattatgattcaccttcacatcctagttcaaacaatgtctttgctacctatccaccatcacaccacactcaaccatcgatacaatttctatcccaacttcacacacctgtaccatctacaatcacctatgctactgcaagtcctaatgtcactgctcttttggatcaagatatttcaccaaattgtatccctaaaagaccaaatgaaaccatatctatgaggaaaatgctaaaacgaagtcgaggtttgaatggagcgttatcatcttcatcaggggctgatgattttgtgcct

SEQ ID NO: 57932 - DNA, 2386 bp, Cannabis sativa
  modified_base (1172)..(1175): a, c, t, g, unknown or other
  modified_base (2317)..(2323): a, c, t, g, unknown or other
taattgccttttctaatccacattactagagcggtcattacacccttgttctatagatgcaacacaaatttcaatatcattacgaaaaataataacattaaaactcgaaaaattcaatttatattgttgcaactgtaaacatgaaagagaaatcaagtttctactgaaatttgaaataaacaaaacatagtcttaattcaaaattttgttctgaaacttgagttttgcttttcctcaagctcttaccgataccatttcaccattaccaactttaagattcaactctctaggttttaaataatcccaaatttcaagcagctgcaatgaacaacagacatggttagtagatccagaatcaacaatccatatgaatttgccattctctgaaacacatgattcaaaaactaaagcattaccattgttcttagtgttgagaagtttgggacattttgatttaaaatgtcccttctgttcacaattagaatattgaataatatgtctgcttagttcttatattgttcatattgttggttcaatttgttgtgaaagataatctaacaaagtggaagcactctctctattcttctcaactgaccctaaagtagtaggactgccggaggagtcattctcaatatcttcagctttgtttttgcccttatctacagtactggagagggacctccttgtaagtgacaatgtccttacatgagcatgtaattcaacgcccatcttgtctatgtcggatgagttctaattgttaatcataaaagatacaacaaattgcttaaacttaggtgataagctgttgagaacaaattgaactcttttctctcttgataaaacaattcccaacacagttactttctggaatttcaagttcatcatgagcaagtgtgaagtgatactctgaccaggagtcatcttcgcactttggagttcatttgcaaaggcctatactaattgaggattgggattgttaaacagtattttgacactacaaatatcaataaacagaaataaattgattcaaataaattcatacacaaattcagaaaatagcaagtaaagaaacatgtttgcaaaatacaaaaataaaacatattcaattattttctaaggtttccaacaaaatgaaatacagtgtctcggtaggtgagagtcaaagataacannnnttgaatagagtagtcagctcatctgaaatggagaccgttctagcaaccttttattcaattaaaataagaatccaacgttatttcggtaggtaagagtcaaggttatccttattttataagcttctaccattatttcaaactttataaatttatttctaagaagccaccgtagaggagagtctaatagaaacaaaaaaattacaaaaaacttatcatacgagatcttacggtgttaatgcttcaatggataaccatccataagggggatgaagtctaacgtctcgaggttacattgaaaaattaaccatgtaagaccaacaatgaagatcgaatgtccttttgattaaagctcattattaaaataatgtattttttaattaatgatttgttttaatctatatattttaataataaaaattacttaatttaagttggtatttcaaaaatctttatatataacatataatttcaaaatttatttaaaatataataaaataaataccagaaaatatctaatttaagtttttctaaaataactaaattttcaacttaaataattttcaaaatttaattaagtaaaaaattgattatcttgaactaatcactttaatttgaaaaatatctcaatttaagttaatctaaaattaacaaattttcaacttaaatatattttttttaaaagaatatctaaataactaatttcttagaaattctacttaattattaatttcaaaaaaatattttaatttaagttgatccaaaatcaatttgaaaaaattaatttttaatttaaatatatgaaaactcaaataattaagtatttagaaaaatctaattagttataacttctttatttaattaaatatagaaaaatacatatagtttatcttgaattaatttcattaaactaagtgtgtttttcttaaagtaatttcaaaataatctgatgaaaaacaaatttcatatattttgaaaattaattatgttgctaatcaattctattaggttaaactagtgtaattaacatattacaattatttaaataaggtaaatgggcattcacaattggaattgttcatgtaatggagggttgggctcaatatgttgtacctactactaatggctccctaactctcacacannnnnnnaaggagaggaatttaaccttaattaaatagggatattttctataataaactaaaaatggaaca

SEQ ID NO: 57933 - DNA, 3396 bp, Cannabis sativa
  modified_base (1364)..(1371): a, c, t, g, unknown or other
aataatataattcctcaattaactcataattatctaattagggttttgctaatccttttcttaattctgggtattacagttggcctcaagttgacacatgaagtacgagatgaccacctagatatattcagcgattctcaattagttgtgaatcaagtcctaggtgaatacacagctcgaggtgatagaaaggtgccctacttgagcaaaattagagacttgctaagtcagctcaaaggctacacgatcaagcagatccctagagaatagaatgccacaacagatgcacttgctcgcctaatgagcagtacgatagctgacaaagcaaacttggtgcccatacagttccttgaagagcccaacattgttgtcccagaggaagtcggcatgctggatgacactccaacatggatgatacctatcgcaacttacctccaaacaagagccttgctagaagacaaaaacgaggctagcaaactaagaagaaaagctgctaggtacttgatcctagatgggataatgtacagataaagtttctctatgcctctcttaaggtgcgttaccaaagtcgaagctgaacgacttctgatagaagtgcatgaaggcttctgcgacaataatgccgggggcaaagcttgtccaaaaagatactctgataggggtactttcggccaatgatgattgaagacttgatggactatgtcagaaaatgtgacatgtgctagagatttttgaagataccaagagctccacccaatgagcttacgatgatgtagtctccttggccctttgcagtgtgggggatagacctaattggttaactcgcaaagggaaaatgaggggtacaatttgttgtcatcgctgtagactacttcaccaaaggagggatgaattagttaataaattcttgtccaaatcttttcccatgtctaaaatggataatattaggagagaaatctatgaatttaatcagaaagatcacgaagaattttatgaatgttgggaaagatttaaagatttattactaaagggtccataccatggttttgaaaaacagagtttggtaaaatacttttatgatggattatctcccttaaactgacaaatggtacaatcaattcacactggaaatgtttcgtaatttaaaggggaagaggcttgggagtctctttagaatccttttgtaaattctcaacagtggaattgcaaagatcctagatcgaaagcttccaacacgcctaagagaggtggactctacaatgtcaaagatgatgtagatataaaaactttgttagcaaatctaactaggagagttgaagatatgtcattaagttagtccatgaatactcctatacataggaatnnnnnnnnttccttatgctatagtacaagtcatagtgcccagtcctatccatcactgcctatataccaagaggcattctctgaagaagtaaacgctcttcagacttatgggaaattatctgatagcccatttctcaatcctacaatccaaattggagaaatcatccaaattttttatggagacgaagccaacctccaatgaaccaagggtaccagtacaacacgcccgatcagagtcatgcccaacctaatatgccatatcctcaacaacaaagaaagccatctttagaggatactctacaacagttattgcaaaccacccaacaagctttacacacaaattctcaatccctgttaaagcttgaaacacaaataggtcaacttgctactgctgtagctgaaagggaaaagggaaaacttcccaatcaacccattcccaatccaaaaagtcgatatgaggtaagtacatctagacctattgaagaagctaagttaattactatccttaggtctagaaaaattattgaaaaacctaattacgtacctcaacctgatattaaaatgaacaaagactcattgaaagaaaatgaaaggagttagcctgaaagtttacattctaaagactcagttgaagaatcgagtcaaatttattattcattccaaaagctccatttctacaaagattgatctcgataaaaagaggtagtcagtatggtgacatcttagaggtattcaagcaagaaattacaaatatccctttcttagatgccattaaataaatacctgcctactctaaattgttgaaagatctgtgtactgcaaaaagaaacatcaatgttctcaaaaaggtatttttaacggaacaagtcagctccataatttaatataaaagtcttgttaaacacaaagatccggggtgtcccacaattccatgtattattggtgatcacatgattaacaaagctttacttgatttatgagttcgtgtgaatttgttgccttattctgcttataagtaacttagtttaggggaattgagaccaacatctatgacacttcaattagctgatcggtctgtgaaaattcctagaggtatcatagaagatgtttcgataaaggaagataaattttattttcctattgatttcattattcttgatactcattttgttgaagacatcaatgttcaaattcttatcattttgggtggaccatttttagccacatctaatgcaatcatcaactgtcgtaatggtgtttttcaattatcatttagaaatatgactgttgagttgaatatttttaatgttgctaataaatctgttgaatgtgatgatgtgtatgacgtcaaatttgttgattctgctacacaatatttcttgctgaataaagataaatcttttgaaaattatgtaaatcattttggtatgaattttaaaagttcttttgataagtgtgaattcgttgtaagagcccacaccattaatgaacacgcaagaatggaaaaccaaagttgaatcagttgaacctcttctctaattagaatcacaatcactccctgaatcacaaaagttagttcaaccccctgattggaacattccttttgatcccagtaagttacgttctagacagactaatctatttacttttcatactgtttttcctcacaaagatgttgaaattgaaaattctaaaactagtaatgtattcaaagtcaatggacaaaagttgaaaccattttagaattaacaccacctgaaatggaggaaatgctcctttatgactcgatttactaaggttagtgaattatttctcaactggtcatatctttaattgctttctttatttttagtattttagtttattttttatcatttgttttttgataatcaacatatatcattgttcatattctttgttttttcgattctcatctcatgtccttatcatatacatatttagacattgagaaaactgtctcattttagttgggggtactgagtatattcttgcgttaagttcgataaatttctt

SEQ ID NO: 57934 - DNA, 1342 bp, Cannabis sativa
acagttttataagcactcctaacagtttctctaatctgtcccttaaaatacattaccaaaatcctactttatctattttataacaaacttttacattacatcattcatcagcattattcattcctctaaaaatttatgtaaaatatagcatttgttgtataccatattttttgataaatttgtatcttctcctctctattttaagaatttaccaagtttggagcatctattgggagtgttctaagtggaaattggaaataggatactataaataattgagtatagggagaaagattatgcatgaatggagtattctctaattgcatcaaggtccaaaagtaccactatccttttctgtcattgctttcccttttgagaaatacaatgaacaaaagccatggctgaaatggctttagtttccctaatgttgttttattgaattttctactgttgcttgctgaaatctgtactcaagaagattggttcaaatcaataacaaacaaaacagttcttgagaaaaattcaaatccaattatcctcactcacctcttttaacaaaaagatttttcttggccatctcagtgtgcaaaaccgacttcgaatctgcatcaaacaccatattctgcaaaaatcccaacaaaaaagaaaatgggttttctcaaaaatactgttttttatgttttatttataaattacgacttaaaatttttatttacaaaaatacaattttaaaatttcaaaattactaaatacgatgttctcagcaaaaagtaaaaacccaactaaaacacgagaattcaatctcacaacaactataaaacaacgaatatcgaacaatttactgaaatccgtatttttgtaaataaaattgttcaaactgtaaaaaaaaataataattctctgtgttaacatatttttgtaattgttttcaaatttttagtctatcatgtaaaaatttcaaaagaaaaacacttttaacacttaaaaatagctatttgacaaaataaaattttaaagttccaaaattataaaaatacaattttctcaaacaaaaagtaagaaattaatctcacaacaactataaactaactaaaaaacatccaaaaacaacagaaaagaaaaccaacataatcacaactataaataaactataaaacaataaaaaaaaatcaaactgattactgaattccatatttttgtaaataaatgagtttaaatcgtataaataaaattttccattttttctgtctttaacacttaaaaaagctattgaacagaataagattttaaagttttaaaattataaaaatacaattttctaagcaaaaagtaagaaaacaac

SEQ ID NO: 57935 - DNA, 2070 bp, Cannabis sativa
tgggttgggttaggatgttcaagggatatcgagagagagagagaggggagagaacagaggttagagagagaagtgaggtttgaaaaatgaaaagagtacttttgggtttaatgtaaatttaacctatttttaaaattttgaaatatataagttaaaggaattaatttcccctacgtatatcgttgcttctaggtctttcctttacacttgtcctttggttctgttttgccccaaagctcaattcaattcaagaagtgattaagtagacatgacccattaactacattaaatacagcacttgaagtaggttaaacaactactaaatgttgttattaatagtaattcgatacctcatcagaatgatatacactaaatttcaacacagcttagaaaaaaataataaattaactattatttattaagatacatattatcccatacgaacttttgttttggtgtcaagaattcaaaaaatatacattcttcatagaccacacaataatattaaaatgcttccaatacctcaaaaaaaaaaaaaaaaaaactgcttccaatgccattatgaagttacaaagcaataccttccatttcgctatacattactccaacataacgagtaaagtattgcacattataatgtagagatataaattgttctacactgctagtggcaaacttcacaacgacgaagccgaaaataatagtcagggagctaaacgttcgattttccatactcgtcctccattggtttcctcgggggagtagctcaatctgtgtaccagaacataacataaacaaattgggagagtattgttgttagtgtaagtaagaaagcatcagcctgaaccatttgcaacattgccctagaagatcctagaatcaatttatatggaaaaagttgtaagaataaaagagattagagtgtgaatttgcatgctgattcatactgtgtactgaaccgtgtctctctcaaattacctgggactatcaattacttcaattctctattttgctgcctattgctattacttgtgttcctgaatttaccaatgtaaaggaactttgcactatgtaaaagtgaattttaaacagcataatttgtcctctcattttactttttaacaagtgttgataaattgctttaatcatgtctgtcatgtgtgccaaactagccaacttgatatacatataccaaattctagcacagaatttaaaaggaacatgtctcataaatgggatagaaagtagaaactacctgtcatgcaatcgagacttttgtccttgccaaaactcaaacagctcaggcttgagccggtatcctccccagtatttaggctttggaatcacacttctgtgcaaacaagaatttgttattatttcagattcatcgaaatgaataaattgttttccttcatttttaacaaacagaatggagactaggtataaaaatcaagtgtccatgtagaacaaaataggatagtgtttaaagagtgtgagattaccccaaaaataaacttaaagatggactctacaaaaacacaaaccctccactaaagtcgtaccaaatataggtttggctttaaattccctttcctaagaaccaccccccaataacaaacacccataaaattgactttggtttgataaaaaaagtaaaacaaaatgtaggcaactgcatgcagcccacagcatgtaaggcagcgaaggaccaacaagctgggacccattatctatattcttggacaggaaagtaaaagactgcattggactgaataaattttaaccatactgaaaaaattaagctaacaagctaactaattctccttccggataatttagtcccattgagaaacttgggataattctatcaaatccaatcgtccaccttcatatgtgcgtgtgtataaatcaatacatctttatctttctatcgaacttgtttttcataagttgttgacaaattaataaactgcttattcttatttgttttctcttttttttttttcttaaagttattatttttgtattttttattatttaaaatatattatttagatgatgttgaagaaa

SEQ ID NO: 57936 - DNA, 1090 bp, Cannabis sativa
tcacttcaacaccgttttgaatccaagtttcgggtattcctttcctcaaacgttccccggcccttgctagaaaactgggggaggttttaggccggtttatagaggttgacactgcctctctcaaggaaacctggggtgcttatcttcgggttagaattgagatcgatgttactcaacctcttccccgtggcacaggcttccactttcaaggtatggcatccccggtttggttagaatttcgtttcgaaaatctacctgacttttgccatttcagtggccgccttaaccatatcgtaaatcattgccctgagtttctagcaaaatgtgattcctcttctgccccaccaccgcttcaatatgatcacaccttaggagccaaaatccgcatcacttccaatccgttttacatagccagcactagaactcgccttcgccctcatgtcactcaccctgtttccctagcccctcctccaagcccacggcctcccactaaccaaattattgctgaaccatcttttaatgacccatcttctgagtatggtgctcaatattttcatcaacctcgaaccactcctgtgggctgctacatgactcaagttcctcaacacaataccttcatacgtgatcttaatggagcaaatgtttctccatccttctcggcttggccaacttctagcaatgttgtggaccttgatagcccttctcaaccccataggcctgctccccccttggcttataccattcccaatgaccaaaacacacataacaacagtatccctgaacaagttgcaccatctaatcctattgtggcaacccctgctatcactaatgccatgaacacttctgatgctactggttatactgtaccagtctcacaagcttttgctactataatggcggatctcaatgctaaccagccacttcactttgccatgggatcttcatcctcaccagccacggcctcaacttctggccgtcgttataagccaaagcgtcgccctagcattaacgagattaaatttcggaaaattctcaagcgtactcgtgatcttgcttgttctttggatgaaggatacattgatgaggcggg

SEQ ID NO: 57937 - DNA, 666 bp, Cannabis sativa
tttctcccattaatttattccgatgaagatacgctttagtaaacgtgccattaaagtaaattaactctttataaagtaaaaaaaaaaaaaaagaaaactctttctaaagtcatattaatattatattatattactgttataaaaaaatattatattattagctggatcaatattttatatattaaaagtagttatttaacaataattcttgacttaacgatctcttttattttatttaacattatcactaacgccattattgattctttttcttttatgttaaaacatatattgcgattttaccctattctctcacaaagcttagtacttctcaataatggcgttagttctctacaatccccaacctcgccttctctcctctttccattgcagaagaccttcgaattcatcggaagtaagatccggagcttcttgttaaagagtcccacattgccaatctgtgaaaagataataaaatatataagaggaatgagctactcctcccattgccaattggttttgagatggaaccccatgattcttatcatggtatcagagcaaatcaaacaaaaaaaaaatccctttcgaccccaaaaaaaaacccgatcgaagtagagccaaaaaaaagagccaccaaaaacctaaaaaaaaaactgatgcaagagc

SEQ ID NO: 57938 - DNA, 3649 bp, Cannabis sativa
  modified_base (26)..(26): a, c, t, g, unknown or other
  modified_base (2429)..(2429): a, c, t, g, unknown or other
tatagttaaatttgtttagtaaccantcatgggtaatacccattaagaagtgttccatacatatatatatatatatttcacaatggtatattaagttaggattagggtacattttcatacaatctaaattttattattttattttctaaatgttatactgtagtacaaaaaatgtatataccatcatgcaaaatgtatataccacctactaaaaattaatattttatcaattttttttttattttagtacaaacaattgatatattataacttttttctctctaagttatcatcaaatatatgatttcatattcatatatacacaataactagttttatacgttgatgtatatcaacacttgttaataaaaagagaacaaccaaaaaaaatattcattcaatagtatatacccatccatgtttgactaaaaaatataacataatatgtaattaatataccatattctaactataattggaaattaaactaatgtatcacaacaaaaaatacagtataataaattaaattatgcgggacaacttcatgttttgatcttacagttttatttcttttgaatgaataaaacataataatatataccttatatctagtcaaaggtattttaggtagaaaaaaataaaaagggacatttgcgttattattctaaaaaagagacattaactttcactagagagaaaaataaggccatttgttaacatttctcttaattttattactcaatttttaattgattgttgaaatattctaataattaattataacagtgattgaataatttacctatataaatacaaggtaataggccccaaacttctgctcatatttgattcttatcttcattttcaattgtgttattccatgttgttgttaggaatgattcgttttgcttcttcctaatgtttctaagcaataaaattaaataataggcaagaattgttgtcatgtgttagccaaaaattttcgccaactaattaaataaataaaaatttaaagtaggaaaaaaaaatatggaaatcgtgacttttacgtgattgaggcgttaataaatcttagtccataaatcatttgtatgagatggggaagcccagtaagcccaacaaaaccaccacctccgacaaaatcccaagcccagacccagattgatatcgtgaaaccaaattcaaaattgtgaaaccccaaacccacattcgacatcacaaaaaaaaaagtatttttctaaacttttattttattttaattggatttttttgttgtttgtgcttcattgtaaggaaatttgtttgatttaggttcaatttttgtgttttcatttgaatttcattgacgcctgttcgagttctgggtttttggtcaattatcgacatgtcacgacattgttcgcgacatattttgattttttttcaaaatgttatggtagttctttatattagcaatgttttcacgacatgttgcgacgtgtttgcgagttatttttggtcggaagtgccttttgaaattttacttatttaatgatagtttcacgatgtctgcaatatgattggcgatgttggatgaaatatcccatgataatattttcggtatacgtcgttaattgtattgcaagatatgtcgccaatatgtcatgaaatatcgctgaacactaggctacttatctgcgattctattttgcgatgattcacatatttgtgatacatgttatgatattctttttttaatttttaacaaaatttcttacaattttgcagatggctcctgaacttaaacttctagtttcctagcatttcacaagacgtcttacctatcggggtacaaataggtttagagatatcaaggccaagtttacgaagcttgagttgattgatacgattaaggctagcccttttggacatttcttttctctagtgctttggtccacagcctcttcttacggaagatgaaagtcgataatgaaaaggaagatgaggtttggtttcatataggcaaaaatgacatgagattcgagtggatagagtttggacttattagtggcttacctatgagtagtgcccctacaaatgaagaaatagaagtcaagtccaatgaccatccagtcaggatgtattttgaagggaagagttttgtgcaattggattcattgttgctccaactgcagaggtacgaagtaaaagatgatgcctacaagcttggactgtccgctttcattgaaggtgtattagtatcaaaagagggcaatgtctaaatttagcctgacatgttaaagtttgttaatgatcttgaattcttcttcaagtattcgtggggcgagcatgcttttcataagttgatgcagacattgaataaggatatgcaacattacaatgataatgttgacaagaagaaggggaagaaggttgctcaggaggcaaantacactgttagtggctatgtaccttccattcagtattgggcatatgaagccatagagaaagtgggcaagaagtatgctcaatgtagcgagaccaagtttcctagaatgataaactggaaaactctggaaggccagtagaaacaagatgtgaaggcaaccagcatcgcactattgttcaacactcgagtaagattcttttctgttttgcaagattttttttgttaattcagtaaaactactagtttaaaagttgaattagttattcgcgacttgtttcgcgatttcatttgtaatttgtagatgtatagtactttataaaaattattttctaatttgcgacttgttttgtgatattttgcgatgtcatttgcaataattttttgtttatacttactttttaattcgcgatagtttgcgatttcattcgcgatttgggtacatatttttttttgagatgctagacctgttttaatgacatgctatcgatgattttgcgacatgttgtgattatttgcgatttagtttgcaaaatattttgtgacatttttcaacaatttttaacttctgtttgttgtttttttttttgttttgcagttggtcgtaaagaagtgcttgtttcctcgacccagtgaagaggaatatttcaagtccattaatgagggtaaattccctctttgtttcgagatggacatcgattaaacggtggaggggagtggtacacaagagtctgtgtttcaaagccaagcgaataccattaatgaggtcgtgacaaaggcaaagtagttccgccaccgccggcaccagaagtaaacgagacgtctactttagctgctctgtccgctccagtctacacatctgtggataatgacctagcaaagaggttggatagacttgaggcctagcaggctgccatcatattgccacagacagagttactgaatagccatctcaatatgaggcgatccttttcaaacagtcagaaagatctgaaggagactttgttaactaagatggccattttgatggcaatgttgaagctaaaggagggggaaccacaacccacccaagcaatagatgacaaagcaaattgccaacctgtggagagcgataatgaagatgtgttcccaaaagattgggatctaaatgataatgaggcaccttctaccccaacagaagcaattattacgaccattggtgatacacaatcacaggacgaagtc

SEQ ID NO: 57939 - DNA, 739 bp, Cannabis sativa
  modified_base (28)..(29): a, c, t, g, unknown or other
ggaaacgagatgtgaaaattactttagnnataatagatttggacttatgcctgcgagaagaaaaatctactgatcttactgatattagcactattacccagaaaactcttcatgcatagtggaaaaattcaaatcatctttgtcttattgctatgaacagttcaattcctgaacttttatttaatggtttgccaaacacctcaaatgctaatgagtttttcaaaacagtagaaaaactattttacactcgtgaaaacgttgcagctggacatcttatgaatgaaatgacaaccattcagtatgataaatcaaaggagtgcgagattttattttaaaaattattaatgttcagtccgacttgaaagatcgcaatattcctcttcccgactcttacaccattctttgagttcttcatgtacttcttaccccttttagctttaccaagacaacctaaaaactcataataaaacacggagtgtcagtaacctcatttctcagtgtgtagctgaggaaatcaactttaaaaggaaaagcgtgaattttctcactatgtttcttaactcaaggccaacaaaaaaaaaaagattgagaaaatatgaataaaagcaaccacaaccaggggctaggaatctcagaaagccaagtgagaaagagtcaaagcttaaagtgacaatgatgttggattcgatattatttatgttggtacatttattcttgaattatagtttagtgttcagat

SEQ ID NO: 57940 - DNA, 3471 bp, Cannabis sativa
aaaactttgagaatgatattgattaataatagtgatgaatttgagagtggagagagagagagagataacttttatcatgaaatgtgctgtcataaataattttcaagggtgtcttctacaacgtgttcaatgatttgtacttttaatttgatagcctgtctgtgtttgtaaattattttacaagttgtaatcctcaccaaagtttaatgtcaagtgaagaatcaacatcaatctttgttggtcttcatatggttagtactttttaagtatccctatattccaagttctatactcaaaaccaatgatagatatacttgcattttttttcaagaaaaaagattatttgaaagggacttcatatagaagaaagattactcaggaggataatctccaatccaggaacaactacaactattttgtaaagcaaaattagtcatacgaataaccatgttggttttcctggttgataaaaaaccttgaagcacttattatggattatttattaatacataatgcatacatcattgtagtcaagtcagccacttattcaatcaccttttgttgtgatctatacaatcaccgaacaagaagtatatcactaaacaagaaacggaaattttgaacaagcaaatgtcaagcaaacaacaaattcagaaaaaaaatggacagttttaagtagttcagctctaatccactgccagaacagccttgattgcttggcacaatcttattccaatatttgatgatgatacaaatggtagcacactcgaaaccaaacttagttgcttaacttctttacaaccaaatacaagagagctacaagatggcagctctcaaagaaactctaatacaattgttctctcaaacttttaaaaccttgttaacctcaacttacaaggcaacaagctcaatgattccataccaaataccatgagtacaatgaataaccttttggaactccaacttggagaaaatcgaccgagtggatacattccaaagatgccaccatatttgcagatcgctttgaatagcaatcgttttgaagggcctattccagaagtattggatctctcagataacaatttcttgtgatatttcagaatcatttgctaaaatgggatccttgacacagttgttgctttcaaacaataatctctctggagtcattccaaagtttaattctaaggtcatggttgacaaaaggaaacaggattttgatttctgttatagagccaacaactcttctgccatctagggaaaaatatcttagtggttgtaataactcttctagttttggcttctgtattggctgttggagcaattttcatctgcataatgttagtcttgggacgaaatggcagggttattcagattggaatgataagatatttaattggggcagccatgatagatttggaacagagcttgaggtctttggcaacctgaacaatgccaatgttctaacccctttggcctatgttttgtatgctgacaaggcttatctcttctatgagtattcctcaaagggcaccctttttagctcgggaatgtgctttggactgggtaatagtattagatacagtatagcagtaggagtagctcaagaggccttgattttcttcatgggatttcctctggtccaatcctccttcatttatcaagcaggggtatcattttgaagtccttaaaagagccccaggtgggagaaaatagaaatggagctctacaagggtattgatgtatcaaagagcacaggatgacaggaactcaagaagcgtttcaactatagatggttctgtaggtaatatccctccaggtcagtaaaatgtgaattcaacttacttagtccaactgcatactaaatcatattccaatacacatgttcagatatagaagtaattggaaattttttttaaatgatggtttgcagagtatacatatacacaatgagggtgagaatggctgtaaatgtttttgcattgcagctttggagtaattctgctgggactgctaacagtaacagcaaaacagcagttaacatgcttgattttagcaataagttcagtagaacatcattctcaactacaaaccagatgcttgcagacctaaaggttttctattgattgtgtttgcatatttccggaagctaggctgaagattaagagtgttctacacatgattgtcaatgcaagttaagaggaaatactcactgatttttacatgtaaaatagtaatttgagtttgtttagtttctactatactagggatggtgaaaatttgttgttagctttagaactcttgtataataatatcttcacttttctagcaagtgaaaaaacagaaacataattgaaacgttaaaaaaagattatattctgtagtgtaatttatttcgtcctaaattagccattctcccatatctatttcacattgacaattagagaatcatattagcaacaagtagcttatgttgctaacttataaacaacagatctaatcgaaacagaaaatcactcaattttacatattatcatggatagtgggctattagatccacgtgaacagtagcaccaaaaaattaatagtaagtgatataaaaagactgccaattaagtgagtaaaagcattgcaacaataggtagaaaatttgtaaaactcccatattcatataaatcaaatctaatccaactttcatgttcaataactgaggacaaaaataataaaataaaaaacaagaactaacataaagacatgatactaaaacaaaatcttaaagtagcaaaaaaggtatcttcttaagaatcaaaacaagagtttgcctaatcgaaaagtgagaatcccatatcatcatcactctcttccttctcttccttcttctcctcagctggtgcagcctcaacagcggctcgaccactgggggctgcggcagcagctccaccggaaaagacggcaccaccaccacctccaccaataattacctgcaagataagaaatttcatatttaatatcaacatctgattaggttttccaatatttaaaaattaactatttaggcatttaaactaaacatcgaatctgaaaactaaatcttgttatcctaattcctaataatataactgattatcacacagcatagaattgtcgttcgaaaataatgaaaattcaaatataaaaacagttaaaattataattccaagcacatagattaacaatagtattaaaaaaaacctaaatctaatcaacgtattgaacatagagtaacaatacaaacctggaaaacggcggaagatgggctgacgtaagagaaagacgactgaacaccgccggaggaatcagcggagagagcggtctgaacaagctttctttgaagctcgaagggagaggatgcggaggcctcaagatcacctgagtgttgttttgcggtccattcgccgccagagctcttgcaaacaaaggtgaaaactcccatga

SEQ ID NO: 57941 - DNA, 971 bp, Cannabis sativa
ataaaatcacaagtttattattaattccacaaacatttacaatctattacattaaaagagcatttttttgtcaaaagacctcaagcacaactttttacaatttttgaaaccaatctctatcttgttgacctatcttttttggccaaaacaattctactctatgcttgacactatttttaatcctttgtacagttacatctctattttctgtatgtttatttcagatttggtcattttttacaaaccaaaccgagtacactagatgggcaacaacagcttccatcactctcttttaaacctgctaattttggctttgtggatccacttgagcagttgagacaagtcagtggtccgagctctccatgagagccatttttttatcttctgcacacagaactatgaataagggcatctgaaaaaaagatgctcatttgactcaacctgctgcaaacaaaggctgcagacagcatcattaacaagctgaaacttctgtaatctttccttggtcttaagccaattttgaattgctaaccaaagtataaaactgtgtttgggaatgttgaatctttcccaaacttcattgcaccaatacaccctgctttgaatgagacaaatcagtttatagccagctgagattcgatacctggtttgggaaaattgatgtgcatcagttagtcttttgacttgattcttggctgccacaatttgctttcaataccaactttcatggctatgtgcttggtattcccaccaatcttcctctttgagatacacattgtgtatccacttgacccaaaggttgtcctctttatttgctagagcccatacatatttgaaaagtgctgctgaattccattcaataatttttttaatgcctgaaccaccttatgatcttaattgacagacacttttccaagccaataaactagcccatgcatcatatatttccctttccaaagaaaggccctaca

SEQ ID NO: 57942 - DNA, 1219 bp, Cannabis sativa
ctaccgggggcgagttgtgggatgttctacaaggacgtctggtaaaaagcatcactgagttcatcgagagagctcaggtatttgttcagaaggaagaagcccaaaaggaaatgaacttgttgaaaacaagctcgagaggtaaacccatcaatgtttcaacagggactgcttccatgagaattgataactcgggggcttctggtccgaaaataaaggacagaatcagggaaccatcgaaggatagaaagaaacaaaagaaccatgacaaatatgtgccagtgtatactatttataccgagcataatgaaactcaggaaaatatttacctcgcacatgagtagaaggtagcctttggtaaactcgagcctatgaggaattcgaggagcaaaagagatcctaacaaatattgtaaatttcataaagatattgggcatacgaccgacgaatgtcaccaattgaaagatgagatagagagtgtcatcgctcgaggccgttgtaagcagtatgtgagaagatagggccagggatacaaccagccccgtcagcctgataacccaaatagtcaggggttacaacctattcctgcggaaaaggaggacatcctggttattttgggagggccgcatattgtaggagaaagcaatattgctcagaagagatatgtgaaggaaataaagaacgagtagtcggtctttgtcccaaaaccttctaagaaggtcaaaactgaggaaccccccattacattcactgaggaagacaagaagaacgtgagataccctcacgtcgatccgctggtcataaccattcaactcaccaataagaggatcaagagagtattaatagataatgggagctcggtaaatatcatttataaggagactctaaagaaaatggggctcaaaaaggccaagttaaggccttttatagtgaatctttacaggttcaccgaggatagcattgctagccttcgcataatcgtgctcgtattaaccataggtgaggcaccttaaactgctactgttatgcaagacttcttggtagtcgacctgccctcggcttacaacatattgttgggtcgtccagcactgatcggactaagggcagtcatttcgatcaagcacctatctttaaagctccaaacagtagatggtgtaggagtggtgtgtggcgaccagatgctggctcgcgattgctatcgcatagagctgcagcatagaaa

SEQ ID NO: 57943 - DNA, 2289 bp, Cannabis sativa
tgattgatctaaccatggattctatcagttcagcctcgaaagtgacaatagggttatggggggtcttggatttgtgaacttttgagccattatttaaaaatttaagtcacctggtgaaaaagcaacaatgactggtggtaaaaacatgggcctcgctaaggggatataacctaaatttgaaggttcatgccaagctgcttctcgcaaataatggcatctaccctcaataacctcttgttacaatcgcctataatggttagaagtttcttactggcgagacttaattaggtggtttctaatttttccatcattaatttcaagtatggtttgaggtttttagagtttgggtttaaattttatggcaggaaataggggacagtctgattctaaggattctaggattgtaaattctaggttagattggcacatgattacagataataatgccctaattcctagaaaaacaaagcacaaacaaaacccaaaatctgtgaatcacataaccttaaattttctagccctaaattactcaagcattcatatacagttcacctaaataatagaacaatgcaaaaaaaaaaaaaacacataccaagaaactaaaattgaaagcacgaaaggaaaaccaacaagagagaatgtcacttactagtttgatgagagattctgggtattgaagagctttggggtggaaattttgacgtaaagaaaactgggtcttgatgattttgaagttgagggatgcaatcggatgaaactcaaagaaaaaatatgaaagataaagagggcatgcaagtttatagaatatattggttgagaaatttttgaagctggaaggtttcgtgggctaaaatggcaaaatgatggaaagtttgaaatttataccaaaaagttgataatcattcgatcaaaagaaaactgatcaaatagattgtaactgacgagaaaagaacaattggagcattaaatgaagaaatgatctgtcttatagttttgaaccaccaaaaataaagcatgcaaattttaaaaggaaaaaatacaataataccctcgaagacatttaaaaggtaattttttttaattaataagtactttttaaggggtaattgttataccctaatttcggctaacaaccagaagttgacacatgtaccagtgaaagaatattaatctgatagaaatattcaaagtcgttgccacttcaacagatgtgagttaagaataataactattcatgagtaagattggcgagacaataattccatctcagaatgaacagaatacataattaaaaattttcaagacgagtacacaaagggcttgcaactcattaacccacaaacttaggaataagagcttgcaacttattggcccacatactcgtgagtaaagagcttgcagctaattggtccacatattttattgggtaaagaccagaggtccaaaagaagtcttttttaaactcctttttattgggtaacctcataatgatcttataatcatttatgtttgtcccgagataataaaagcctcctgctccatgcttcctcgcgggataagccttgacagagtaaaaatataaaatctctagtggggttggacattccgactttaggatgtggtatagagattttaaacaggtgaggatcctgtaggaatttcgtgtcaattgaaacgcaaaaatgtcgaggtagttatagaaatccttgagatattccttgagaggaagaacggctccaagccttatgtgctcaaggctccaagtacctattctggaaggctcactggtgctacaaccctcatctcagaccaggcattcaaggggataacagttgaattccccctaggcaacagacctaatgcgacaacctttctcaattttgataccgcatgatctcaggacatccccgacataagggtcgatggatctgtccttggatgctatcagttcagccttgaaagtgacagtagggttctgaggggtctttaatttgtgaacttttgagccattatttcaaaatttaagtcacctggtgaaaatgcaacactgattggtggtaaaaacatgggcctcactaaggggatatcaactaaatttgaaggttcaggccaagctgcttctcgcaaataatggtgtctaaccttaataacctcttgtaagaatcatctataatggttagaagtttcttcgtgaccagacttaataagtgttggaaattattttacgaggatctatatttactaacaagtatgtttgattaacaaccttatatgaattctaaaacaatg

SEQ ID NO: 57944 - DNA, 2074 bp, Cannabis sativa
cattttgcgaaagtacaagaaatttgtgatgaggcaccagaattgatactgcttgacaactagtttaggattcagatacaaattgtaaggagagattatctacaaattatttccctgtgtatgaactatgaggctatgcctaggattcagatacaaaattattttttaattaatatacatataatgtaataaaaaaaataaaaatatacatctaatatattaaatatgcgggttggcgggcgggtttgggttcaatccgaaacccagtactcctaaaactgaacccgcgaacccgcccgaagggtaccagattgaactcgacccgcccgaacattttttttttataaaaaattatgggttcatcggttcgggttcggacgggttcctcgggttcaggtcaaacccactcgaaatgttcagtcctacttcttacattccaaacgaacactttatccatttatcggtggaggatctcccccttcatcaataatggactgtatctcacaaaagacctttcccatttgaacttcatgatcatccagcacattaaaagaatttcttgtgttcactttggaagggcttgtaatcttcactcccttccctttaactgctatgaaatctttttaatcctctttagctttaactggctcttgattcttattcggctttgtcttttctttcggtttcaaaatcttcttggtttgttcaactattttcaccttcttgcagacattgcttgtgtgccctatactcttacaaacttcacacttattaggtctcccttcataggccacctccaagtaaatcaaattgcctatttcatcttcgaatctgatctgattcgagaaaccttttgcaaccttgatttctatcagaactctagaaaattccaacctgtctctatttgacatagcttaaacttgtttaatcattcttcccaaagtactcactatttttgccatagatctttcttcccaatacattaatttaattttgcagatctgaacccatatatcgggactttccaatcctcttccctagtgaatctcacatcttaatagctcgaaagagtaagaacatgaagaatgaaaagagagaaaaagagtaaaaccagatctttattgaatgaatgatctcatttgatacaaacaccaatggaggctacttataccagtagctttgaaacaatatagctaagcaaccaaccaactaaataactaacatcctaatcgacactctaaccaactaacaattttcataaccaatcttgatactccccctcaaaatggagaaactatatttttcagtcccatcttgactttaaaattgttaaattgattaggaaaaagaggtttagttaggatgtgagccacttgatcttttgtagaaacatggactgtctttatcacaccttattgtactttctctctaactaaatgacaatcaatttcaatgtgtttggttctttcatgaaaaactagatttgcagcaatatgttgggctgatttgttatcacaatagagtagtgcaggcccttcatgatcaatctttaattctttgagtatagagagaagtcaaaccacatcacaagtggtgttagccatagccctgtactctgcctctacaaatgaccttgatagcgtgtgttgtttcttgcttttccaagaaataatggatgttcaaacaaaaatacaaaagccaattgtggaccttcttgtatctgggcaagcagcccaatctgagtcagtgtaggcatgcaacttcacctctgaattggcaacaaaaaagatgccctgtccaagagtacacttaacatactgcagaactctttgtgcagcatgtagatgagtgactctaggtgtgcataaaaactggcttaacttttttattgagtaggaaatatctagccttataatagtcaaatattgcaactttcaacctattcttctgtacaatgttggatcagccaacttttccttctcatcaagtccaagtttgagatttgcctccattggtgtgcttactgttttggaaccaaggtaccccagatcctccaacagttgtagtgcatatg

SEQ ID NO: 57945 - DNA, 933 bp, Cannabis sativa
  modified_base (446)..(454): a, c, t, g, unknown or other
atatctttaatttatactaaattttttaatttttccttccctcttatattattacaaaatacatataaaataaaaataatatatattttaaatattaagaaaaaagaattaaaataaaaaaaattattagtacaattacttaaaaaaataaaaataattataaataacttagaaaaatataaaaataaaactaaaataattattgaatataacacaaaatagtgtgaaaaagaaaaaaaaaatattaggactaatttttaaaattaattcaagttaattttttgagaaattaatccatatactatttttaaaactttttaaatttacagtttgagtagctttgatggtttctatgtgggttgttatatggattttgattgcgatttaagttgctctgttagttgttatgtgggttgctatgtggatttatgtaaaaatacaaaaannnnnnnnnttttgaagtgtaaaaataataaaattcataaattgtactcataaaattaacagtcaatttaataaatttccataaaattaatcaacagatcgtctattcttaataaagaatattgacacataaccgtcacctttttttcactcgttaaatcaaacatgttttcaatgttttaccatttttccccttaacaattaaatcaacacactccaaggagaaatattcaacctagtaaattaccaatcaatataattgacagttaaatccttaatatgctcttaaattcattcatttattttgaaacactttaagaattgcacatatcatatgtccaacttcgaatttcatttgtatctcatttaaaactttcgctactaactgattaactcactaaatttcagaatctacacacatttctataaagtcgatcgaaatctcaccctccgataattctcaatattatattcaattatataacgtgt

SEQ ID NO: 57946 - DNA, 644 bp, Cannabis sativa
tttccaaatttcttaaaattttgcagaacgtcttaaataactataattgaaatgactataaaaaaaatttgactaaaaaattatttgaaatactaaaagatgtatcagtgtatctcttttaaaatgttaattatgtatacgttgttatgcgataattatattatatctatttataacatctaaaaaatgttataaaaattgctttcgtgtaagttttgctttcaacgagagagaaagaggaaggtttgttaatttcatcgttgtttccttttgcttagatcgaaattcggcgtctacttcttcagaaatttccgatctttgagttgtaatctcccatgaccaccagtggaaacaagaacatcaatgcctcacttgctgccaaaatctaagattcttataacaacaaaaaattggtaagttaatgattggattccgagaagtattaaacatagagaaaggttttaagatttgtcgttgagtattattaataaaataatgagattattcctattgtgattaaatgacctaaagtataaattgtaagtcatatgttgttttgtcttttgacatgcaaagttcgtattaattttgagtgatctgctagtccctgtttgttttttttttcttcttttggttctttggca

SEQ ID NO: 57947 - DNA, 999 bp, Cannabis sativa
atacaatctcagtcatgacatcattcccactaaaacgggtcttgtacaaacccgaggtatccgggagactgatgaagtgggcggtagaattgagcgagtttgatatacaatacctaccccagacggctattaagggataggcattacggatttcctggtcgagataactccggagcctgtctagttcgagaaagaatccgccggaagggactggcagctgaaggtagatggatcctcgaatgtcagagggagcagagtggggataatactattgtcgcccgacggagaaatgatggagcaatccataaagttgggtttccgagccaccaacaatgatgctgagtacgaggctctgatccatgggataaaattggttaaggaaatgggagccgaaagggtactagtccagtcagactctcagttgatagttcaacaagttaaaggagattttgaggctaaagaactaaaaatgtccaggtatttggccgaagtaaaaaagttgattgcgactctcgactatttccaaattagccagattccccgagaagcaaatatgcatgtcgacgccttggccggcttgggatcctcttcccccctccacatcacaaggacaataccattcgactttatcccggaacctagtattccagcggaagaagaagttaagtgcgccaaaattccgatggacacatccggagactagagacagccaatccttgagtacttgaaggacgataagttgccatcggaccccaaacaggcgagaaaaatcatagtaagggcgttaaggtacgctatacttcggaaccaactatatagaagatcctaccacgggtcgtacttaaagtgcataacgaagaaggaaggtaaactaatcttaacagaggtccacgaaggagaatgcgggagccacttcgggggacgggtgaccgcccagagggtgcaaaggcaggggtactactggcccacagtccaggaggattcgtcaaatcactcacg

SEQ ID NO: 57948 - DNA, 1574 bp, Cannabis sativa
ttacagtatgtcttaaataactattaaaattagactaaaaaattcttctagatatgaaatagatagaggtacatcgatacactatttttaagggggtgcactataaaatttttctatatttgttaatactatatattataggaaaattttatggtgcgtttcctaaaaggagtgcactgatgcacttaaatctgtttaggcatcaagaaaaaacttttagtctttttcttttacggtcgtgcaatatactgtttgaactcaattttcaacgtgttataactttttactcgaccttaatttttttttttttacgttaaaatagtaagaaatgtatcggtgcaccaattttaaagggtacattgtataaacaccctatattatattcattaaatatattaataaatttattatatcaaaaaaattgagtaaaaagttttgtgaatgccaaaacaaataaaatgtctaaggaaataaccctggttgcattaccaacccgcccaagaatacaagttcatttttgtatatttaatttagagaaatgttaaatcacactcatgttgcttagcacaaggtgtaatatgctagtagataaattaggatcccatttattttactttaacaaagatcatataaacggtcaaccaattataatatgtcatctcatagatgtaataggcaccttgatgtcccataataatactctagctataatttagggtgctattctacaatgcactccttacatcctcttatatgtttggttattctaaaaaattttttagtctaatttttttttaattatgtacgttatagttatttaaatatcttgtaaaattttaaaaaattcgaaataatttacaatataaaaataagtaatatttaaataatatattttccaagcttataaaataaaataaaaaaatacaagtccaacttgtcatttaaatcctgtttttaatatatttttttttttaatttttcaaatttttttaaaatatttaaaaattcttctgaaacagattgggatttatccatgaattttgctataatttataaaggtgccaagtttaacgtaacatcgaggttgcatattaccaacatgtacaagtacaagtaattctgttttttctgaacaaaacaaaaatctgcgaccgccaatatattatatcattaattaatgaaatcaagatatataatagaatatttggcggggcactactacatcacatatattatcattaatttttgctctcaatgagaattgctaaaaagcaccaaaacactcatggtaccaagcactctcttatgtgtgaatattgctattagtataatttaatattaggtctttaatataacttttaggaagaatctctaacaaatcgtaagacgacacgttttaagagtgctaggcaccactggtgcccaatagtaatgctcatttttaatcataaaagtaattaaggtgtaattagggggagacacacggggtggagaattggtggagaatactctctcgttcgaatcaagatctcttgttagaaagaggtgtcccatactgtgttaaactaatcaaa

SEQ ID NO: 57949 - DNA, 1025 bp, Cannabis sativa
catcgtgtcacgaactggaatgcctaggagcgtagctatttcttgcttgatcgcttgggttgtgtttggggagaagtataaggccgatttagtgaagttaaccatttgtccagatgcatggctgtagtcacggagaatgctttggatggtagtcgcagcttgaacctaagatgagctgaaaaggaggctatcatcggcgaaaaaaagatgggagatggttggggctcgtcgagcaattttaatgctaagggaatgactccgaggttgacgttgctgggttttgtaattgatgagcgaagaaagaccctcgtagcagagaagaaataaatatggcgaaagggggtccccctgacgaatgcctctggtaggcttgattgttcccaatacttgttgattaagggagaaggaaaaggtagcagtggaaacacaagccataatgagatcgataaaacgcttaggaaataaaaaatgttccataattttgcgaataaagacccattcaaccctatcgaaggctttggccatatcaagctttaaggccatccaacccaatttaccagacttacgatgagtgagagaatgcatgacctcctgaccgatgataatattgtcagagattaaacgggaaggaagaaaagcactttgtgatggagaaatgatacgactgaggatgggtttaaggcgattaactaaaaccctcgaaatgattttgtagaaagtggaacagagactgatgggtcgatagtcagtgatctgttcaggatttggcctcttgggaatgagaacaatgagcgtttggttgacggtcgataaatctgcatccccattcagaaagttgagagcagcagctgtaacatcttgacccaacagatgccaattcttttggaaaaaactgtcgttaaaaccatctaagcctggggccttctcatgagcgagttggaatgtagcagttttaatttcaatggctgtaaaagtggcctgaagaagggcaatttcagccagagtaaggcgctcagtgatgcctg

SEQ ID NO: 57950 - DNA, 938 bp, Cannabis sativa
acaaaaatattagccgacaaaccatgggcagattgatgaacccagctactggaacacaattaatatttggtaaagttgaccacttggtcagtagtagttgaatacttcaataagatcttaaagcacatgcactctttcacattaacttcgatgaaaacaatactatcatatgactaaaatatggaaacaatttttacattcatgtagatttagaattttttttcttaacaattgtagacataaaatttaatatggctaaaatattttttttttttttggttgtgaatgatatcttaaataataggttgtttttttttttttttttgaataagtaatggaattttattaatgacaatcaactaaaataatagtctgcaattaacccaggacatctcctcgttggagacacgactagaattagaattagaaaaatgggccaaataattagttgcctaattcctagattgtttgacaaaaaaaaagaactaaaataaaatcagatgaaaaattgcagcatccatttaaccttaaaaactcctatatttcattttatccaccgctcagaagacacaacagtagaaactgttgcagcatgttcattcaacctcatagcttgagcactcaactattgtgtaaggtacataactgcactaccaataattctttcaattgcaaatagtttctattcacaactactaacaataatttgatgatgagccatcgaaaaataaagaaggattaacaacgaaacaaacaaaataaaacgatgtcacacagacaagaataagacactcaaaattatatcacaatgataagacgaaaatgctcaaaactatgtcatacaaataagattaaaacactcaaaatcatgtcacagagacaagactaatcgcagtaataaaatacagctccggccaagccacacctaagcccaaaaa

SEQ ID NO: 57951 - DNA, 2208 bp, Cannabis sativa
agtctaatttcctctaaaaagcattcttttttgtaaaatttttatatttttaggttgaaagatttttttttttatatatattttgacagtgttttataaaaataataagaaacattacataaaattaacatttaaataacatcaaaataataacaaaaaattaataacaaattaacaaacaacataaaaatatgtcaaaagatagtattttctgtaaataaaatagtaaaatatttaaaattctacacaatattatttttgtaatttttgtgtatttgtataataatctcataataaattatttgagaaataccaaaaataataaagttgcgtttaacattgaccttaatactatcttcttgtggtactgttcgttgctctctcttgcaaaaagtcaggccacgaaaacaccaaatctaatttctgagcaattaaccattgattaaggtatccttttgctgacgaaacatcaatttttgttttgtaattcaactgtaataatccaaaaaaatacacgaaagaatcaaatagaaccactaccaaaccgagacagtaaaatactgacatcaaaagttaccaagtcttgcaaaacagccccgcaagactgttgacagtctcaaactatagtttgagactataaatcctaagttttggcttaccaaagtaaaatagagctaagtgtaactccaatagaagttgctataagtgtgactgtcagaaatattggtcatttaggtaatatgagcaccgatacctacatttttctatttttaattttttttttttgtgaatggttagtatgtaaatttaatatttaaaaaaaataaaaacattaatttaagttaaagaagaataaatcaaattttaattttttaaaaaaacatagaaatgtgaggcaaggcaagtaagaatatagcataattgagctgtgtttgccttgtaaagggatctgaactagtgcagcctttgcaagaaaagaacatacaatttcttctttatatatacatataacaactctcttcaatcatatccattcatatcttctaattaagtacaatttttcttttcaattctgaattttgcagtaactttctttctttctgtcttgtctgtctaagatcccataattttttttttacctttttctagtaaaaaaaaatcaaaattcagtccatacataaagtctactaaaatggcagctgggcaattgaaatctgttgcttctttacttttggtacttaatttctgcatgtatgttgtaattttgggcattggtggttgggctatgaatagagctattgatcatggcttcataattggtataaatataaataaatatcaaatttcatgtcataaattgaatttttatttttcatgatttaagagtgaatttttatttacaacaggtcctgattttagtctcccggctcatttctccccgatatacttcccgatgggaaatgcggcgacagggtttttcgtcacctttgcattgattgccggagttgttggggccgcctctattctggctggagtcaaccatattcggtcttggaccgttgagagcttaccagctgctgccacagctggtatcattgcttggactcttactgtccttgctatggggtacgtaacaactttattactattactattaccattaccattatcgaaaaaataaaattagttgaaagttctaatatgagtatttgttattattttgacacagatttgcatgcaaagagattcaactcgagctaaggaatgctaaattggtaaaaaaaaaaaaaatcgcatttttaccgaattatttgtactagtctaaaaatgttaattaatttattataatttttgtattaattttttaatttattaatttttttgtagagaactatggaggcattcttgattatcctttcagccacacaacttatatacatagcagctattcatagtgttggatcatcaagaagataaatttgagagttaaaaatgggttcttaaacttgtgttctttgtccaattttttacattttttttgtatttttttttctttttttgttgttttctttactaaagccaaaatcttgttaggaggattggcaatggcaattatttgttgtgtgatttggtgtgatgtgaattgattggattggtttatttgtaaaaagaaaaataaataaaattatttgtgaaatacaatgaatt

SEQ ID NO: 57952 - DNA, 1256 bp, Cannabis sativa
  modified_base (215)..(217): a, c, t, g, unknown or other
gagtggttgggagcatgttatacaataatacaatccaagctttctaagagtattgaatattagttcccttatagttttaattctaggagtcctaacagttggatccaaatttataattgaattatagattgattgttcacattgaaataatcgtacgtaaggaatcatgatataattaaaagagaaaaataataattttgaccaactctaattannnactaataattagagggcgagctacatatattgattatattaatagactacaagtaagaattttgtaaatataattctaaattgtcaaatagtacaattccatatttataatagagtaataatagaattaataaaccaacttattctattgaagagttcaataataatcaaatgtttattgaagtatcaaaatataggtccatggtctctagatcacctctatacaatattgtacaagggaatgtttagtttgaagaataaattgagaacaaattaatttttatgagaaataattcttatgagaaaaaaataataattttgtataaattattattttgaataattatatgaattataaattgaataattaaagtgatatttaactatttaatttttttatttgataaaaaaattatattaactagttaaatataacattaatctgaaataatatttaaagagagaaaaatattattttagtgtaagatattatttattttaatcctagtgaaataagagattaataagaattaatcaattattatttatgcaaaattgataaaagtattttaggctttaaaatatgacccacatgtgtggggcttagccccacacatgtagggtaacatataaaaatccaagtagtttactaggggtctcaatgctacaaatgtgaccctcattcctaaggtacctaatccgaaaaaagtatctcagtttagacctatttctctttgcaatgtggtctacaaggtaatttctaaaatcattgccaatagaattagaccgattcttccccggctgatttgtcctactcaagcagctttttttccagaacggaatattcaaaataataatgtcttagttcaagaaattatccactcatttaaactcaaaaaggggaaggaaggtttgtttgctatcaaaattaacctagtcaaagctgatgataaactaagttggcaatttattaatcatgtgctccggagctttaaggtccctgataagttttgtaattgggtccggcaatgtgtttcaac

SEQ ID NO: 57953 - DNA, 1659 bp, Cannabis sativa
gataggtgttttgaatgctattctgtaagcccacaatgcatcatctagtttccttgacatatccttcctcgatctttacactattttctccaatatcagtttaatttcccagttggaaatttcagcttggccattactttatggatggtaaggtagagcagtcctatggcggactccatatctggctagcagagcttcaaactgtttattataaaaatgactcccttcatcgttaataactgctcggggagttccaaaccaagtgaatatgaacttttgaaggaaagacaaaactgtcttaccatcattggcttgtgttgcagcagcttccaccaataagatatacagattgctgaaagaagatggaaaaggacccatgaaatctatccactagacatcaaacaactccaccttcaagatacctgccaaaggcatttcgtttcttttggaaatattccaagttctctgacaacgatcacatgccttcacaaaatcattagcatctttaaaaagagtaggccaatagagcccactttgaagaaccttagcagctgttcttgtgccgctgaagtgccccccacattgtaaggcatggtagtggttcaagacagaatacatctcttcttcaggcacacatcttcttattatctgattagcacaatgtttgtaaagaatcggctcttcccaatggtaatgcttcacctctaaaaagaactttttcagctgttgacgagacatctcagggggtgtaacatttgcagctaagaagttgacatagtctgcgaaccaaggcaccatcaagctttcccttaaactaaagaattgctcattgggaaactcttcatttatctgcacctcctttgcattttatctctcttctaattcaagtcttgacaaatgatcaacaactaggttttcagtctcctttttgtcttttatctcaatgtcgaattcttgaagcagaagcacccactgaatcaaccttggctttgcatccttcttggtcataaggtactttattacagagtggtccgtataaacaatcaccttattcccaattaggtatggccaaaacttgtcaccaacgaacacaattgcgagcatttctttttccgtggtggatagttcaatgagcatcattcagggttcttctagcatagtatatggtatgaaacaccttgtcaactttttgtcccaagacagctccgatggcatagtcacttgcatcacacatcaactcaaatggcaactcccaatttggtgaagtgactataggtgccgatatgaatttctacttaagagtttggaaggccttcaagcattcctctacaaactcaaaaggtaccccgttaacaagaagattggacactagttttgagatctttgagaattccttgataaatctttgttaaaatcccgcatggcccagaaagctccttactccttttacagaaactagaggggataaattctcaattgtagacactttggctctatccacctcgatgcctgccttcgagatcttatgccccagaacaatcctctctattaccatgaactggcactttcccagttaagtaccaagtttgactcctcacatctgattagcactttctccaagttcttcaaacaatggtcaaatgaggaaccgaaaactga

SEQ ID NO: 57954 - DNA, 933 bp, Cannabis sativa
catcacttcctccccaaggggaacaaggtgcacagaggtcgatcttcgaccgacgaggaccgagagcgagtggaaacacccaaaacagtgattcgagaaataaaattgatcactttacgcatttagatccaccaaactctagcaatatgtgtgatctacctccaatcaacacaaagctaacaccaatcgaccgtggagtcacgggcctggcaagccaaggaagcatcatgggcggccagaccctgcctaatgtaggtctcgccagcaaagcacaacagccaggtataggcctggtcggcctaggccaactcccatatttgggaatggccggccagggtatgcagagtctagctaattttcaccatacactctcccaaggtatggccagtcagcccctatctcttcgaaacctgcagcctccccaaggagggccagtcaaccaggtccccacaacaacagatccttttgtgcaagcacaataagaccaactcagggacatgattaaaggcatagctagcctgaagccttcagaccttaaacttgatcggtcaagggaatcactgttcttggcatacataaatgccttgcccttgccgaagttcaaaatgccagtatgcaagataaataccgagcgagaggacctgttggctcaaatcaaatactgaaagttactggtgatgtgcggtgtcgcatattcccagccacattgttagacacaacccaataatggtactttaaactcaccctagggagattcaactcttaggctgagttctcacgagaattttatacacaatttttcgtcctcgagacttgtaccattacaactagaagaccttgtcaaagtcaaatagcgacaagaggaacctctaaggattacattcagagattcatgaccgaggctaccaaagtcaaaggttttactgaagaagg

SEQ ID NO: 57955 - DNA, 883 bp, Cannabis sativa
  modified_base (607)..(609): a, c, t, g, unknown or other
agaacattgaatttgattaattggtgtcaacacatcatttaggtatcaaaaaaatacaagtctaggacgttttagcactcactctctgtccaggttgatgtcataatgtcaagctgggcgctgggttgtcaacctggttgtaaggtgctgaacaaccttcagtaaaacggtcatacatttctcaatattaatcttattgacgcgattcaacttgcatttcgaagatatttcaaagatttatcaagtcatgtctcatacccacattgcaattatgaagatttcagatccaaaattcctcgtcatctaagttgcaattttcttagcaattatggcatgtttggtttagtgtaatgagaattgtaatggaattattattaccattacatcgtttgttttcatttttaaacctttgtaatggctttacattgtaatggtcattacaatatgtattgtaattcccattacatcataaaactaatgtaatgacgattatattgttagaaaatatttcttttgccctttttttattacttttttttttaaattttaaatattaaaaataataaaactaagggtatttttgtcaatatacaacttattttatttnnntacaatgttcattacagagttaaactaaacatcataataccattcttattataattctaattccattacattatcattcatattacaattactattcccattacattacattacatcaaagcaaacaccaccttaatgcgaaaatgatccgacagacgagattcaaagttcaaaaattgacgattttcatcaagagtcaattttcaccattggatcgtcatggatcatcatcaatggccatgatcaactcaaaataattttttttcatattttt

SEQ ID NO: 57956 - DNA, 1393 bp, Cannabis sativa
atataaaataaaaatttttaaaatgggatgatgggatgtgtttaaaaatttaaaaaattttaaaattttagagtgtaaataaaatttcccaattataattacatatttaatcttttgtaaaatgactaaaataaatacattaacatctttttttggtttattaatttaatttttaataagtacactccactatttttttcttataaacactacactacttaaatttttatataattataaatttaaaaacaaattgatatgagtattttttaactccagaattattaatggaaaacaccgagatgatacaaaataaatttctgtatatgtatttaattcaattttatattattaatattatatgcatgtatttttgtttctcatgaaaaacaaatgaatttagttatatacaaatattagactagaaaaaaaccaaaaaaatattcagttagtttattttttttttctcaaaacaattcctaaactactactattttttgatttttcgtaacaaaccatttaattctttttacaaatatgactttaattttttaggggaattactccatatactattttttttacttttttttttttaaaatttacgatttgaatttctaaagtggttgcagtgctaattgcaataaggatttatgtacgattttttgtttcaatttaggttgcagcgctaattgcaatagaaatttctatgtgaattctataaaaatacaaaaaaaaaaaattgctttgaagtgtaaaaatgaaaaagtcccaattttttattattatttatttcattagactttcttggacaattaatgtgtagaaactattaatgacttctgagttttctctctcttttttttaatcgtaacttaaactttcaggtataattaaaagatacccttttggtaggacgtaatcataaaaaagatattttaatcaaaaaataggataaatttaataatgaggtgtagttatagttttatagaagagaaatttgcggtcaaacccccttatgtttcaattgttaaacacttaaccccctattctttatttttggtggtaataccccccttatctttaattttgtatgcaaatttgatatatatgttaagtttgggtgttaagtgccaactaagaatgtcactgtgtatacatacgtacacgtggcatattttcattggtccaaaataattttaataacttaaatattataaaaattattttaaaattaaacctaaataaaaataatacttttcttttttttttctttacttatttatcaatttttttttaaaataaataaataaaaccttattcactcatctacccactctctctccaaatctatccctcatattcacgattccctctctccagatccatttat

SEQ ID NO: 57957 - DNA, 952 bp, Cannabis sativa
gctataaatacgtgttgtgttagttcatctcatatttttatgattttttaaaacaggtcaagttgtgctaatgttataaaaaaatatgaacggtatcgtatcatacaataaattttattagggcacgcccaatacagtgtgacagtagttccatgattcgcaagggaaatatcagataagttgtgcaatctcacattgcctgaacaaggtgaagtgtgatgattctgagactgtgtaaatatgtgactacacaattgatcaaaagggcttaaatagattaattggacccagatcccgatgctgactcagatctaaacctcgacccatcaaacctggacccgaccctaaccccaaaaatctgactctagacctaatcgacttataaataaaatcaataaataaaatttacagaacatatttttatttttttttaaaaaaattgaataacaaaaatagttatataatatatttcttaatttttaaaaatataataaaaaaatcttaaaaatagaagttttatcaaatgaaaatttaatataaaataaatatagactctaaataggctaaggacaaaatatgagtgatgagaatatgaatagaataaaaaaatattaaaataaatgtgccgacagtgtatatggaagagaagaccctttctttcatattcaatattcagtctccaaatatgtctctttctcactttctttattattccctaaataagtttatatatattataatttcttagttaatttttgtatttaaaaatatatgtcgaaatatcttttttaattttttttatagtaatattcgttatagttacaacattatttttataagtttttgtgaaaaaattcaaatagtttacagtgtcaaaaataaatttgaaatttttcgaacacacataataaactgaaatatcaagaacttcagtactgtaaattattcgaaa

SEQ ID NO: 57958 - DNA, 2153 bp, Cannabis sativa
caatctctctattgcaaactataatttttttttctatctattagtaaaattaaaaaccctaaatcataaccccaccatacctgcacacattaacttgttggaagcttttcgacaatcagagttgaaaactatacaaatgatgatttaaagagatacaccattaagattgaggattgggcagattgagtctccaaaaaacgacttgatcgaccaccttcccagacttaggcaaccaccaccgcaagctcaggaaggtacaataaggatgtggctttttggtttcagacttttggatccgaggttgctgcatcggatgagttctctcgaaaaataggtaattaatttctgggtttttttactttgataagttcgatatttacttttggatctgtttgaatggaaatcgtttaaggaatggaagagaagatcaagtgaaagagatagatctggtgggaaagtaatttggagatgtgcaactgtgagaatcaatatatgtatattttgttttatgctttgatattataatgtgttgtgtataagttagggaaaatcatttcaatatgtacaaatctgagtttgtagaacacgaatatggaacaacctattaattttttgggttttttttcttgggttttttttttttaaacttgaatctggttttggaaatgttgagatgatgaacagtggttttgaatatggtgaagatgatgagtacgataactgagggtgatgagtacaatgatgttttttttaaatttttttatgtaaaatgatattttttttttttttaaaaaaaaggtaagaataatagaatatatatattttttatgtttttaatatattttttattttaaaatgatttttaaataggtttaaatgaattttaaaataaaaaataaaattaatgatgtggactaataaaagagtgacacgtggacacttacttggaagaaaacggagaggtacctacggaagttccatgagtgtgacagaaggtatttttaccgccaaaaatatgacttaggtatttatctgctacccgacataaaacttagatatttatgccgcaaattactcgattttttataagctgtttccaaaaatttattaaaaataactctataaaataaacttatataaagtacataccgtatagtaacttttagatatgaattaacaaattttttactaatttataaaattaattgacttttatattttgtttaatttatattcgctatttctttttacattaacaaactataaaataaactataaagttactttcgatttcgaatattttatcttaaagttagtatattaaattttgtttatgttaaagtttgattacttatttttttttaaaataaaatgaaagaaaagaaactaaaaaaatattttttactgtaatgaagtacttcaattatttagaataccatataaacttttttaaatatgaataacataatataattagtaacctattaaaattgattttgttgattttaaaatttgattaattgaaaaggaaaagaaaaagtaactaatattattttttatttcagtcattttattagtgataatgaaaaatatatgtctcgcacattaaaataattactttttaaaaatatattataatagtataatttttaagctcagataattattgatgaaaccaaaaaagatttataaagtttgaaaaaaataaaataaaattaaaattataagaaagtgagagagagagagagatatgtaaatgtcattttattttcattgtgaaagaaaaaacaaaaagcatataaatgaaaaaacaagtggtgttagcttagcaaagaattgagttataagagattttgaaagaaaaaacaaataaaccagaagaagggtcaagggagtcactgactctcggtggttaggaaaaaaaaagaagaggagtctcagtatacgcatattagattattaattgaaaatttgttatattctgagcatttaaatattagagcgtatttttataaataatttaaaaaatgtgtatgattaggtaattttctcaaaatataacccgtccaatctttatattaggcgagttgaaaataataccaaccctcccaatcaacccgaactaatccgaccaactcgatgaaaatagtttt

SEQ ID NO: 57959 - DNA, 2262 bp, Cannabis sativa
  modified_base (901)..(903): a, c, t, g, unknown or other
aatttatattatatatttttaatcctcaaaattattatgtgagaaagattgtttttatatgtgttaaaaatattgatttttgtttttcgtaatataatctaataattatttttgctattatttatttaaatttattatggttttgaactaaattatttaaatacattctaaataaactaaaaattacatagtttgacaaatagaattgaataaatttatctctctaattttttcttttttaaaaaaaatttatctcaatagtactcaattaaatacatatttttgtagcaatatgtattttcaaaaacataataataaaaaaagagtaattgtcggcgtcaaaattttttttatgtttaaatttttatttacttaatattttaatttttttttgtgacaatactcctttaattttcgattgcaaatttgagacgcctgttaaaattttaccattaaaagttagttggattttcactgtgaacacttttgtatgcaagatatgtttttattaactttgagattttagtgtcatgtatatacaggtgtacacggtgacaatctcagttaacatttaaaattttaatttaactggttcaaatttacaaatagaaataaagctaaaggagtgttgctacaaaaaaaaaaaaaaaaaagaacaaagaattatgtatataaaaactaaaacataagaaagtttcgtacctaattaccttaatgaaaaatttatatgtttccatcaaacaaagtaaatataattatattaaatatataactgaaaaacaattattgtaaaaatatgattataagtacttttaatataataatttatcctaaaaacaatctctcaaaatataagttattttgaattgggacaaaaaataaaatgttttttttttttaannnaaaaaaactaattatatgtattggtcatttcgcaatatgataaagtttgaaattatggtaaaaattgaagaaaaaatattcattttagtgattgaatctaatttgtcacacaacacatgtaataaattttggaaagaattctacacgtgacttgtcacctgcatgttttatctagttttaattataaatgtcagtttatttattcctacttaaaaattagtattagtaatagtattataaattattaattacatttatgccatagtaattaaattattctattaatttaatagtttggtcagaatgaatataaaatgtaagtgcacatatatatatttatttatatgaccataattaatgaaatagcaaatgattcaagtactaaaatttagaaatgttgtttatagaacatagatcatacatctagtataaaagattaaaaactatgacatcattacatatttttacatatttttaaaggttttaggttgtgtacgcatgaggtttaccccaacagattttacatacgtcccaattgattttgttgattgtgaacttgacaagtaggataaaaggaatgtcaaataacaaaatcacctacaaaactaaatgtaatataagaatatagacttgaaatatatatatatataaattaatcaaatgagtagaataacttacagatgcaatagtgataatccttccagcccgagcaaagcctccaaaagtgcaactatcaagttaggtacaatagccaagcaagaagtgaaaaaggaaagccctaattttctaagaccaacatgttaagaactgtaaagccttgattttctaagaccagcatgtttagaactttgctagatttttgagtacgtatcagttattaataaagaataataatacaatctgacttgcataatgtattgttcctatgatggtggaactcttacaatatgtcaacaaaaaatacaataaaatttattgaactgcctaagacagatacacaatcttagggagaaatataaaggaagaagtcattcatgaaaaatagaaagtaaaataattgcaaagctcttcaacataaaacaaagactacaaagtaatagaagacatccacataatagaagactacaaagtaatagaagactacaaagtaaaatgaattttagttaagttaaacaactctttgatcttgaagattcgatttgaagaaaattgcaaacagtttcactaacaaaattgataagcacattaataaggaaggctaatgcaagagtgaaacaattaacttccatcatataaaagttacatacactaatcataattcttattaccaataaggtggaatgttgaactcacagagat

SEQ ID NO: 57960 - DNA, 1013 bp, Cannabis sativa
tgtaataaaacaaactttgtaagtaaaaaagtaggtataagcgtgtatgagtaattttgtaataaattgtgtaaaatagatttttcatgtaaaaatttctttattatattgtactgaaattttaataccttggtataatttttttcttttttttaattattagatggtattatagtaaaattttaaaatattatttactttcaaaccccccaaaaaattaatatatttatctttattgattttttcaacattttatttttattaattattacaaatataattgtttaaaaaagaaaattacaataaatacaaagcaagtaaaaatattactagaataattaaggaaaataaaatacattttttttttttctgtttacactttttgaataatccttatagtatttattttgttacaaataatattttgactttatgtgtcacctatgtgagttatagaaaagtagaaagtgataatttttatttatgtaaaaaaaaatggaattatattcgcactccacaaaatgataactacactctaatattaaaaaaaattaagtttaaaataatttttaaaaatcacttttaatttttttatcaaaattttcttctcatattttttgtgttaatttcaatacttattttaattttttttaaaaaaaaaaatcatgtatagctttttttttctaataaaatttcacataattttttatttaaattttttttataatatttaaaatataatttatttttgtttgatatgtattttttttaagtatatgaattaaaaaaaaaaactaacataattaaacatatatattttatgcaaaattaaaatgattaaaatttaatatattaataaatttttagagtgcaaataaaattaatctaatttaattattttttttatagtatattagtaccggatcttctcagaattctacaatgaaactctaaattcatagatgagaatagtacaaagtaaattatttagggtgtgtttggtaacacttttt

SEQ ID NO: 57961 - DNA, 942 bp, Cannabis sativa
atatatatatataaaagaataagatacagtgaataaaacaatatattttttacattttataaaatataaatccttaaaaaacgaatgaataaaatataatatttgattatatataattctatatacctgtgatacagtaaaagcaaaaaaaaaaaaaaaattatatatatatgtgatttgaatatatagtttatgtgaacattcattttaaagaaagaaaataaaaataaaaaaaaatagaaaatagagcttacgtattttcttcaataaaataggagagatctataaaaatatcaaataaaaaaataaagcttacttgttttctttttcttcaataaagtaggagaaacccaggaaaaaaaaaatcgttgcaggaggaagataaaaaaaaatgaaatttgtttgtatattgatattgaattaaaataagacttttataattctgagagagagaaaatataacattaattataggataaaagttaactgttgacttaactatagttaacgttataaatttttattaaaatacctaataaatgaaaaaacaagtgacttaaatttattagtgggacagggtggagatatgatttttgggacagaagattttttttctttttttcttattggaatttgagaaacttaatagttactagcagcatcttacgtggttcgcacgtgtggggctcttaaaattattttaaaaaagaatttgtattttatttttaaaatttatgacactaccaaattatatcctttaaaatatacattataataataaagttttgtgaactattctatttacaaaaatatagtatttttgttaagctttgggtttttttttttttttatcatttcaaaattgatgtgtcattgtaaattaattaattttcacatgaacatggacaactactaaattatgcttttctttttttttttttt

SEQ ID NO: 57962 - DNA, 508 bp, Cannabis sativa
ctttgaagattaacaattttatataattttcacattctcaatcaatgtgcatcattaattgaaaacttttgactctgatatcttaaaccatttgagatctcccactattatatcgatagttaatgctctaatatttaattgagaatgttaggccactcaacatttgagctgaatgtagtatttttttttctttccttcatcattaatttttgtaaaatttaatttgtaaaatcatccattttataaatatatgttaaaattagtttttataattaaaaaaatatagttaacataacatgtcttcataacaccttctccaataaaaaatgtaaaacttatgttacatttagtaaaaaaaaaataattttgtgatatatttacattaatttttagtaagaataagcgtgatacgtaaaggtgaagaaaacataaaaattttaaccaacccacgaaatgtgattttttttattaaaagaggaatatcattaacttaggtgccgtttggtaa

SEQ ID NO: 57963 - DNA, 746 bp, Cannabis sativa
  modified_base (384)..(386): a, c, t, g, unknown or other
cagtgaaaacttaacatagtataatgcagtatgaaacttataaaaaaaatacaatacaaaagtaaaaaataccgcctggcagtattttttgtaaaaaaatggcaaaagttagtataccatgtaaatttagtatgatataatgtggattgttgctaaaaaaatgtaaacagtataaaaaagaatagtaaaaaaatattttttttccttataacagtaaaagttaaaaaaaaaatggagaaaaataatattaggtgtaaattctaaaaaaaaaagagaaacttacaaaaatataaactttttctcctatctttacaaaaatattgtcacacggcaataatttcttgtttactgtcttggccaattttttttttttcttttatactnnnaacaccaaaaaaaaaaaaaaaatgaggcctccatcttcgacacctacagatagaactaccacaggaataatcggaaaacaactattaatttcggtgagattgagaaaaaaataatgaaatcgaggtcaaatatataatcatggcaaaacaataaaacaacactaaaacaaatcaaacataataaagaaaaacatgattgaaaaaaactaaaaaatattttgtacaacctcaatgcccaatgcaataatagttatatttgcaagcataatcttaaagaatcagaacaaaaaaaactactaaaacaacacaaaaacaaatgtaaaacaataagcagatataaccacttaaaaaaacataaaa

SEQ ID NO: 57964 - DNA, 868 bp, Cannabis sativa
gatgacgtggaggattttgattgggtcgatttggatttcttacgtggtaggtttgattaagaaggttggttttttatttgtctttgaggaggggattcgaacttgagacgtgtgaaccgctaaactatgtttatgaccagaataagaagtttggtttagtaatagtgtaatgaagagcctggctggattttcttgtggggtccggtgatgatgtggaggatttcgattggtttgatttggaccgtttgctttcttacgtggtaggtttgattgagaaggttggtttattttttgtctttgaggaggggattcaaacttgagacgtgtgaacagctaaattacgcttatgattagaataagaagtttggtttagtagtagtggcaataaagatgtctagctggattttattgtgaggttcggtgatgatgtggaggattttgattggtttgatttggaccgttagctttcttatgtggcaggtttgattgagaaggttggtttattttttgtctttgaggaggggattcaaactttagacgtgtgaaccgttaaattatgcttatgactagaataagaagtttgctttagtagtagtggcagtgaagatgtctaggattttcttgtggggtccgatgatgatgtggaggattttgattggtttgaattggaccagttagctttcttacgtggcaggtttgattgagaagtttagtttagttacattatgtttggtgtgagagaaaagtaagaggatgaaaatgagggaaacgagaggtatgagaggtcaaatcctcttgtttagcaagaaggataattggaagggagaagggtgttaattataactttttattacaatctcttagtcaa

SEQ ID NO: 57965 - DNA, 985 bp, Cannabis sativa
acaagtacggattttgaatttttcaatccaatcaaatccgcacaagtgcggatatccgcactttgcgaattgaattggactggatcagttatttcatgaacacccctaacatgaaagtacaaagtcacaatacagagattaaggttgagaagttattctctcaacttgctccttatgtaagcctgaagaatctcttgctaagatatgcactaaagtgtatccatttcttgggacaaaatacggataaacattagaatatgaagataaggtattgataatatttgagattaaactggataaagctgagcgatatttcaacttatgttttattttctgaataagttggaggcagtcttttgcaataagggagagaggtaatcttattgccaaaaaccaacatagagctagggaaagagcttgtccttctgcataaagaggagaaattgctctaatttgtggggtggcgagggctgcaatgatattattgtgacagtcccaaactaccgcccctaatcctgatttccccttatgaacatttaaggttgcatctacatttaacttagagtatcctaaaggaggcagtttgtcatcaaattttgggttttgtacgttaattgcctcattccttgcagtaggagaagggttggggatagtactctcttgagcttcggcataacctgcaataacttaacaatatagtattttgtattcatgttagaaccagttttcttattaattttttttttatcatttctattgttccaaatcatccataagatgctaagaaaaatccacagttgatcctgagatagtacatcaaaacctctaagtaaataaatgacagtaaataaatgatggtacatcaaaatccacagtatttgatatcacagtatttgttcatggagggtagttccttgaaacaggtttcttttctttccaaacaggttcccaagaagagttggaatagaagttcctgctccttggg

SEQ ID NO: 57966 - DNA, 1018 bp, Cannabis sativa
agagagagagagagagaggtttaattttgattttttataattcgtgttttttttttttttgtgtatttattagtattacaattactttaatattttatcaaaattaattgatctctcatacttatcattataatatatatgtataatttacataattatatactttaaaaatcgtatcaatttaatatatgcatatactaagatcaatatataactataataaatgaatgtataaccatgtaactgtattatatatactatacacaataaaatttatcattattatctccaataatttactaatattataattaaaattacaaatgtatcctaattctcataagtatttatgcaaataatatttttaataccacacaataaaataattttaaaaaattattgtatttttaattaatatatttattatatattaatagctcctgataaaatttcttaaaaataactcacattggtaatttattaacaatatatgtatttattttctcagaattaataatataatataatataataaattaataattttatttataaatgtgtaataatttttttttattattttagttacttaatatgtaggtacgttatggtttgtatttcgataaaattaaataaaaaataaaacaaaaaacatgtatatgatgtgaattcaatcagtaaaacaattatactttatacatttatacatttatacatttatacaattatactaattgatccatttatacattttttaaaattaaaaattatactttatataaaaaaaaaaaagataatgtcaatagaatgatgttacttaaatattttggtactttgaaggagtaatttatgattctcccattccagtattttaattttttttataatttataaaatacatttaattgttgcgcgaagtgcggttccgttttttagtttttctaataatgagatgtatttatacttttataaggtgcaaatagaactccccttcaaaaaattaaaaaactaagaaaaa

SEQ ID NO: 57967 - DNA, 671 bp, Cannabis sativa
aaataaaattaaaaaaaaataatccttgtaacaaattgtttaaactctattttaagagtggtgcacccctttgaaagagcactatagaattttctctaaatattttgtatgattattgatgttaatataaaatatattttaattcaataataattacaaaaattactaaccactcttaactaactccatctgtttgttcgaaatctggattgataaaaatttatgttcgagagcattatagtggtgctagatataataatgcctttaatattttcaatacagatgctcatagatattaaaaatatcagtttatatagttataaaataaaatacagcaattctatatagtatacctcttaaaagggttcttatggtacacttatttttttttttttccgcattcagaaaagtttttaatttttttttaataattatatacgttgtaattatttaaaaatactttaatttattaaaaacttatgaatagtttatcgtataaaaaaaaaattaaactattttgttgcacgcccacgtaactctttttcttatatgcgtcgtaaataattgttcgagttttatttttagcactgtaaattatttaatattttttgaaaaatttacagattgccttaaataagtacaatatatagaaaaaaaaaataaactaaaaa

SEQ ID NO: 57968 - DNA, 1510 bp, Cannabis sativa
aaacaaaattacataaatatgatttaaaatgaaattttaataactgaataaatgatatatttggtatgattttatatatatatgtatatattagcaagataatttatattaatgactttttttataaaataatattctcatctcatttgaaattcagtgacataaatatggatgaatgtaaagatatttgttttattaaaacaaatatatattaacatacatttttttaataatttattcttaaaaataaattaactaatttatgatttttttttttattaaatacttatggtatttggttctcattttctttttttgtcttctctttcattagtttatagagtgctctctctctctctttttttctttttaatcttttaaatgaaaaaaaaaaaaatagaactaatagactagtaagttagatgtgtgtggccatttgagggaaggcatggcatagcatccaaacaaacaaacaaaaaatgaagaataaaagcaaagaaaaaagagaataaaaagaagaagataagttgtgaacaaatttggtgttttagatttttttgtcagaactcagacatcaaccaaaaacaaaacttaaaagagttaaagaagaaacaacctatacacttttagcagaaaaaaaaaaggaacaatttatgcacatgctataataaccttcacataattaaacaaaaactacagaaccacaaccatataacactagtatacactttatgatatataatttaaaatttgaatgttgcatatttcattttaaaccaatatttataaaaaaaatatatagttttttaaaattgtataaattatattgtgaatattgtctcacatgaaataaatacaggaccgaccttaggttaaggcgggctaggcctacgcctagggcccacataaaaaataccttttgaaaaatatacatattttttttaaaaaaaaataaaataccatttatctttatcgtaaggacccaaaatttttttttttacctatgacccatttcaactcagggtcgactctgaataaaaggtagagtattgagctatatataagaacatgagcttctccacttatcactaatggattttaagatggaaccccataattttcaatatggtatgacaaccacatcttttacgggcatgtgatcctatctaattcgcacttatacagatagtaacaaagtccactctgatacagttcaagattggtgagcaaaaaaaatagacaccgtcttgagatggaatattgtggacattgtcccacatgaaataaatagtagagtagtgagccatatataagaacataggctactccatttatcactaatttattttaagatggaatctcatattttttaacaatgtaaataacactaataataatatattattatatgaatggtcttatatataccgaaaatttctaatatataaaataaaatatttatttaaagttgtttgaaacaatgacttattatttagaatcgggattttta

SEQ ID NO: 57969 - DNA, 666 bp, Cannabis sativa
atacatgaagtccctttccaaatttgactcttgttgacttgcctagaacacactgctcacagaacttgatttcttggatttgatcctttccaaaagctcctttcttcttgagcacttgcattcctccatttccaatgtgagcaagtctcctatgccaaattaaagttggatctttggatgatttaatggttgcattcacttctgagttgtcagtgtgaccctgcagcaagtaaattccattctctttgactcccttcataactatcatagaacctttgacaattctcatgaccccattctctatcttaactgaacatccttcttggtcaagcatagctactgagataagatttctcttgatctcaggaacatgtctaacctgtcttaactcagcaactccaccatcattcaatttcaatctgacagatccaattccagtgatgttgcaagatctgttgtcaccaagtctgactgagcctccctttattgcattgtattcattgaattgggattggtcagggcaaatgtgaaaggagcaccctgagtcaattacccaatttgatgaagagcaatctttggagacaactagaacccctgcactatcataaccttcttcatctgatactatgtcaacactgccataattgttgttgttgaatttcttcc

SEQ ID NO: 57970 - DNA, 838 bp, Cannabis sativa
acgcagcttgggtagggcagataatcttcggtaatagtggtttgatccgattggcaatgatcttagaaataaccttatacaccacattgcagagagatattgggcggaaatgattaggtctcttcggattttgaattttggggatcaggacaatgttagtagtattgactcctttatgcatacgccctgtttgaaaaaaatccacaaccgcttcgcagaagtcagacccaacagaatcccagtagtgtttaaagaaaagaacagacataccatcaggacccggggccttgttactactcatagcaaacagagtagttcgaatttcctcaagagagggtcttctaataagatcggcttggtcttccgaagacaaacagtcccggactaaatcgttgcaattaagagcaatgccattgtccgttctagtgaagatgccttggaagaactccatgaattcattcccaataagctcccttttggaaatccacacattgtctttattgaggatgctgtcaatggcattcctcctaccttttatggcagcagagaggaagaaaaattttgaacatttgtccccttccttcagccaagagaccctggatctttgtttccaatacacctctttcctcacacgggcttcattaagggtagcgcgcaaattcctttcagtctcccactgtcgagatcccactggcaaactctgaatgagatcaagccttctttccagatcactaatgagggtatccagtttaccaaactgggacctattccaatgcataagagcgacccgagtagccccaattttcttgaagaccctagcaggggcccaagggaaatc

SEQ ID NO: 57971 - DNA, 1110 bp, Cannabis sativa
gtaatgggttttatttagggcacaaaacccaacatccttacctttttcttctttacacagagggtctctcaaggtttgtgaaaagggattgtgataataaattgatgtatctcctggcttatggttgtggtgatcctgttgtctcttatcttttgattgcttataatagcttgtttttctttaaggcctcagatgtgttttgtgtaagattcaagaagttaaaaaactggtatggagcagccttatggtatggagcggccttatagttggttaagtttgaaaagactgcagtttattttagtcccaatattctgagttttgagacaaacaaattagtggatttgttgggtgtgaagggggtcaattgcctcgagaattatttgcgactttcttgatttgcgggacatagcaagaatggtttttttgatacaatttgagacagaatttgaaagaagcttaatgggtcaaaatcaaaactatattttatggtcggtcgtgagatcctcatcaaagcagttatttagtctatccctacttatatgatgaatctctttaagtttttgaaagcttttgtcaaaaatgttcatcatatgtgtgctcgtttttagtgggtggtaatgatgttaataaaaagatgcactagtgtacttgggagaaactttgcttacataacaaaaatggtggtatgggctttcgagatcttcatctgtttaatcaaacccttttggcaaaataaacagtaggtggtgactggtttcccttcccagccaagagtggatgtgcctcatggaggattggcggtgacattgagttcagttccaccaatctccaaatgggcgctcctccccctcctggcttttttcaaagtgaattcagacgcttaaattaattcgacgagcaagtgttgtggtttgagtatggtgattcgtaatcatttggaagtggctaaactttgacaagttggcacttggaaggttgttttgttcttgaagtcactgaagctttggcaatccaagatgcttttattcaatgcctctccttgggtatatgacaacatcatctttgagtctgattttttgaatgttgttcttaaaattaaaagaaacgatt

SEQ ID NO: 57972 - DNA, 710 bp, Cannabis sativa
atgtaaacacattaatgagaatacagcttattctgatttttaatttatgcaaataatgcttattcatactattttgtatttggaatgctaatttaatgaagttgcaatttcatataaaaaataataatatttttttgattccaattcatcaatctaattaggggtgaattcgaaggatggttaatctagttcttagtcattctgattacgtgtaagtaaatacattaatgaaatgtttactaaactataactggaatcagaataatcaaaggaagaaataaatcggtttaaaatagaaaataatattgtatatgttgtttactaaactatcccgaaagaaaaataaaatcatatttttttttacatataactaggaaaagtaatcataatgctttaatttgataaaattgtcagtgttagaacatgtgattattttttgtttatagatgtttgaagggtatatttgtctttttatttttaattaaaattaaaataaaacaagttaggaaataaaaatgtatttttttataaaaatggaggaaaatcttttcttttattttatccctagtttgtgcaaatcctactactttctctcttttatttggaatcaataccataccattaattcccattccctttaagtaaacatgccctaaaatcttttctagtactaatcattaggattactgatacaaactcaatttcaggct

SEQ ID NO: 57973 - DNA, 1230 bp, Cannabis sativa
gaacatgaattgtgttaccaacttctatagcttgaccagagggttgtacttcatttataaccgtgtgttgttcttcattctaacattgacattaccacaactgtcatgtctatcagtatcatcggtccaattaattgtgcctccaaactccaacacaactgtcaatatatcaatcaagttgtttgactctgattcggagatacaaatgaagccttgcatgtgtggtatttttttctcccgttgagtaggtgaaaggatactttttatcctgaacacaaaattattaatatatatataaaaaaatataaagtaaataaaaggaaaactaaatatcaataataaataagattctaacctttgatttcacctaaagcctctactacaccactgtaagagggacttttcttacacttccaagttgtcctccatcaaaaaattctcagcactgaattgttaatgtgatttctaagctctacatacttgtttgccactgctgggatacattcataaactaaaatctacacacacaaataagaaaaattattaataaggtattttaatattcttgtactttacttagggaaatttacttactgctaatggaagagggaagcctgaataggtaaacgtggacatgtctgtgctttctcatgtattgatattgctttttcttttagtggctttcgaagttgctttaacgtatactcataagaatgagtcccccaagggatttgttgaacatttccaaatcatcaaccaatcccaataattttgggtcaatgttagcttgttttttgtctccttgcattaagactccaaagatgaacaagattgaagccatctttaatatttcattgttaacttcattattcttccgtgattttttcttttggttttggtcagacaattttttaatttggtctttaaggcgtcaatggtgatgcatgaaggtcttacacgaaagtgtctatctttgaatgattttgactcagcttgagattcccaacctttagggtactttgagcatttcagtccggatattaatgcatactccatcaatgagaatcagattggtatcccattcacaacaaaccacatctctgaatctctgtgacaatctacttcttgaatgagtaatagccacatcacttggctaaaatatctatagtagtcagaaatatcgagaaagtggccaaacaaagattctttgaacaattttaagtgagtcgg

SEQ ID NO: 57974 - DNA, 1654 bp, Cannabis sativa
tttttttttttttttctaagaaacactttgattaatccatttttcatttccatttttttttttcaagatagttacactcttacaatatttatttcaaatccaggaacagttataaataaaattatctccctcattatagcatgtgatctaaaatttgaaatatatatataattttgaggataaattgtagcaaaattttcaataggttcactttaggagcaattaaccctaaaacttaaattttaacggtaaaactctcaaaatcacaataccgttaacaatttataatttttatctaaattagtttctttttctagattgattacttactagtgataaatcacattcaacggtctatcataggataaattgcccatccaggccatagaatcttttccacgtgtcacccagatagataacacatcaccttatgcaaaaattgggataacatttgccctaagtccgcatagggacttcttggtcagacttattcggtcaccaagctgatcaaatgggtgacacatgttcggtcttcaaaccattcttgatccgatgtgactaggcggttgtctttacgatgtttgaagcatttaatgccgtcttggaggctggacctcgagacatgcaatgacggttgtcaagtacaacgtgcatgacatttgcacttttttaatgagcattaactgtcctttttcgtggagaaacccaaaatttaaattttagcttacgaaattgcctctttaacagcctatattataggtcaaaaactatcttatactcgtataaccattttaattttcaaacaatcaaagccatattttcctttttattccactcagagcttcgaagagttcttgatgaaatttcaccatactgaagccatctatgagcattttttaagaatttgcgaacaatgagtaaattttctttcacctttctatttcttttaatttcatgcatgactacttcgtactattctgggaaatttcatgttcttgaaattgttcttagatgatcttaagctaagagatattagggcttttaattgctaatgttaatatacacaagacttctaggcttctaaatttctagcttttccttattttgttaggaattatcttaaatcgcccatttggggccttttgaaaattttcctgatttttgctgctcttttaaactttttgacttgagaatttcattgttggaatgaaatttcttccttttttcttttgaatcagcctggtcggcatatcagatgtgttttaccttctaaaaattcgtacctctggccggttctcacctttttgtcttctttcttttgtagatgaacccttgtgagtactaggaaggtaaccaccaaatcaatagtgaccttctccatcttcttcacgagacccatcttcaactcagtgcagactcatcttcatctagtgaaagttcatccacctcaaattctgacgattgggaattcaacagtgattcctcggagttttcgaagctcgcaatttgacatcattactacccagaccggctaagcaaagagggatacaattgatttatttgggaatagaatagaggttgaaggcattatctcactacttcttggacgtacaaggtccgagccagtgtcattgatattgggaatattttacca

SEQ ID NO: 57975 - DNA, 888 bp, Cannabis sativa
tagtagatctgccatttgaagttatgtattgattatatcataattaagcaaactataatgtgcattatgtaacatttaacttttttttagcaatatatgtagtggtattatatacatgtagtgccaattttaatacatatatttggagtttaatttatatattgaagattttttttagtaagatgatatgaattagttgttgggtgatcattatttagagatctttaaaagttttgtagaggatgttttataattaattaacaatgttaatgagtattgggaactgggtttggaatatgcttatagcagaaagccacaaattaattaagttgaattattttgggacaagccctgactttgtagctgtacaaaaagagaaaatgggtccctaaaaccctaataatacattctgatctttacaggccccagtacttcaattaataatgctcttaattgttcgttataattaaacttgattaatattaagcggtgcacactttggtgcacaatagttttattcatgatattttgtataagatattgaattgtgctgttcccaactgaaaattatatactgttgtgatcatcaatttttatttttaaattaaaatacgattaatcatcataagcaaaactacaaacatttgttgaattcaattgatgagcatcaaagaaatatacaaagatttcatatgaacaaggtctcaatatatatacatttgaattcagaagtatgccaaacaatggatgagttagaaccaaagcattgatgctttctcttagagcaatttagctttagttggcgtttggttggaggtaataaaatggaatagaaagaaaagaaaacaattttcattttattccttaatttgtttggttgcattttaa

SEQ ID NO: 57976 - DNA, 1292 bp, Cannabis sativa
gggcataaaacccaacagcacgttgcaatgaacttagtactaagattgaagagttgacctctgctttaaagaaagcccaagaggaatttccactgacccatattttcaaaaacgagttgggcgtagctcaaaaatcttgcaaagaatcttatgtgagtgttacagtttttgaagaagacatgagaagaaaagatgagatttgaaggaaaaagatgaacaattttcactaaaggagaaggaaatcttctagttgtctgaagtagtttccaaagcacagagacaaatggctagtaaaaaaacgatacaaaatcgcacagttttagatgaaaagctcaaattgcaagacaaaatttgtttaccacatacataatgtcagatgcaataagataattgcatgctgatgtagatattttcatatggctaattaggatttttacctcctgaactttgacatgtatcaaattatgtcatttgaacttttaaggtcgttaaaaaagtttcatgaactattgagattgttggatttaaagacttttttccttagtaaaaatctaacataaatgaaaattcaaggacataatttattaaagtttgagcaacatgatttgctagaagtcaaaatctggagagataatttaatacataaacaataactgaaataaagtatttttaacgaccacacaaatctaaggccacgattctaactataaattttgcagaccacacaatttgctatatacacaacaaatttgaagttatcaatcaacaaataaaataaatttaattttaccataaatacatactattagaatattttttcataaaaaaaactctttattttttatttaaatatttcttaatataaataagtcataaacacatgatattgatagcatattaaaattaattgggcttttcgcatccagaagtacggatttattcggatagactctttaccggataacattttgtttaatgaccacgaggtctaatttgtttcaatatatatctacgcttatttcaaaaaaaaaaaaaatagcatattaaaattactatttatttttattaaaaatgtaaattaaattaaataatatgttgataatgttaaaaatcctatttattggttgaaataaatcattttcaaacttgtacattaaaacttgtactttccaacaataacgacccattaaacaagcaaaaagaaactataaacaactttttttttctttcgaaattgaaactataataatttacactttagttaataatttttttttctttcgaaattgaaa

SEQ ID NO: 57977 - DNA, 1070 bp, Cannabis sativa
tgatcttatctactaaacagctattatggaaactgtagtaggatttaatctctcatttgatacaatgtgtaatctcaatttagattccagcattgtattctagcttccctctaatgcatacctgaattatcgaaatctgtcacagtttgattcactggattgagagggagagaataattgtggtacttcggtttccaatctgatcctctccacatcaatatctgctcatcatcaaaggatagcagcacacagggaaccaactcctggcacaaaaaagggtttgggaatgattttaggaaactctactcagataaaattagcttgtgacttgattttaaaaacattaggaagaaattagtcatttgataattaatcaaatggatgctcttttgaacattctattacatgtccaatactacaatttaaaacataaatagtttatgtagatttgtcaagttccaaatgtgaataattggctagcaatagaaatctacagaccttaagcttggcacctaacttcttatagtcacttgtatgcatgcctctgcagtcaatcttcaccagtgggcttccttcgaaagcatgccgaacatctctcactagagagatgtagactccattcttggctgtaatgtgaaagaataatatatcaaaatattttagtagtgtacaaatttggatccagattatgagcaatgaaatcttctgaatgtaaatataccaaacatcaacagagtcatgttttttttttacctaatttacaaattggcaaaagcctcttccccttcatccgcaactcatcagcttcggtttttgtcaatccctctggagcctcttggataagtttggggtaaacaggtgcagctggtttccaaatcatcacagggtattggggacgagtagcgtaattataattcctgccacgataaagataaactactccaccaaccctatgaatgattttcccaccagttttttcctgacattacaaaccaattttgtactttcttaatctcacaagtcacaactcaataaaatacataaacactagaattaccaaacggtgattt

SEQ ID NO: 57978 - DNA, 1313 bp, Cannabis sativa
attcttctacaggtggcatagatgattttttatcgaattcgcactcatgcactgatgcattacagcaatggaatgttcgaaaatttggcaatatgaggaagaatatatcaaaaatgcagcaggagatctctcggctcaacaatgttgcagacagatctgattcaacaatggtagatctgaaaaattctgaggccattttggatgaattgttagaataagaagagacttattggcaccagcgttctagagtggattggcttcaatgtggagaccagaacacaaagttctttcatgctcatgcctcatctcggaaatcaaaaaatgttatcaaatccttacatgattctcacggtcttccaattagttccaaggctgccatgatacaagtaatttgtgattattataccaatttgttcagttctgatggtgttgataatgactctttacaagatatcctcaatgttgttcccacaacaatcacatcagaaatgaatatgtccttaacagctccatttactggtaatgaagtgtatgctgctctccaatcaatgagtcctgataaaagtccaggttgtgatggaatgtctgctatgttctaccaacactattggaatattgtaggcccttctgttattagccttgtgcttggtgttcttaatgatggcaaggacatgactgaaattaacaagtcaatcataactttgatacccaaggtacccgatccaactgtcatgaatgaatatcgccctataagcttgtgtaatgttatctacaagctaatttcaaagaccattgttatcagatttaagaaagtcctaccatttgtcatatctgaaacacaattagcatttctctctaatagggtaattacagataatatcttaattgcctttgagcttgttcatcatctaaggcacagacagtagggtaggattggatactcagctttaaagctagacatgagtaaagcttttgatagagttgagtggaaatatcttgaggcaattatgattaagatggggtttgactatcattggactacattgatcatgaaatgcatatctaccagttctttctctttctcactaaatggtgaggtggtaggtcatgttacaccccatagaggcttgcggcaaggcgatccattatccccgtatctgtttctcatatgttcagagggtctttctcgactattgcaagcacaagaagaagctggaatgttgaaaggtctttgtttgactaggaattccccctcggtttcacacttactttttgcagatgatagtttattgttctgccaaactactgaacaa

SEQ ID NO: 57979 - DNA, 1519 bp, Cannabis sativa
tgatccttactcattttccctctcatttcttactttctcttctttacccaaaataactttgagaatttcttcaaaatttcaaatttctgctaattgaaaataatttttaagactcgatcatctgcaagagcaatctcagaaataattacattgaagattagtgttttccttctctataataattttttttgaatgttctcatgcattctggattttacgaaatgaataaggtttatagagataatcaaaaatttagacagaatatggtattttctcttgaaaatgattgcttgacacttgaatactagcgagttttcatggcgaactcttgaatactcgcatctctatgataatgcacttttgcatactcgcatttttgaacccatttaacccggagtttgaatatcggtaaaggttaaccttatctcagagttttaacttttcttgacaacccttaggtcacatgtaaccacttttacttaacttcagggttttagttcattgaattttggttgatatgaaaactacatgagttctcgaaatggtgggtgtttccctctaacttaatgttcatgcagttgcatgccccttaggatgctgggaaacacccaaccatttcttgagacagcagttagttttttgttgcactttggtttgcaatcttattattcgggtgagaacactttttgttcaaattacacttgcaccacgttgaaaagatcttttatctttcaaataagcgacctatcggacagtcataggtatgattctagagagggggcctttgccgatgaatcctataaaagcgataacttcatacccaccttattgttagacgatgagattcctgtgggtagggctcgagaaggctcactatctacaagcaagatagatcgcatggtacatgagttagtagaattagtcaccttagaggtgcaagatagtgaatccacagtgttcgcccaaggtagttttgcttatctacaaattgccccagacgtggaagttgaggagatgggcgaggattttaaactacccgatcgcgaggtcgaggacagtgtgggcgatgaagggaatgaaatagattcagtagataatgctccgttagaaaaacctttttcttgcgaggacctagtctcgcgggttaaaaagtctaatctaacaataattaaaagactggatttaattcatatcgccacctcaaaacctatgtcaatgcagcgatctcatcttccattcactaattccgcgattatcccaactcaaaatgtagtggtttcaattcccattcttcgttgtggtgtgatacttcctttccatcattttgtaaaggctatcttgacgcactacgacgtttctcctttccaacttacacccaacagctattgcataattcttggattctacgcgatgtatatggaatacacacaaggagaacccacagtcaatgattttagttatttttatgatatgaaaaatgttggtcatgataatggcttctactgctttagaaaaaggg

SEQ ID NO: 57980 - DNA, 2204 bp, Cannabis sativa
  modified_base (1160)..(1160): a, c, t, g, unknown or other
tctctctctctctctctcgcctaaacattaatcatggtgtttgtgaggttaaaattctaatctcattacagtgtctcatgagttgagtacacactttaatatctaaatatgttcatcctataagatctagtagcccactctattcttgagttattgaggctgacttggaagatcaaggtgtggattcttcaattaagttctgggatatcaaaggttatacaaaaagaatcaaagataccatgataggcatcaagaggtaattaaatttctttcagtagttagatttaatctatattcattatgttgacatccttgagcttatggttcatattagataaaatttattttatcaaaaattcaacttccacttttataactccgatatggatcataaaaacctataattggtaccagagaaattttcataatgatatagattaaatattgtgttggatgattatgtatttatatatatatatatgttgatatattatgaatggatagaattaaatttttttatgcatcaatatgaatcgtttattacatggtaattttgggtgaggaattttacaattttactaaaaaaattatacactatatttttggtataggttttaatgtaatttttattttaaatttatttgtaaattttggttaaaattgtaacatcaaaaagtccacaatacctccattgatgagtcagcttaggtttaaggagtaaaccttggcctcatcgagatgacgagttttggacctcaagtgacgagccatgaaccccgaaaggttgtggctgcaagccatgagatcgaaacatttgatgttcatgtgtgaatgtttgccatgcatggccatgcacggaaaagggaggagacccaaacttgggttcgggtttgaccaaaggccactgtggggacccaacggtcccgtggccagagtaggtgatgtcgaccagcactcctggcctctggttgacaatgacaatggaatagaaggaccactgtggttaacggagatccttggctccaatcgggtcgcacgacccatcttcggtctaaatgaagcttgttccgtgagctcttcctccaccaccgtcggtttggcatcaacgtcatttaagccctcttcaactgtttagtcctatacctacacagtctcagaancatcacacttgacattccccaggcgatgtgggattgcacagcttacccggcgttttcccttacgagaacatggagtttgttctcctaccaatatattggaatggggagcacctccacaagtactatccgtgatccgtcttatagaatgttatctttagtagcagctctatcaactcatcaatagagttagagtaaaagagctagtactcatggctttttggcatggccggccatcattcatcaacgatggcctccgctttgcatgtcaagcaggggtagcaaattgatatctagaagtggactttttattatataagattgtagattcaatttatgtaagttatccatcaataaagaccaattaatgaataaaaaataatattttatgttcaaatatgttgtgtctaaaccacttgctaacaagactaacttcttaaagttattctttttcagttccatatatgtacattagatagcacctcaagaaaattctcaggcaaggtctatgaaacttagtgaattgcaagtgacaaagagaccataagtatgcgtgctcacgtagggggcacccacaccgtacaatgcatcgaactagcacataaaacttatgtaaagaaattttaacacgtagtataagctactaaacccgcttctaagtcaagtgcaggcatactttagattggcacaaaaaaagttaacctggatgcttacatgtcaaggcaacaagaagatagccaggattaaagatcgtatggtcggtcacatatccatagtaaaaagctatagggctaaacagtagtaatgttcaaaagtagagtgcctataggccaaaagaacgaacatgaaaaccccaaagctgaaaataagtaatgttcaaaagtaaaagaccaacaggccttacagaacatgaaatcaaaatgtctatgcaaataaaatcataaagtagaaatactaataatgtgaagctacatgtgtgcaggtgtagctggagctgagttgaaagctacagtgtttagatcgccaatgtgtgggccgaccatagcc

SEQ ID NO: 57981 - DNA, 965 bp, Cannabis sativa
atttgaaacaggtaatcatttttaaaagatcctaatgtttgtagaacaaaatagatatttaatgtatatatataacgttttcattttcattttctgcacataatcaaactatcaaaatactataaaatctagtgtccagtccacatctcttactttcgacctatattatatagtgatcacactcatctttacaaaattttggaaatggtatttcattttcttattccttctttaattaattagttaattattattattattattgttgttattattattaccgtttatgttagttagttttttgattttatattacttagttttgtcaatgcaagttagttgttagttattatttgtttcttaaacacagtatttaaatacaaaagattatatctcataatatcctaatcttaatagtataactttaaagtttatatatatatatatatatgagtaattacataacgttttcaatctcattttcacactcaaaattaattactctctcttactcttaatctctcttcttcgacctacaataacaatttatcttcgtccattaaaaaatttgcaaatggtatttatatttttccttattaattatcattaattattatttctttgttttgcttattaatatattaatttaatttggattttagatggatgaaaatatgatacataacttatgttccatatttaatggaattgaggagagtgatgacaatgacatcataagacttccaactcctccatttgacgaagaatatttaacagcgtataatcagtgtgtattagatcaacatttcaagatatattatgaagatgaaaaagaaaatatgatcgaagttgatggtagattgagtgacaaaaattacgaacaagaactctacactcctaagctttctgattatttgcctaagcaaaacaaatccgaagaggtatatacatttacacttagtaaa

SEQ ID NO: 57982 - DNA, 735 bp, Cannabis sativa
tagaatgggttaaaacacaacattcagaaaaaaaatatgtatatataatatttaagtatataaaattgaaaatatatagtatttatattgctttttaaaaaaaaaaatacatgaacatgtttaccgcacacaaataaataaattggtacatttgatcctggcagttgcattttggtctattagcacaagtgataatgtgtccatcctaagagatccatggccacctaataatcacaatagttttgttacttcaatacatcctgcactggttaataaaactgttaacagcttgttcagagtggaggctcgagtttgggatgaagaaatcatcaaagacttgttcgaagaaggagaccagttgagtgactcaactttaaatgactcttgggcttgaaaatttgataaacaaggacagtatgcagttcaaagtgcttataagcatttgcagctggttaagaacttggtccttagataactctactagtttttggagagatattttgaatcttaaaataccacctaaggattgaaacttcttgtggagagctacatcaggttctttgccaacatgctttcaactaaaaacgacatgttcccattagtacacactgcccttttatgtctttcacatgacgaaacaatatactacgcttttctgttcttttgctcgagctagctggagtaggtctatggtggatatcgacagtagcagggatgaagacttctgtagttggc

SEQ ID NO: 57983 - DNA, 957 bp, Cannabis sativa
ttatatcttaatgaccgaccacatgatgtaaaataacttagaaatgctaagtcttaccatgcccatatcataacactatataccttatatttgatatttgcatactcacaattaaaaaggctttgtatgattaataatgggaaaattctaggaaaattgttatgttacattttctatatgttcccatattttttcttttatgagatttttagtataacttttacaatcctaactatttacgatcacatataaatttttaaaaattcaaagagaaacatattttcttatgcttttctggagcatattccactaatatttccataaaacactcccacggattgtatataaagtattggctaacagtaaaccaaaaattacgagaccagaaataaaactataccaattattatttaggtaacagaagactggaacagttatttttctttttgaaacgacagtatatccaacttcactcagatcacacctacaagattagatggtctacttctgctgtcaaatttcagctcagtcaataaacaaaacataaatttgcaagaacctactgaacaatttaacctttagctaattctctggtgcttcagtttcttgtgaacaattttggtctttcaccatccaaaccaaaccagcttacaaattgttaacacccatttcctccccaatttcagcaaatataccatccaccctcatagaacatatattcacctctgcaagccatgttgtaaggtaaacctccatagtattctcattcaactgccgattacgacccgaatttgagacatcagactttgaaacggccaatcgtggttggactggcccagatgtttcctcagaaaacaagttacaaactttcagatcatcaaattctccttgatagagctcatctgaccaattgaaccttttgacatttgaagcttcacaactgagagataacaattc

SEQ ID NO: 57984 - DNA, 4993 bp, Cannabis sativa
ataatacctttgaaaacaatgtcctctctctcacccttatatatatcttctgtagaaagggatccaaaaagaagaataaattaaaaaacatagacaagaaaaaataaaataaaaaataatgacaatgattggctattttggaactgaagatctacattttgttgacctcgtcatattgccaatttgtccttagtcatgtttgtttgatctttctttttggatttcattcgtaaagttctcagtggaaatgtctgtctttataattatggatttgcattagttgtattgctttaatataatgttgactttttcttgtgttctgctttcttctctaggttcatcgagtgtattctctgatctgtcatcacaacttacaatcaaatgctgaaacttttaggatgatgataagtttgtgcgtgagaatgaaagatgtaaacacttgcctctgtttctgttgccttgcaattatttagcctaaagtgttgggttttgaggtaatttagttttgtagatggctggtgcatacaacctactcggcgatttggagaaaatgaaaatggtgcccactgtcaacatgtataatgttataatggcaggatatttccgcgaggtactatttctgattcatcatatgtttttgttggatgagcgtacatgcttatatgtatttttaaacttacgaacatatgcaatatgcatatggtagaaactaacccagaaactcaaatgaataatctaatctctgtgtttatttattgatatcaaagatgatttacaaatggttccaagttattcgggacaaattggcatgtccacaagagttttgctcttactctttatacaaaataattagatgaaaaagattgaaaggcctaagctagtatttatacactcctataggctataggatagagaaataatgtacagaacaaattgacataacacacttggtgactaaggaaactaattacgaaagaattccaggtctgcaaccaacatcaattaactaattcatatgttaattgctttagttttattccttctattgtaggttaagcgtattgtaggcataatgacatttaagaaataaaagtgatatgtatatatattatgtaatttgattttcacatacatgcttattttgcaacaacagtccaaagtggtcacacttcttaaaaatagagattgaaaaattgaaccctaaattctactagtgttgaagatagccactctccccccttccgctttccttcccgtcttataggtttcaaatctaaactacaatggtttagttgtccttgagttctatgataagacatagagggtattttggggggcactgatgggtactatacacttgacatgtttgtagctattcacgtggttggggataaaatttagtgttgagaatgattatgtagagtgtgctgagagaagttagttacatggcattttgggtattagctattaggtgattgggtgtaaatatcgagagtgaacttgacaaaggtcatggaaaatatgtattttgaagttgagagcatttgctctttggggagagattccaagtgtcttgaatatatggttttgcagttttatttttatcttcttgcaatataagtccatttggtctgcttgaagtgcacatcctttgatacttttctttcttttattctgcagaaaaactttagcggggctttgatggttctcaagcaaatggaagaatcaaaagtcaaaccggattccaaaactttaagctatttaataagcaattgtgtttctgaagaagatattaataaggtataaattctttttgtaattagtaaagattgaaacgattcaaattgcacacacttctttacacacaatgacgtgtgaataatcccaaccacaattaaaagtgatgtgatccccacttaaaaatatcccttttgagactttctatcattactcaattgaaatagtcatgatgtagtgaatgatatattttggaacatgttttgcaatgaaaatagtgtgtggtctagacttttatggctctttccacctaatttttggcaatcatattttgtctcgggaaaagtgataagcttttttttagttataaagtttcttatcttagaacagaagttgtagcagataatatgctgaagccatttttttttcttaggaatgatcgaatgatttttgtagtaaaggacattatcatgcaagtgaagctgtggtggtggtatcttgcttgaagttcctctcgtaatttcttaaggaaagggtcatcggtccgtgaccatgttaatcaaagttggatctagggttgtcatgagagggcatcgccatcgaccaccctattacttgcaccacttttgctatcaatgtcaaaattgattcccatcaatgtggagacccacttctgatattcagagccaataacccgttgttccagtaagtatttttaactttgctagtctgcttgtgccagaaacttgcgccccaataagtaaggacgccatttagctaccgcatagactatgaccatcaactcctcatagatagattattttctagcttacaatcccaaaacctagttgaactatgcaattggcttttgatctctgagaaaaaaaacacccaatccaaagcctgaagcatctgtttctataaagggtttggaaaaatgggaagggggagtaccagaacggtagtcatggcggttttgagtgtttgaaaggctttctccactttcaaatttccaaccaaaatattttttgagttgatttatcgaaggctgagccactctagcatagttggctacaaattttctatagtatcttgtgagaccaaaaaatcctttttactccaatttttttgatgtacgctaagcttgcatggcccaaaaacttttaggatcagcagctaccccgtcttcagaaataatgtgcccaaatatgaaatctttcattggctgaaatcacacttcttttggttgacaactagctgatagtgcgccgctaaggtattcaacacaaggtctaagtgttggatgtgttcctctagcaaaatcattctatttttagtattattcttgtgtagttgtaaatcaactattgtaatttattgattccctatttttagggtatagtttagaattttagtctgtcattattatttgatgttatttcccttttaagagatccttgtacatgttaaatacatggttttgtatgagaaataatatacaagaaattaccttctttgttgacttggtatcagagccaacgcacaaccctaaaccctaatcgtagcctgcttttctctaattccattccaccatgtctgatagcagcgagtcaaacaccacaaaaatcaatccctctgtgaccactattgttccagccaaatctaccactgttgaatcccactcgtccaaattactactattcgcttgaatggtgacaacattctgagatggtatcaatcggttaagatgtatatgagaggttgaggacagatggggtatttgaataatgagaagaaggctccagcaaaggcagatccaacctacaacacttagaatgctgaaaattctataattatggcatggcttgttaattccatggaggatatcaactcgaacaatatgtgctatcctacaacaaaggaactatgagacaacgttatcgagatgtattctgatctcaaaaaccactctcaagtattcgaattgaaccttaaacttagagaaatcaagcaaggggaggacaatttacgaagtattttaattcactgaagcatatatggcaagaattggatctcttcgatacctataaatggaaatctgtgtaagatggtaaaccataagaaaacaattgagaaaacccagatttataaattcttgtctgatctcattgttgagtttgatgaggtaagggggagaattattggaaggcaacccttatcttctattggtgaagttttttctgaggttagaagagaggagaataggagtgttatgctgggaaaaaggttattgacactactattgaaggatcaacccttgctgttggaggaggctacagtacgaacacttcacaactgccaaaactttatgagaaaccccatgtttggtgtgatttctgtaataaacctcgccatactcgagatacatgctggagaatccatggaaaaccagttaattggaagagcaaggctgaaagaaatagctgcacccctactgcaaatgaagtcgaggctagtcttttcactaaggagcagatggctcaacttcatgcattgttgaaatccacttcgtcctcattcggtattcttgttcctaatgtttctgttgcacaatcagatgaagaaataaatgctttaaattgtttctttccaacttatgcttctcgggtaattgacttcagagtttctgatcatatgacaaattcttttaatttgttttgactcctatataccttgttcaggtgataaaaaagttaggattgttgatggtaatttctcagctattgtaggaaaaggtcttataagattatctaaaggaatagatcgtaaatctgttcttcatgttcctaatctaacctgcaatcttctatctgtgagtaaataatcaagggattctaattgttgtgtaatcttccatgaatcttgttgtcttttccaggaccagagttcggggaagacaattgacagtgctaggatgattaatggtctctattattttgaagataatatttctaagaataaaattgctcaatagcttagtagcatcagttcttctgtttatgatcaaataatgatttggcaatataagctaggtcatcttattttttcttatttaaaacatttgtttcccactttgtttataaagttggatcctttgtcttttcaatgtgagagttgtttattggccaaaagccaactcaaatcttatattataattgtttatcattcttccaaacctattttatcttttcatagt

SEQ ID NO: 57985 - DNA, 1178 bp, Cannabis sativa
ctgcggacaatgccgaagaaaccagcagagaagagtcaatcggagtccatccctgaagaggaggctttgaagtcaacgatgcaatcggtccaagaatcaattctggaatcggtcacagaaactgtcacaaattccgtcaagaggattattaatgactcggtgagtgaaatgagtcgccagcttcgtgaacaattgcagcagcagctacagcttattttggaggctcaagaacagtcaagaaaggtccaagaacgaccaagaaatgatcacggacaatcaagaagcgtccaagaacatatgggagaagtcttccgccgatccgacactcgagatgcgtctgaggaaaagagtcctggtgcttcccgcatcttcaatagtggcagaaatccaataacagtggatgccccaatggaacgaaattattacaatccccatcatcgaaacgatcagcggctccgtaaactcaagatgccaacctttgaaggggaaaatcccgacgggtggattatgcaagcagagcgattttttgcttgctgccattacagcaaggaagaaaaggtagaggcagcgtttatctctttttcgggtgacgcactcctttggtatcagtttgagaataaaaagcgagcaatcttgagttgggaggagatgaaacgattggtgttaaggcactttcgagatacacaggctggttctttatatgatcaatttgtggcggtaaggcaagagggtacagtgatcgagttcaagaggcaatttatccgacttttggctcctctagaaaatgtctcacctgaaatacaacttagtactttcattaatggccttcgtcccactatccgcgcgaaactccgtgtgcaacgaccaagaaatattgatgaggcaatggaaattgcccaagacattgaggaagagttgaacgcaaccacccactacagaccaaaagtttctggtttcaaccgcaccacgacaccaccacttcatacttcctttaccccagggcatatgaaagacacataccaaaaaccagccgccgaaatacgaaaatataccgacagtcagattcaatacaagcgagagaagggcctttgctttcgttgcgatgataaatggtcgccgggacatcgctgcaaacaaaaagagataaatgtggtaattatcgctgatgaaattgaagg

SEQ ID NO: 57986 - DNA, 1623 bp, Cannabis sativa
ttacccgtgtagccacatatgatgtagctcctgaatcaaataatatagtataaaacgacttgttgataggaagttcacctgtccccaaaaaggactagctgcagcattagcttgagtgacggtaaacacccgaccaagtacatattttgcctctagcttatactcttcttttttggcctgagggcaatctttcttgaaatgccccaccatgccgcactaaaagcatgtcttctggttgcattcttcgggatgatgtttcttgcaacgtgggcactcagggtaagagtaaccttggcgtccacctctaccttggttcccacggaatcgcttgctctgtccagagccaccagatgctggggtaacttttctcctctgattagtggtggaatcaccaccatccctaccataaagaggagtaggaagagtgggggtcccaaaaacgctcggagtcacacgaggctcctgaagaaacttaaccacaccctcttctcgtagagccttcttaaccatcttcgcatatgatgttgcctcatttttattaatcaccgaatcatgtctaattttcaaattaaaccggccagatatttttctttcttgaattctgtaggcacaatacccgaggctagcttggccagatggtcaaagtttattatatactaagtaactgacataccctcagtctgcaccaactcagtgaattctttttgcttagcactacagacttcttcattgtaatacttggggttaaatagatctcgaaactcttccaaggtcatttcagtgacgtcctgggtgagggactttaactcctaccacacgagagctcttcttagaacttgaatgtggcacaggtcacccgatcatttccaacaacccctatgaaattcaaaattcgctctattacagtgagccactcctcagccttcatcatatctagacctcccaagaccactggaggtgcttgcttacggaacctctcatatagcggcaccatacggttgtcagcaataggttgttctgctagcaccgttggaactgcaatcgcctaagcttgtggtggaggcactggaggaggagcttgctgccttagtctcaaaatttctccgtcttgttggcagatatgatcttgcatctctgcgaacctgtgctcccaatccggaggagcttgtgacaggctgaccaccttgaattctgccatggcctcgaccgcgaccacggggattttggggaatttgatttccctgaacgcctccgatctcaaccctattaccctgacttcttgtgttttgttgggcgtacatttaataggacttaacctgcgaactcgtaagccaggcaggttagacagcgatcataaaaacgtaatagcactcttatggattttaaggcaacacatctaaaaaaaataaccataatctaatatgcttcctaacatgctttcataatcacatattatactaagcaagtacaggattactgaaccttgaaccgagctttctctgatgaagattgtacatgtcttgacaagcttcagtagacaaacctgctggattttgtgccctaaataaaacccatttcaatataatcatatttactaattaattaagatcagaaatcactttt

SEQ ID NO: 57987 - DNA, 886 bp, Cannabis sativa
  modified_base (460)..(462): a, c, t, g, unknown or other
tagcgaagcaaacgccctcttcaaaaatttattcaaacaacaaattaaaacaataataaccttactacaattgaaattaaaaccctaacaaaacaaccaaaaactcaaattcacgtaccttggaagaggtactttgagatttcacgcctgtttttctcagagataatctgaataacaaagttagagttagatcgaaaacaaacatgaaatatagatagaacaacaagaagatgaagatgaataccattgttaatggtggagattgagatggtgaggttgatgacggctagagattgagagtggaaggttgattagggctccttcttctgtaaatgtaaaccctaatacacagattttatggtacgagctttattttgtacagtttcttatgggcttttaagccggcccaaatgataaaaggaattatctcaaaaaaaataacaaaaataacaaaaaaaannnaaaaaattacattgtatacccactttattttatttattgtaatttttacctctattttcatattctttaagatatacctatttttatagatgatgttccgattagaattcttaagttaatgtaaattatatgctagatttaaataaagtatgagaatatattaggcaacccacttaaaaaagtagttatattttaataaaatattatataatggtatttttgattaatgaatataaataataagtatttttcaacttatctcaaaaaaaattataaaaatacgttttgtacgaaattttaaatatttttactaattttatgattttattgatagaaaatacagtcttttgatgtattattatattgtacttttattaatttgttgttgatttttttattatttgtatgttatttttttattgtt

SEQ ID NO: 57988 - DNA, 889 bp, Cannabis sativa
  modified_base (46)..(50): a, c, t, g, unknown or other
atagtttaggaataatttttaacgaccaaaaaaattcagggggcannnnntagtacatgtcaaaattcggaggggaaaattactaattagcctagataattttactgaaaaaatcttagtttgtatctcataatataacttttttgactaataaaattaaacgattgagtgtatgtacacttctgataatttttctggttaaagaaaatagtggttcctttattaaaaaaaatagaaatgagtaattctttatatatgtcgtgtgtgtatatatatatattagagtaatttgtggcataaaaatttaagttttatgtcgagtagaaaataagtacttaagtcatattttttgtggtaaaaatacctctcctccctagtgtggaacttccgtaggtacctgatcgttaagtatgaagtcagtatctacgtgtcactcattcattgctccatgtcattaatttttttatttattatttaaatattatttaaatgtttgaaaattattaaaaataaataaaaaactaattataatttaatttttattttctaacctttaattcttttccattgctttttcattgaattaaaaaacaaactccaattgaaaaattaaaactagttaaacaaactaaattcagatttttaacaaattaagataaaaaaattaattatttttttgaattattaaatctaaacaaacccaaattcttcaacaaaatattcataaattatataaatttatttacactaaacctaaacaaacccataatttgacaagaacaaaatttcatcctgaatcaaaactaaatattacaaacaaaatacaaattaaacaattagatctaagccaaaactttgatttgaaacccttaaatgaggtagactaaat

SEQ ID NO: 57989 - DNA, 714 bp, Cannabis sativa
ttgacctcgcttgaaccaaactcgtaagatgatacgaccttggcaaggtctagtcgcgtgttatgctttgcatagtgtaagacaagtaatattgagagggatttatacaagtcgcgcatatataaaaatatatgcgatgactaagtagccttctcctgcgactaagtacagatcgcctctttaagaaatgattggtccaaatgatgaaacgagttcgatgactcgacaaggactcgcatatctcatgtcgtcgacacacaagatgttcatcaatgcgactctgatagaacgtagacatgctagtgttagtctcattagcactttaatgaatatagaacgcacctaaagcctatgagcttgttcttgaatatgaacaaacaactcgcatcctataggttgcatacattactacatttatagaacgaattaaactgttctttatttattcctattatttagtgtaaaacggttctatagtcaatcagtgatgtataactagaaggatacttgctttctatataatagagtgatccaagatgaataaactaagaacaaatcacttgtaaaagtggactatgcagatcgtgatctaactgaaccactatatttctctatgttcatttcattttccagttgttctattatcttggcagttttctttgaatactcgttattctaattagagtattcgctttttctattttatttttctaa

SEQ ID NO: 57990 - DNA, 1402 bp, Cannabis sativa
  modified_base (46)..(56): a, c, t, g, unknown or other
ttatttctgatctttattaataggtaaatctgattatattgaaatnnnnnnnnnnnagggcacaaaacccaacagaagggacacacctctaggagtggatccaaaagccagcaccttcgaccttgagccaggaggttgctctaaaggctccagccccgaaagacttgtctacttttatcattgacctgactgaacttgctcttgatgtggtaccattgcaacaagtgcctatggggaacactgaggaagatagttcagattgtgacggaccagtcttagttcctaacaagcggtccgatagtacagatggagggaccaataaaaaggcaagggtggagaccaaaaaaaattccaacagttggctgccacaaggagataagctgctgaatgtcaatctcggaagggatctgatgtctttgagggcagaaggcaatcagaaggagcactcgcgctaccaaggatagtcaagatgcgcctccactactcccaacacacattcctgccactgttacacaattgtctagggagaagatagcctcatgttaaatacgtgacttttgtatgaaaaataataaacaaaaagtatcttctttgttgactaaaaataaagacctattattataaaataggcaagtatgagattagtatttatttatagaaaaatatgaagttatatgtgtgtcatatgtatgtgatgtgctattattatgtcattagcgacaacattagaaattcaacgaatcggataaaaaagtcaaagtagtagaaattaatttcttagcggtgctgagattttattatggataaatagaaattatgatttttatggagattagtatggaaatgtaactttttcccttatgttagtttatgtaatttttatgttcaagggcaatatagtaaattcatatattattagagataagtaaagcttaataaaaagctttagaatacatagatgataactcactcttctctctccttagtgtctctctctcgtacccaaacccgcactaggaatgaaccaaatttttattcatcaattttctcaataatttgcaaggaagctaagctaagtttgaagctaatacaggtggtaatttagaggaagaatcaatgtatgtaatttttttgtaaattctcttcatttttgtgtgagataagttagatttttgtgtgattattaggttgtgatgcttaattgttagtaatttgatgttaggagttagtttcctttctatttatgttagaaatgagttaattaaggaaaaatatgtttgcataaatagatttatagaagaattcaaacttttattcttcaatggaagattttgatttcttaatttgatttatgatttgagcttataaataggttgtacttaaggtaatatactattctcgg

SEQ ID NO: 57991 - DNA, 949 bp, Cannabis sativa
tttaaaaaaaaaaaaaatttatatttttttgaatttttttatattatttttccatattttcttaagatatgagttaataaatataaataaacttgaatttttttcttcaaaaaaaaatattagtttacataaattatctgaaaatattttttttttttgaataatttagattttttaaggaaatttaatacatttttttattaatttaatatttttatcagatttcttgataatttttattgatttttttaaaattaatagagcattatcattttaaattttttttttttaataaaaggggacaaaattttgtattggacaaagtttagaaggtaaatatgctaatttttaacggtaaaagaaacgaaacataacagaaggggtataactatataactgttatattttagggagaatttttaacaagctgtatattttagtgagcagaatcagatagtgtcgaaagttcgggaggcaaaaatattaattattttaaattaaaagagatacacatgtaacttgatcttagccaaaagaaagagtgatcacatgcaactctttaaattttaattttatcatgctaaagtattctaaatttattaaaaatcactaatgtcgtaaataactactgtattggacatatgtttgaagagtagatcataaaattttcctataataatatatctaggttaaatggattgctattgcttttatagtttgtggaatctatgcatatagatagctagtagatcatagtgtggtgtatatatataggatttttttatggtagaaaattctataaataccttatttgtgaggatttattataaaatgggtcttattatatttttgtggatataaaaggaggtacatggccactataatgtgatatagtgtagaaaattagtattaatttatgccgtatgtcccacttatttaatattttatt

SEQ ID NO: 57992 - DNA, 1200 bp, Cannabis sativa
cttttagtgacacacaagattcgactctaaatgttcagtgtttattacgcgaactgtgtgtcactaaaaatatggagtgtcactaaatattaaaacctaaaatatataattttctaaaaattaaatcaaaaaaaaacatcgcctatggagacacgcaacgcgtgtcagcaaacgcgtttccctacgtttcctgcgcgtcgctaaagccacgtggctttagcgacgcgcagaaaacgtggggaaacacgtttgctgacatgcgttgcgcgtcaccgtacccctttatttaaaaaaaaaaaaaagaaaaataacatatatcgattatcagccctaattttaacttcatttcttcatcaaacccgcctcttctccctaccagacggctgcaactcctcccacctcataccagccaccaaaaataattccccctgcagccggcgacaccctccaacatcaaagattatcttccaaaggtcaaaggaggtaagtatgatggtttttgattttgtttagtttttttttttttttataaatatttggtttttatttttcttcttcatctcaggccggcggagctcctccctctcaggcgaccggtgctcctccatcttaggcgcagcgtgctcctccatctcaggtaacttttttattttttttaattttcattttcgtttttttaattattttttttcatttcagattacattaaaataatgtgggttgtgtataacctcaaaaaaattgcaagataaaaaaattagttaaaatttaagtataccctaattttgtatttaaaacttggatgtaaatataattttttattaatttcagattattttttttgtttgaaaagtttaatttcagattattgatgttgtttttgttttttttgttattttagattattttaaaatagaaaatttaggtataccctaattttttatttaaaacttgaatctaaatatatatattttattttaatttcagattatttatgttgttgttttatcaatattttttttttcttattttagcttattttaaaatagaatttgttgagtacaagcttaaaaaaattgaaagagcaaaaaataaattaaaatttgggtatactctattttgtatctagagctttaatctaaatatgaaaattaaaatattttttaatatgataaaaatcttttaaaaaataaatattat

SEQ ID NO: 57993 - DNA, 694 bp, Cannabis sativa
ttagtaacagttaatcaaccttgataaacactaggaagtatgaaatttaatttataatcttggcaaatttaactttcttcctcttctgttattagcgtattcccctctgtcaatcacaagagttgaattcattcattttgagacttacatagcagaaaagtcctgcaggtaacaaatattttgatatggctaactctttattgttacatagtcaatttcaaaatatagtacaaataccgtagtgtagtattaatttaaacaatatttataattcttgtatcacaaaaatttgaatatatctacggacaactccttggcaattttaattttcttgtataaatttggactttttgaagttttcaagaacactatattcgaattaacttaattggactacaatacaatgcataacagagccctgtttaagtaagcagatttataaattttttcaatctttgttgatgtgtcgcctgatgtacgaaaatatttagaatgcacaaactataaattaagttttatattttgcattgattatttattattatttatatactataatgatatttggttatattactataatttgtatatctatcgtgtatgattttaataaacgcaaaccctagattttggggatttctaattgaacttggaaaaaaatctagtattttttgtaataaccaaaatattgggt

SEQ ID NO: 57994 - DNA, 560 bp, Cannabis sativa
  modified_base (533)..(535): a, c, t, g, unknown or other
tagttacaagaaagagttcttaaaatggttcaagtggattctggtcacataatacaaaactcataacccatacatcaacatacagtttggatccattgtagaaaatggatattgacagcttgtgaaaattatactgcattgtccaatgtattttaaaagttgaaatttctatttggaataaagtcaagacttcaatttataccaaatatttctttagtaatcattctttcttggaccattactaccaatctaactctaaattaagttgcctatagtaagcatatacaagtagcagattttctaagatcgagaatttatatcattttgggatataatatctagaatatattaatttgtgccacttaatttttatagaagaaaatagagtgacatcataagcagatgatttataaacttttttatccaatgatatactttctaagcattttcataatgaaaaagctaagaggaaaaaaagataatttcaattaaaataaaaattcaacaatgtcctgtttaggtgagagtcaaannnattcttattttataaacttcttcat

SEQ ID NO: 57995 - DNA, 1294 bp, Cannabis sativa
aatgatgtaactcgcattactaatgtaaaatttaaacttcatttatgaataaagagaatcatttatattaagtaattacaaagtatttttctttaaaattacttaaagggaatttatgtatgattaaccggaattcatctaaaaatacatggtataatacaaacctgccatttcaaaaactgtttttgaaatttaaaggttctcgactaaacctctttgacgaaaggggagtcgaactattataactacctgacaaaaccttttcgacgagagaggggtcgaattgtcataacatcttgatcaaaccttttagacgaagaagggatcaaacaactataatttattatttaaaatctatatgacagaaaatcaaaagttataactcgcacataaaaatgaataataacggttctcgcaagctaggaaagtgctaaatgagacattaatttgtcttgacaaaagtacttgaacctagaaaatgaatagataatctaactattcatacgagcaaattgaaaatatacaaagtgattaaatcaataaggtatatttaagtttgcttaactatcgcgaggcagaattgacaactgctcgaaaatataaaagattgtgaggaatggaaaaacccaaaagtactgtatatttgatcaaaatatagttttttaaattgtgaataaaaatgcaagaaaacacaattgtattaaattcaaatgaaaaaagtacaaggcatttaagataagaaaaaaacctagttggttacaaacttgtcaatacaaaaatgccactaggggcaaagaattaagtcatcttgctaaacaaagaatgggagggggtcgataaactcgagaagatcgtctgcacatagcttggagaaagaccggctacatatatctcgagaaagaccgtctacatgtagagtgccttcgcctctccacataccccattctcatcatcataagatcccatttcctgcagtcgagaccttattccaagccacaagaaactcctcgacaccagagagaggttggcacaaaggtcctctggcgcaggtttgggtcttaggttggttggattctgtgatagaaatcacgccaacttccctcttggattcatccaaaaccacgccaactttcctttggcattccttgtcagcctgaggaggacctctaagatcgctcacaagatctatgtctattcatgtggagacaaagaaaaaagagggtaagtggagcaacaaaaatttataatctgactcggtcaacacagtggaatataatcttaattatatgttcga

SEQ ID NO: 57996 - DNA, 854 bp, Cannabis sativa
ctcttttttatgaggaaaagcagtgtgaaatctaactaggcggggccacatggggtcatgtggggcacatgatcacacttgagttttcctaaattgtaattttgtatagaaattatttaataaatttaattttttccccataaaattaattttctctctttttgtctataaatatatgcttttcatttttttctcacatattttttatatttatctgcacaaaatgtacatttttatttatattctcacacatttatttttatctataaatttttatccaacaaaaaattaatatttttcattcatatcttattttaaaaaataagatttttgtccctccactgatttcgccgctgaccataaatatcaatgacaataaaaaatcttatgaaaataaaattagtgccgtgacctaagaaacattggactatatatattttgaacaagtagttttatattttttaggtaatggctttcctaaaaaaataatttatttagagcactggcggatgtaaaatagagtttatttaaaatatttttttaaaaaaaaaccaaacaaagaacacgttacatcatatgtatttggaattgtttcttcattttaaagttgttctttagaattttatttaatttatagaatactttaaatatattttagaggaaattacatatttttttttggatttttatacaatgtctgcaaaaatatgcattttttgttttaataagttattttagggaaaaaaattcaaaaaaaaaaaaaaagtataaatatagaaaaaacagttaagggtgtaattgttaccttatgctgtttacccttcattttttaacctttttttatatataatttt

SEQ ID NO: 57997 - DNA, 1089 bp, Cannabis sativa
aaactagttttttgctcaaaactcaaatatggccattttcaaccctaaatctaacatctacttagagattacaaacattaattacacaatttatttttttgacaacattaccgatagtgaagctgtggattggctacgcggtggtcattgagtccgtaggtccttgggtctgcggccatggtggtcgtggagagaaagaaccaaggttgtgggtggtagaatatgggtcaattgtatgctcctctgtgtgtgtgtgtttacagagagcgagagagagaaggaggaaagagatagagaggggcttgttcaaatgagagaggtaaaatgagattttagaaaaaaaaaataacatattattagatagtttaggtttacaaaaaaaaaaattagtctaataaatgcataaacataattaattaaattttctcatttaatataacatagatatatgtaggacattactactataagggtgtggaaaaagaccccattggtggggatgattttaatccaatatttaggtgacacatcatttaatgaaaggttattttctgtgtgtgagaaacactagattattatctaatatgtgtttttttttctttcaattatcactttttctattgatatatagtaccaccttctcgtaccaatttccatatctataaatctctttgtttactcaaattttaacgacgatgacgtgtcaagagtagcaacacgtggcacaaaaataccgagactaaattaatgaaaaatatgtaaagtcaagatcattaatcatgaagggtggtctgactgttagaatgaaaatcagacaatcacccttacccctaacctgagtaaggtgggcatctccaagaaggaaaaataatggactaacaccttcgtaagcggaatgaacaatcaatacgcacccacatgccaagttagtctagggggtatatactactaccccttacctcccaaaggattagtttaggggtataccctcacccctacactttcatggtacgagtcatgacttttatcatagaaacaatgaaattcacaaaggtatatggggagatccacattgtaccatagttactg

SEQ ID NO: 57998 - DNA, 1046 bp, Cannabis sativa
  modified_base (348)..(349): a, c, t, g, unknown or other
aaactgtgccacgtgtacactgtgtacacgtagacattccaacttggcacttaacacccaaaaatgaatggaaagggctaagtgctaacagaagttgagtttaagaggttttaccacaaaaattttagaattgcgggttagttgcaaaaacctggccacttaaggaaattatgccgcaaattactctactcatttaatttttgtaaaataatacagaaaaaggaccttgaggttcaggatcccccacgctaccatgtttggatcaaatctccaaccaagaaaacgaaacttgtcactaattacaacaaggaatattttattatgactttgtcggttttgtgttatagnnaatgagtttcgtgattttaaattacttgaatttattcaaaatgctaatgattattttttatttgatttcttatataattttaataaaatatgtttagagcaataaataatattctttaaatgtaaagcataaataataaattttaaagaaattttaaaatgaaggattaatatatttctagtacagttctctaaattttttaataaaaaatagtcttgttatgaaatattatttatggatgtcaaaatcaccaaactaattatcatcattaattcttgattgtatttcctttccttatattggtttagtttctcattcttttagttatatttttgtataaataggggttcaccccattggaataaacaactaaaaaattctcattcactttctctttatctcttcatattcttcttcttcttttcttcttatctatcttataagtctctgcccaagctttaaggtatatattttgttaaagttcttgagttgtttcaaagtcacgatacactaaatatatatttatatatatacttatctgactgaaataatttcaaaaacttttttttttctttttatctatatattatatatgtatgtatatatatttatatgtttattattgaatgcatatatatattgtatctcttattgtttatttatgatatgatagaaaaaatttaggctaattaggatt

SEQ ID NO: 57999 - DNA, 2089 bp, Cannabis sativa
aatttttcttagcctagaagccatgccaactaactcctctttttctatgaattttgaaataaatacaaaggaactaaaatattttatacaaaaatcaagtaattctaaaatatgcatctttccttgtttcataaaagagacaaattaccatgttatgctttcaaagattataggaatttagtatttaaaatacaaaccatacttatcagatgttgagaataaaatagacaagttacataaaatatgaaccatgattttttattttagtagaggagacttccaaacttgtatatagttgttagacaatagtgtgtgcagtgaaaaatatgatcattgtccttggcatgtttttcattttttgccttttcagtttgaccccgaagctggatgctttcacaccatactgaaggtagctcttttctatggtagtgcatcctcttcataactcctaattacaaagttctagcttactcaaaagatggctttcacacctcaatatgggtagctctattccagcaaggggtctgacaagaaagtgaaacaaaaattactcaactctgtattaatattataatttatcctaatcacatatatataagtaactcaaatcttttaaaccaacctaaaaagtataaagagtacaagacactaagctaattatcacccaaaagcataatcatgtttcgtcaaccaagaatgaaagaaaaacagatgcaagataagaactactcaaaaattttgtacaaaatatagagccaaatgaaaagaattaaaaaatgcaaacccccagtgattttgtgaaggagtcaaaccgtcttgaatcaagggccttggtaaaaatatcagccaattacttttcagtatgaacatattccaactccaatatttggttgtcaacgagttccataatataatgatgtcttatatcaatttattttgtacgagaatgttgaacaagatttttggaaatatttatagcactggtatttttacaatttttttttaaaaaatacccaattcaaaacataatcaatcaaatgtttcaaccataacaattgagtacaacaactaccagcaactatgtactcagtctcagcagtagataatgaaatagaattttgtttcttactatgccatgataccaagctatttccaagaaagaaacaaccaccactagtactcttgcccaattagcatcactaaaacaaaccaagctagaattagtatctttagaataccagattccaaaattaagagtactattgacaaattcaataatccttttaacaacagaaaatgaggttccatagaattactttgaaaaaaagcacaaacacctacactgtaatatatatcaggatgactagcagttaagttaagtaaactaccaatcatactatgataaagtgtagagtctacctttacaccatgttcatattttgtcaatttcaaagttgagctcatcgaagtacttacctacttagccgattcaagaccaaacttcttgacaagattcttggcatacttgctttgagaaacaaaggttccgccttccatatgtctaacttgaagacccaaaataaatgaaagttcaccaaccatactcatcttgaactcatttttcatttgattaacaaaacctgcacttcatggttagatgtagaacaaaacactatagcatcaacaaccacattagctgattccataacagtttgagttctcatgttgtaagcacgaaaaagtcctactatttgaggaatatactcaacatcactgttagcatcaaattttctaatattttcacgatcttttagaacataaaagcacaaccaatgacatgaaaatgacttatatttggctacttggctttgcagatttcataggatattttggatgtacctagacaaatgaacactcagtgtattgtgtaacaagatatatttatagcctttgcccataaacattttgtcagattcttactattcaacgtcaaccttgccttcttttacaaagtttgattcttcctctcaatgactccattttcttagggagtttttagagtgatactttctttacccagtttgggtag

SEQ ID NO: 58000 - DNA, 1332 bp, Cannabis sativa
cagaaattatccaaaaaactaaattgaagttacttaaatcaaacagagtaagcaatgatgcaattaatcacaaaaataagagtaccaacccaaaaaatgaattaccaaaaagaagggaataaaccacttactattcagatgtgaattttcgcacaacgaagagttctgtaactgggattgagacgaatgaatcggcgtactctgaggacgcctgaggttgaagattaaatctgaagaaactcccagaaaataggtcaatgatagagagggcatgcaaggtattgagaagtcaagaatgattttcgcagaaaagctcgaagggttgaaaggcagaaatggtgaagtagttgttttttcttgaattttatactttaagagtaatcaccgttagatcaagaggaaaaagatctaacggatgagaacgcggaagaattagaaaagatgggcaattaatgctaatgatgtgcctcaaaatcatgaaccaccaaaactcaaagcatgtaatttttcaaaaatggattaacaaaaatacccttgcaatcatttaaaaagctctttttattaaaaaagaactgtttaaggggcaattattatacccaaaattcggctacacttcaaagattgacacgtgtcttacagtggaatatgaaccatatatcattaaatgcaaagaaaaagaataactcattaaataaaaaattaatagaaaatatttataactcgatgactatgtagtcttaagcgagacaaggataaaagactatagaaacctatattgacaagatacatgcatgcctcggagtacacagacccaaaaagataattcatttattcgaaggagtgaatacatttatgcaaagaaacctcgggttatgaatagcgagacaatcacctcgctattttaaagaaacttgacgatgagaattatttgctaacacttagcgttttttctacattataatagccaaggataataactcgaagataagcgagatacaattgtccaaatcagcactaatcatctataaagataagaattaccaacagttaagcggttatctagtattatccacatacaatttaaatgaaatgtaggaattgatcacgtttcatcaacagttatattttgaattgaatgtaaataactgccaacttatattcttataaatagggcagattctttagaaaaagggacgaagaatttgagagagaaaatacatacgatcaattgtatattgtattcaaaaaataatcttaaataagatagactcgtggagtatgcagatttaactgcaacaccacgtaaacatatctggtgttatttatatatta

SEQ ID NO: 58001 - DNA, 965 bp, Cannabis sativa
tataaaaattaagtatcagttaaaaataatataaaaccctactaatatctattaacaacactttattcaacataaattcttcctataatattcaaattcaatcatgctccaaacccacttcacctactactatagtttatgattattttatttatatatttatttaagcatttaatttattgtgagatgattttcttaataaaataaaataaaattcatgttatatatagtacttaattagtatacatattatagcacataacatgtcaatgaacaatcctagacatattgagattacagcctagcaacagtagagtagaggcagtgcaagagaataagtgtaggaacaaatacacacacatctaacataatatacaaatatatttatatatatttctatatataaaaatttggaaaatgttacacaatttcacaagttggtcttgagtgccaggttaggtctgcgcttcgaacacaactagttcaaaaaatctaaaataatttctttaaaatttatacatatttataataatttttaaaaatatcacattttctttttcataagatttctaagaattttttacagtctaatatggtatcatcagccaaataagatttgatcaaatatctacattatcttaagatgatgttagaaaattttacattatgtgtaaaaacttaatactattaaataccataagctactcatcctaatacactttattaaccttatttcacattttaacatggaggtatgaatttcagtacttcccaccccaaactatatattttgtgggagggagggagagtaatatggacggagaggttagagaggatgaggagtaaaagagatggagaggtgtaatatccagattaaaatagtatttaattttttttttttggatattaattgagcgaggataattatcttgtttctttgtgttgttagtgagttgatattattg

SEQ ID NO: 58002 - DNA, 710 bp, Cannabis sativa
atccacataattattaatatttataacacatttttcttttataaataggagtccaaaattaatattttttctatagcccactaaatttcagagccatagtcctgcatggaacgttagtatataacacttgtcatttaaaattttagtaggatggaataacaaaaatagaattataatataatttcggaacttttatagttatttagctgttaagtgttaaataaattgctacacgataatctttgattgatctaggtcattaaataattattttttatttaaaaactaatttaaatatactaataagaaaatgacacataaataataaagtacttacgaaagtttcagaaatataatttaagtatattattactgttaaaaattaagagttaaacttaaatatttatgacacaaattacttttaatttgaaattaagacttgagataaacgtgaattgttttagacaacatcggacatatgtagtggtaacgattgtaattaatgtgaggatattccaagtataggccacactttgcatgtggctcttcttgtatcatctagaggcacgttttgtatcgtgtatatatgatggtatgtcttatatatgtctcatgttttcttaggccatacatgtttgaccgtttgtttttgtgtctattacttttgtttcatatagtattataactttgccatataagtaattaattac

SEQ ID NO: 58003 - DNA, 2443 bp, Cannabis sativa
aaataaaatctaaaaaattataaaaatattaaaaattctgtacaaaccatatttatataattttttttattatttttatatgtttgtaaaagtatttttattaaatatcactagtgcattaactttagcaaattatctgtaaacatttaatattgatcataataagctccactagctccccctaagatagctttatgtatgttcctttattattctgatgcatttaagaaatatgtcacaatgcatagtacaagcctcacactcttgtgcacaaaaataacaagaagtctatataaatgcacctaaaaattaattttttttagttgagatacaaaataattctaaatttagaaactaagttaattagtaaatgtcccttttctaaaaaatattaataaaatgatcaaatataataaattagctgataaaaattataaaaaatatatttactacatattaatttttttaaaaaaatatgtataaattaaattagttatataatccatttagtattgcatattaatatattgtaacaaaaaacgaataaatatagtggatcattaaatatatacaatagtatttgatttatcgtattactgaaaattaatatatcgtaataataaaattatatacaacaaagaaattataacaatacttaaattaatactcaaaaaaatatatattatgcgaacaaaattaaatatactactattaaaatatgtatgcatactaaaaaaaattgatacatagtctatatatataataaaataaaagttaaatatcatcttaaataaatgatatactatacaaaacaaaaattatataccatacagcaaaactattagaaataaaagagatattacaatggaagaataaaataagatgaataaaagactaagacaattacaactctaagcaaaatattacaaggacaatagattaaataaagagttacaatatcccaaagcacaaaatacaaataaagaaaaagagttacaactcaaaactcaaaaatacaaataaatataaactaaaaaaagacacatatataataatatttttatatataatatagaatatatatatatatatataaactagatgatatatagtagagatataaagtatatataaagagtgtatatagtatgtatatataatatataatactatacaatcaagatataaatatatacatatatataatagtatgtatatatatataagattgtttaaagaaaaagaagagagcaatataaaattagagaatataacaaagcaagaatagaagaagaaatacctaaagtggtgatgaggatcaccaaaagctctttaacaagatttctacacttttgtccaagaagattatttctccctctatgaaacacttacggctttgtggaaatacttctgggaattatcaagccttataactctttagctttgtgtttgaaagataaaagagaagtgtgtgtctcaaatgatgaaccaagatctctatttatagtgtttaggatcacacactttgaaattcaaatatcctacacccaatggctgttaccagctcttaattaggtgtaactaggattaaaggggtgatttggaggttaaagctattgaatcgtttggccattgaaacagagaacaaagataaacgaaagagatgtagagaagaaagatgagaaagaagaaagaaatgtaaagagagagaatgagatacgaaagagaagaactcattgcattatgatgagtttgttacagctttatctagaagatgagtacatgacatattcgagatttctcgaggaactgctagtgggatgaaatggacactagtcctcaaagggaaaactaactaaatctttgtcgatgcaattttcacctcccccaactgtcactcgagatcatttgcacacacaagaaaaagggaggtgagcaacctgacaaagcgacacggtatagacaaagttctggttaatcgtacccaatgatacttgctagaaaattttatcgtacaaggctaggtatcagcaaagtacagtctcaagtgtaaaaacttggaaaaatgttgagtcttaagttgagcatttgactataatagactcaccattaagtttcatacagagtttctaagggaaccacatatgagactaaggttgtatatacctataaggctaagacaggattcttgtcaaggtcaaaagaggatagaaaactggccacctgcttggaaccaaagcttaggccggccagggttccatagctttgagaaggtcggccagggtcccatgacctagccaagaaccggccagggtcaccaaacccaggcatgaactggccagcttctagggtgaaaccctagaacatgccagcccccatgaaaaaaccctagggtcggccagatctcaaacaagacccctggggccggccagggttagttttc

SEQ ID NO: 58004 - DNA, 695 bp, Cannabis sativa
tattataattagttgattttaaatatttttaatttttgaatatataataaataagtaaatatagttttcgtaaaaaaaaatgtattatagcattttaatcaaaacaattttttctaaaagttgggttgaagcagctttagtttttagctgtagcttccccaaaaaatcttcaaaaagctattttttaactacttaccaaacacatttttatcacagtttttttcaaaagcagcttttaactttttcaaaagctgtgcgaaaccagccctatatgcaaattcaaattagtcaggttaaaaaaaaaattgaaatgagaatctacatttaaaatatatgtaaaaattattatatatgtgaaaattatcattttttaaatttattttacttaatcacgccgcactgtaacagtagtaaaaaaattatccataatcacatcacttgttcatccaattcaacccacgctatttgcttatagtgcattcgatctgcactatatgcgaattttatattttaatccaatttaatcggtaaaatagttcaaatccaattcaatctaatccacattattacaaattgtattggattaattattttaaattatttattatggattagttactttttttaatatgaattatttaatatttattaaaatatattttttacttaactaataaaataaattattattattt

SEQ ID NO: 58005 - DNA, 1016 bp, Cannabis sativa
  modified_base (878)..(880): a, c, t, g, unknown or other
  modified_base (955)..(956): a, c, t, g, unknown or other
gttaactggattagttatccagacttctaacatgcccaaacactggattggacaaattagcctgtctaatccaatccagtcatgcgtaccaaacgggccccaattgtattgtattccaataacaataggagctcgacgaagtcaaaacacattgacatcaagtttcttattgtaaaagaaatggtacagaatggacagatttgtatagaacacttaggttcaaactccatgattgcagacccccttactaaggatttgccacccaaggtctttcatgagcacactgctcatatgggtgttttagattatgaggatatctagattcagtgagagtttgtctttcttatcctttgtattttttttttttttttgtttcatgaaacttgtgtatttaaataattgtgtatacatatgtgacacagaagaatattgttagaaatttctttatttggatcacaattgtgtatataaaaatgtgtgttgggtcatcatataaatgagtcaaatttatgtggtctattttggaataaaatttatcacttaaggacatgattgtcatgattttaatatgtgaatgccaattatataatttttgatttgatgaagaccaaattagaaatagttaataaatattaccaactgttttaatagttgataatataacaggtaatggtaattgtattttcagactcctgaactcccatcatcaagaaaataatacttcaaaggttctttgatgcaaaattagaatatcataccctttttacaatcaatttaatagactccagtacgatttcgctactcttggattctactgttagatttcttatgaattaattagagctaaattgagattacagttgttgaccgaggttttnnncaaccaataaaatattataaagttactgagctttaagaaattgagagaaggacttttacgtggttggggcgttanngagccttagtccacgagtctctgttatttatggatatctttaatacagagaatatatttg

SEQ ID NO: 58006 - DNA, 1671 bp, Cannabis sativa
  modified_base (1044)..(1050): a, c, t, g, unknown or other
taaacctagtcgctttatgacaacgtctcaataggccatcttgcttactaaattagtacaagattcgcaagaaaagagagttgactaccaaactagagcatgacatctaggtgtaagcatatgagaattcgtggatttagaaagccctttctatgagttagacaatgagtcaacatttgtccaactatttaggtccatgatccctcacttccagactctagatgagaggattcctttccatcgacacttgattcctttgtctcagacacccatacgatggaagaaagattttcttttgagggattgatatatgttcataattggacttcttgctagtacgctccactcttaattgcataagaaatcgaacatgaatctaaagttgtgtcagtttaatttatactgcatgtctgctagccagtaagtggttggcctcgggcattgattaagtgagagaggaggcaactcgatcactcagatatcagcagttagagtatcactttcatacgacaagagtcattggttcaaatccaataattggtaaaactggttgaaacccctgcttttgcaagcatggacttgcaacaaggggtcaactgaatgaccaaagcatcagttgcttactctaacccaccatttgaacaatatttaaaaaaaaacaaaaaaataaattaattactctaattacctcaacacgaggaaacccacaccaaaagccacaacaccagctccacactagtatctaaagttttttgatctccctacaaaaattgatatacacagttcagattttactcaggatgatacgatcggttccaatctggattcagttacatggattagaacttcagtactacactacaaaaaaaacaatctttagtaacaactttttagtcacaacacaatttttttgtgactaaatgtgacttttagtcacaacaaaacgttacttgttactaaaatatacagataaaagttgtcactaattttattttagtcacaataagtattgtgactaaatatatatttagtcacaacaaattnnnnnnnttgtgactaatatctttagttacagaccatttagtcataacatagaaatgataatttataattaatcataactgttatacttttaatcacaagttttgttgtgactaaaaataagattttttgtagtgctaaagtgaacagactttgttaaaaattttgggacagattggaacttctgtaatagtagacaaggtcactaagaccaaaggagaagttaaattcttgtagtcatgtttcagaagtttcttgatgatgaaatttcttttacagatgaaatacaagaagaggaggtaatacaagtgaagtattaatggctagcatttatgtgtggggcactcacttttattaatttatagaaaaatacaaaagaaataaatgatagctaaataacaaaagatatgtgatgacagtagaaaattgatttgtgaatttatatgagctattatatattaacataaaaaattatatcttcttttatcgatctatggtaaaaaaaccttttatatcttatctctatatattaaaatcaaactggaggtaataaaatataatagaatgaaaaagaaatcacttttttttagttatattttgaagtatttagaatgacgtttctattatttt

SEQ ID NO: 58007 - DNA, 603 bp, Cannabis sativa
  modified_base (558)..(560): a, c, t, g, unknown or other
ggggcttagctaataaccctagttggactaggcctgctcatcaaatacttcaattaacaagaaaagtccacacttttagtacttcaactagactttacacacggatgctaagcccattgattattgatcactaacaatatgggctaacacagcaaagaactatcgaatcaatccaagttttaattaataaaacatgttatccgtgttttcaagcaagagatacgtggcatgattaggggaaaagatgtattagttgataagattaattgagataacttataaaattccccgcaaggatatcttggtaatctgggaacagacatctaatgagaagagccattcgcaacacaaatatcatcttcaagacctggcggatcccccgttatacccaattctgaaagaacctggagcctaattaaagtaaatgatctccaggtggagacctcccatggagtggtcccggctcgcaactgtagtctcaaggccaatgaccacattagctccatatagaaattgatttataggtggttacacctttttgttggaaatattttaccnnnatctagatttactaccaagtatgtgtcattaacatcctaatat

SEQ ID NO: 58008 - DNA, 544 bp, Cannabis sativa
gcactttaaccaacggggagtccccacacttaaacgggaagacgaatgacgaaccagccacctcaaggaggttggctagccacccctggcatgccctatgccaagcataggccgaccaacttctagacagtaaagggtcggacagcatgcatcttgcagatgcatgtctggccagacactagcctggcagaactttggtgcacagcttcatacgtggacggcaagctagactccgaattgggccttaacaacccacaaaaatagaggcaaaatatctattttaaggagcattttagtcatttatattttactaatttaatatgtaaatatcttcttattttacctaattaaagcgtttaagatctcctatataaagagccttaactaaaccctaagaccctaagtcaaaagactgatgtcctaagttgaaaaccctaagctctaagtttgaactctctctctttctcacgcgcctaccattgctcttctcataacttaagattttccatctctaattccaacattatagccttaagagagctac

SEQ ID NO: 58009 - DNA, 1316 bp, Cannabis sativa
cactgttctctagcatgccacatcatgaggacaaaattgggataacaaataccatttatctaatctatttatttaaatatcagttttatatatttaataattataaacaattataaaaaaaaatctatttaaatatatttatcaatagacccacaaagtgtcttaattgacaaataaatctttatctctcttttcttctcaaatttgcccaagcttagtgaaaatcctaaaatatgacatattcttattttagaattctaattgacttattaaatcaattaattaagtctacaatgcagtataatcccaaataatgtggagtcaaaaatttactatgtaaatttttcagcttattaattcctcctaactccactatagattcagaatcgcactcttgtttatatagaatgttctatataccaaatatagatacagtatgaattatccattattacaatctaaacaatcattgatcctctatagaaggtttacatcgagtagggataaatttactatttttagtacccttcaaattattttatccttaaaatatttgactacttataaataatattttagtaaactaatataattattaaaataagagttcttctgtatatatcgttaagccaagctctaaccaaactattgttttacttctaaataaaagctatagattctatatctatgattaacactctcagtcaattgcactaacaaattcttaagatataagtatggactagtcctatgggtaagctggtaacgaacaagtcaaagaacctgtatagtacaattaagctagaacttaaccatctcaggattaagatcagttgacctaagttcaactaagtgacatcgagttagaaaagacgtaatggtaagtttatgatatattttctacttttaatatcggtccactctgatgtatagctgatacatatgatacaagtttactttgccaatgtcctggaaagaacattctacttatccaagtgtaagtaaaccacaacgttgattatcatgtcagtgtaaatttaatgcactgataaatcatgggagtaaacaatttgaagcatataatcattgattattttctactgtttagacaacactatatataatcatgaataactatatgtttagaatttaataaaacttatatattaaatatataatcatgaaagtaattatgtgaaccatgcaacataaaataattcatagtcttttattaattagtaaataagattatgttgaaatagttttaattagggcataaaatgccaacatcaacttaataccatatttttggatta

SEQ ID NO: 58010 - DNA, 963 bp, Cannabis sativa
ttaaaatcagatgattggatctatcaacatgttaatcataacaatttagatcaaataaataataggtttgttaaaaaatttgaataaataaataattaaataaacattgaagcatgtaacaaatatctggaaagtaggttaagatatttttattttaaaataaaatatttaaaaaatatcttaagtagaatttaaaatttaggttgttcgaaaatatttgaaaaatatttgaaatctaacaaatctcctaaatatctaaaattcaaaaatgaaattcaaatacccaacgaattttcaaattttaatttatttaaataatttaaattaattaaatacataataatataatataatatcttaatttgaaaattgagatatttctaatattatatttcaaaacttataatttaataaattaaatttaacaaaataaaaaatttaaacttaagaaatttagatggtcaggatattatcaattttatttaaaaaataaataatataaaatattcgaaatatgaaaatttcatggttaaaaatcttaaaatatctatccaaaccaaaaacttaacaactttttcatgctattttgacaaaaatataaaaaaaaaattaagataaatattaaatgagataaaatgttaaaactaatatttttcttatcttataatttaaattaataaaatatattttaaaaataacaatttttgaaaattagatatggttagcaatttgaaattctgactagattatctttaagttttattaatattttaatgtcaaaataaggtcatttcaaattttattaataaagtaagtaaatatcttatcttataattaaaattaacaaaacaaataaaagataatcaaattttaaaattaatcataaaggctagtttgtggaaaaatcaaattttcaaattcaaaggctactaatatctaatactaattttaattaattaaaaa

SEQ ID NO: 58011 - DNA, 1841 bp, Cannabis sativa
  modified_base (369)..(370): a, c, t, g, unknown or other
  modified_base (1202)..(1214): a, c, t, g, unknown or other
tttttttttttttgctcttccagattttacaatttcaatgggaggtaagattatattactgtccatgattcttttattttggttacctcaaataaatattcagtggttggtttaacttgtgtaatttgaaaccaacatttgttaaacatatgaaacaacagttgaacaatccaaaaacaacattagaaaaatcataacatcctaagtattagtcgttttaatgtttctacttcaaactacaagaaatgtcacttttacaagcacagttcgctaatgtgctgataaaagtaacttttaccagcgcattttgcaaactgtgttggcaaaaggtcaaagttttatcagcgcacatttgcagtggctaaaatnnaacttttaccagcgcatttatgcgttgagaaaagatatttttgccagcgcttttcattttgtgctggcaaaagttctaataccaatattgatttgtcaaccccttttaccaacacatcagaagtaaatttcattttaccagcaataccaaacttttgctaacacaaaaatgtactggcaaaagtgacattttgtagtgtcatctcgccagaattaatagttgttttccagctgttctggtgttgctgtgatggttctgtccgtgggtgtagaagatggagacctcgtttttttattattatgtttatagtataaaagaagaaaaaaaaaagccagagcagtaaaaatctaatttttgtcatgtgacagtataaatgtaaaccttcacccaaaatttaatatttttgtaaaaactccaatcaaatcctataataaaagtaaaaactaataaattaccataaaaatacacaaacttaaaaataccatatttatcaaacaaagttttaaaatcccatttatttaatataattttcactattatgatttggagtgactaaaaattaaaatgtactagatactaaactagcaaatgtaacagaataaaattctctgcttctctctatattattattttctaaagaaatgaagtggcaggaaagtactctcagtatcaactatatatgtaaataaatgaggctaatttctgattaattaacttgaacatatataactaggcaatatagtcgctcttcatacggctaatttaatttttttttagtattataacaaatagttacttaaaaatataattttaatatatagtaaaattatannnnnnnnnnnnnattttaaattattattaataatttatttattgaaaactaaatgcacaattttattaattattatttagaattacttagtaagatgtttaaaatttattatatctagtattttaaattactttgttaaaagaaattatttttataaaaataagtaaataaggtggtgtagaaaaaaattacggtgtttttcataatacattattttcatatctcgatcattcaaaattattgttactctataatatctcacttgttgtctcattgtatctcacttattttcatcaccgtatctcacccgttgtcatcactatatcacatctcttgtcattaccgtagttcacttgtagtcatcactattttattttccaaatctatatcttaatcttagatttcatctcaaattttaaataattttttaacatttttaagacattagagaaaattcattagtttgttctgttattattaattaatatgtttttaaaaattgattattattttttaaatatcttaattaaaaaaaaaagaaaaaaatacgaaaaatgtgatattttagttatgagaaatgctaaaaggcaaccaatcgtactctactttatatatatagatatagatttatatatatat

SEQ ID NO: 58012 - DNA, 1310 bp, Cannabis sativa
gaactgaatctagaggattttgactttatactgggaacagactggcttgcaaagtataatgcaactatagattgtaaaagaaagatggcaacttttgaactagagggtgaggacccatttgcgtttgtaagcaaggttcaaggatcccgaagaccattaatatcggcgcttaaggcaagagatttttcatgggagggatgtatcaatttcctagccagtgttgtggatactacgaaggaaacattaactggactggaacatgttccagtggtacgagaatttctaaatgtctttccagaggggttaccagggttaccactgaagcaggagattgattttgaaattgatctgataccaggggcaaagcatgtatctaagggttcgtatcgaatgtcacctacggagttgaaagtttagttacatggaatgttggatttaaaattcattagactgagtacctcatcttggggtgcatcagttttgtttatgaggaagaaggacaaaaccttatatatgtgtattgattaccgagaattaaataagttgacaataaagaacaagtatcctttgctaaggatagatgacctgtttaaccaattgcaaggaaagactgtcctttctaagatcgatcttcgatctagttatcaccagttgaggatttgggaggaggttattcccaagacatctttttgtacccagtatgaacattatgaatttctggtgaagtccttcggattaacaaatgtttcgatgacattcatggattattgaaccgagtgttcaaggactttttagatgactttgtaattgtcttcatcgatgatattttaattttctttgactcagagaaggcacacgagagacatctttggatggtgttacaacttctttgggagtataagatttatgctaaatacaagaaaggtgagttctagctgccccaagtaagctttttagggcatgtggtgaataaaaacgtatcttggtggattcagtaaagattgaagcgattcaggattggcctcgacctaagtctgcaaccgaggttagtagaagatttgttgaaggatttgttgagatttctacgcccttaacaaaattgactcgaaggaactataagtatgttgggacgaacaagtgcgagagtagcttccaggaattgaagcagaggttaattactgcactagggttaaccttaccggtcaataatgagaaatttttgatttattgtggcgcctcaaaagagaggttgggttatgttctaatgtagtttgggaaagttattccctatgcatctaggaaattgaagg

SEQ ID NO: 58013 - DNA, 2442 bp, Cannabis sativa
aaccctaagacagagtaagaacacatatgaaaaacactagaacctagatgaacaactaggttctcacaaaaataactctctcttcataaatgagaaaaatgaaaaaaattaaatctagaagagttgattcgaatggctgatctcaaggttctatttatagaatatagaaaccctaaagacatctacaaagtcgaatctacagctgtacaaaactttcctaaataaaatgctgatttatagcatgagaaacaaattctatcgcaacaaattagacaagaaaaggaaacttgccaaaaactagtctgatcttgtattgtgtcttgatagttgccataaatagtgtgtttgatataatcttatcaagacacaatcgaactttttaaggaaaataataataatcaaagtttcctttaaaaaccaactttgcataagagaatttcttctcttacaagaagtttccatacaaggaaagaccagctgaaaatctttctttcctaagatagaaaagaccaataaaaaccgaataataaaggtgagaaaatcggctatgaatgcaaagaaatctcaccataaaataaaaaatgttttcgcatctaaattgccaaaaatagtactttacacaaagaaatgaaactccgagaaaaaggaatgatctctaattaattgtgatcaggtgagaattcaagaaattggtatttctagttcagttatcggtgctcggtatgagcaatgttgcctctaccatataggttacatcaattttctttataatagtggttaaccgtaaatgtttaggaaatttaaaagttgtgttagttcaagggaaattgatacaagttaaaataagtaaagatgaacaagattgaagttgacaataaaatagaaattattcaagtttaagtgaataaaacttatgaggaattgtaagatgttagttaaggaagtgatgcaaattagatttaagtaacgaaatgaaagtacgaaatacaattaggaatgacaaagaagcatctactttctggtaacccaccatgagcttactttggacttaggcatacttaactttgagtaatcttaagatggcaaatctttcggggagtcatctcaaaaagcgtaccagtgaggacaaagtatgctacaaagattcatattaggatgcagaatcagtggttgttccagagattatcaaggggaaggaatgtgttaataagtaaagatttacaaggcatcgataggactacatagtagtcgatggaaataagaaatattctaattgaatatctatcaaaaaaacaaatatttagcttgttaaaaagttaaaccagtacaccagcttaggagatccaatacgaggaatagaaagacataatcatgaattatatactgtgggatcttatgattttgaccgagtagtaatagttggacatgccaatttaacatggtgtctatcagtgcaaatgatttatacaataaatgaggatatggagttcatacaaaggaatagtcgaatcttgtgaaattccaagactggtatctttggctatgatttaaagagttacagaaagttattaagaataagggagattaaagcgaaaacagtatgaggttttattcttgaaagatgggtaatatgagaggatcaatggaatattggaaacttgttctgggcatatttgataaaggttagattatcttggattaatctcttcttctaatagagtgtttgtttaaaggtgataattaagtgtaccattagttaggtactttaataagtgtggtacgagagaaatactagacacttgttaactagaataacacaggtgatataagaataaaatggacaaaaatattttgaggaacttataaaaccatagcgtgaatttgagttgtatactcgcgtcattaagtacacataaaaagctgggctaatttaaagagtaggactatcgagttcaaaacatgagattttgttttctctgagtcttgcctataaaagagaaatgtagagagggaagttaaagccttttttatattagactaaatgggccaagtagcctatcagctagccttgactactgcatcatacggagtatataatgtgtttcatatgtccatgccgagaaaatatgtatcagactcaacccatattctgagttgtgatgatgttaagctttagacaaatttattagattggaaaaacatcatgtccaggttttgaactagaaaaagaaagtaatatggaatgagataattcccttagttaaggaagtgttgtagagagacagcaagatgtaaaaagcaacttgagagatagaatcgtgaatatgggagtaatatccgaaattgttcaggtaaattttggagacaaaatttctataaggaggtgatgtttgtagtatcccaaaaacctaattatgaataattagattttattatatatta

SEQ ID NO: 58014 - DNA, 849 bp, Cannabis sativa
tgaatgagccctattgcaaataggcgggcaacctaaatcgcaaccaaaaatcgtatagtaatgcacataaaaaccactgcagaaaccactttacaaacccaaattaaaaattttaaaaaaaaagtatacgaggtaattcccttaaaattattaaaatgactatattgggaagataaataataaaaaaatatatattatatattaaaaaaatcccaaaattggtgctaattaaaattttctcctcaataaatgtatattgtaaattaaaaaaattattaaaaactataatgagaaggtatatagacaaatatttatatagttaaaatattacttttttatttgaaagagttaaaatattatctttggaaggcaatttgttatggtgagttggaaccttagaaaaataaatgtatattatattagcatatcgtcaaaattggtgctaattaaaatattatatacaagagaataaaatgtgtattattaataaactacttgttaaacaatatattaggaaggtacatagatatagttaaaatattatctttttttataatcaattaaaaaaactctcatattaccaattttattcctatacatattattatcttcaatattactgtaaacatagaaaaacactattgtttacaatagttattgtaagagatccaatattaaatgaagtaatgaagaatatggaacgtcacaaaaggtcgacatcagattctattgtagtacttggtgtttggaatggatattgtccaacctccattgaggatccatcttctcctttccgtgcaacgaaataaaaaagatatgaagatgatgaaactttaagtggttagtaac

SEQ ID NO: 58015 - DNA, 1805 bp, Cannabis sativa
ttttttttttttttttttacagagtgagaaatcggatatatagagagaaaatatattttttggacagatatggatgtttcgaagggtgtagaactcatatccgatcacctagccgaatttgggggtccgcttggccgtcgatctgcttggccgtctgccttctatctgcccagaccgagagaggaaaaaagagagagggggaggcagctgggaataaggatgatctagggtttcttgttttttaaattgtaaagggtattaattagaaaaataaaaaaaaagttataaagagtattaaatgtgatgctcgataaatggaatggaattttttttcttttttttttatttttataatttattttgataaaaataaatggtacagctagcatttatatatttatcaaaataaaaaaataaaattatatttatgatatagtgacacgctaaatgggtggggatatatttatccattcacgcctcgcgtgtcactatgtcaatattttttatattaataaaaatcaaaaaattttgggttttaatttttagtgacacttcatatttttagtgactcacattaaaagagactaacactgaatttttaaagtctaattgtgcatgtcactaaaaatctctcttgactctttagtgacatgcacttttctgcgtgtcactatatagtgtcacgaaaaaggcaaattgtagcagtgaaagaattggcacaaaagttcgttatggcaactcattggcatttcaaaggtgtgttgagatgtgtgctcttaaggatgtaaaatataatgggaatttttacacttgaaacaacaagcaacaagaacaaaatcgaatttattaaaaaaaattgattaaataatggctaatcaatagttgctgaattttttctttactgtcaaagtaacctttttgaatgagagtatatttcatcattgttcggctttgttaacaatttacccgaatctgtagcatgggaagaaactttttaaatatttcaagatatggagttcaacaaatggtttgacttgtttggcttacttataaattgctcatgtttcagttgtttgacttcttttatttatgttgtgttttttttaggtcttagtgctttactcgagggaaaataaaggttatgttttgggtaatttgatatactagttttatgtacattttataaagtatttcagaggtgtattgaaacttattatattcattttctgcagaattttgcttattttctacttgtttttcaggttttaatagaaaaaaattttcataatgtgaatttaaaatgagaatgaatatgttaattgagatgaatataatgaattatcaaggaatttggagttttggaatataattggtgaaaaattttatgttttggatacttattacgctctgtttgtgatcgaaaatcaagtctaaatctttaaacactcgtttgactatgatgcgttcactttgagaaaaaatattttgaataaaagttttagatctctcttttatctttccaaaacatcttgaatcgtcccattcctagcaaatttaatatagttgtagtagccaaaatattatcagtcaacacaacaagaagctcactacaaaaaatcgagcttcaagggtcgcgacagtacaagatagtgtcacgacccgcctctttttaaactacaaaaagtaggttttctctcatccttttttcatctatataaatgcctcttttcaacactttttagcaagcaattatggagtacaaaaattagagaaaacaagtgacctagaaggcttttcaatggagt

SEQ ID NO: 58016 - DNA, 876 bp, Cannabis sativa
accttttcttctatatttctaattcgtctaatgtaattgtctataattacaattataagctaaactcatatctaggattttcaatggagattgtttgatgaatgaaattttcatctttcttcttctattgattgtgtgaactaattttatttgtgcttatattgcatataattgattagccatcttttgaatgagaatcaatataaaatttgaaaattgaatattggttatgctataattgattagtcataagtttcaatacaaaacgataagatttgtgtggcttgtgtagtgtttgaattattgcttattactgattatatgattatatgtttgttatatgtcaaataggataatgtgatatagtttagattctttatctcttaatcagaatagagaataatttataatcagctatcactttaggtagaagaaaaaaattatttgcattagtgaagtaaaaagtagaagagattatcgaaattaatttttttgattaattttctaatcattgttatttgctatttttatgttattttattatattcaaacaatcaaattttgtttgttgaatagaactaaaaattcaattaattggtatttagctaaagtacttgtaaaacgatatgtatatttgcgtattcgattttcacaataagtgtgtataattctttttataaaattacatgtgatatcatatagaaaattggagattcaatccaacaccaatctcaaatccctgcacacaaaaacacaataaactagaagtgcagcacaaacactagaacaatacactcaacacaattcgaaccaaattataaatgtgtccaacaatggttggggagtctattcctctcttctgaaacaatggattca

SEQ ID NO: 58017 - DNA, 1820 bp, Cannabis sativa
aagtaaaattgaaaaataaaaaatgtaaaaaggtttaaataactgagaataaataaaaatataaaaaaaaaggtaaaaaaggacatcaagcgtaaaaatctcttttctattttaagtttgttacctttacatcttcggattcaatttaggacacctttaaactaaaataggtatgtcccaaaatgtatctagccaaagctctcttgaagacaattcttgttaaaggttaaattgaaataaatagtaaatggtcatgtgtctcattctccaaaccacatatcaagaattgagcctttatttgtatcccttgcccagtcatctgtcccatgtcttcaaccgattccaagtgaataacctgataatttgccttaattttggtatgctacacctcttccaaatgatagaggtataccacatttgctcagcattaattgtttggaaacatgactccataattctggctaatagaatatttacatagtagctctaactgtgtttttgatatgtagatagccatttgatctttcacttgaattattttatgccaatactagttgcaatcttagggagctttgtaaacccacccattctcctcttttaaatacatttcacatacccatttaacctacaagttatcatttttttagcaagatcccacacatttttacccaccacttctacattctaattctgctaatatttgaaacccaaaccaccatttttcttctcttgacaaacaattttcaagcaattaagcttggttttttcaaatcagttgtaccactccaaagataatctttacagatttattcaatttttttcaagattttcgtaggaagaatcattacctaggcccaatatgattggatttccaatattgttgagttaattaacgtagttctccttgcataagataaattcctagaactccaacaatgaaatctagcaatcatgttttctataaaaatatcacaatttgcacttgagagtctctttgggaaaattgggaagccaagatatttaaaaggaatcttgctttgagcgaatcctgatgtatccaagactttttacacatcttaattctccatttatgaacaatagatgattattttcgttgtgttaacctctaaaccagatgataataaaaacagtttgaagctttttaatagtaagaaaatagactgaatatcaccattgcaaaatagtaatagatcgtccacaaagcacaagtgagaaagctttaaacccaaacccctaaggtaaaatttaaattcatctttctttcacactttggctaggatttcggacaaatattccatggcaaccacaaataaagtggtgacatgggatctctttatctttgacctcgtctagaagagaaaaaaccatgtaaaaagacattgaatactaatgagaatttgagtataccataatcaaaggcaaagtcatccgggaagccaagagccgccataatttctttaatgaagtcccaataaattatgtcatatgccttcttcaaatctatcttgttcatacattatggcttataatttttcctcccatattggtgcaccaaatatttggcacaccataatgttatgagctatgaatctttcatgcacaaacccgctttgattttgtgaaataaagcttggtagaattactataaaatgagaacaaatcattttggtggatgttttatataaaacattgcaacatggattaggccaaaatttagcaactattcttggacatttaacttttggaacaagagtttgatggaaattattttaccaggatcttagatctactcgcaagta

SEQ ID NO: 58018 - DNA, 887 bp, Cannabis sativa
tgaggctccctaataatcttgaggggaggtcagtctaagacatatgacctttgtctcttaaaatcaaaagattgccaagcatcttcatatgtttcttatagtagaatgatgttggagttctatctgaaagtcaatgtttttgcataaaacaatttatttctccggtagctataattaaatcgttattgtaaagacttgcagtaacagattggtgatttgcgattgcagaatctagacttgcaataacataaataaagtatgcagaatgtaaaacttgacacaagagatttttacgtggtattagaattctttcgaatattactagtccacggggtcacgctcagtgaatgaaatcaattagtaaaatttcaaaaattacaaatacaattgactaaaacatatttagacttcctctaaagctttgcagcaatcttttgtatccaatttgctaatataatttctaaaccacaccaaacaatgaactccctttagcttttgatgcgtatgcgctcacttcctcccgaagtgagtctttgtcaagttttctgccaaagacctttctcttgttcaatgaaaactcttcaacctaatctaagaacagtaatagaacaatatcacaaaatcaaaacctagttgaacgctctaggtttttacactatatactcttctcacaaagatgaaatataaaataataagactagaaactctagacaccaccacaaatatgtttttacagctgttagaagcgttccttaaataaaagccaatcatccttgaaatctaccagatctgtcgtagtagaatcgcaagcggcagtggcagatcagacaagatcttcctttatttgcatatgttagagtattagctgtatattaggtgtaaaagaa

SEQ ID NO: 58019 - DNA, 791 bp, Cannabis sativa
ttgtttattcaatttcaaaaactttaatcgcattctcttagattaatgatatgtgatcttaaaaattaatttaaaaaattcagatatcatttttttgaaataacttgtcgcacaagttagtgaatcaaattttgtacttagaaattttaagtgtgaacttgtaaattactgtacaagattaagaaatataaataaaccttcacggggtcttatcttgagtttcttgagtcttgcattccactttgggtcacttttgagaattttgataaaattactattttgcctttggagtcaatttttctttaaaatgcttaattatctttaatttatgttgcaaaattaacaaatcattagtgacaaataatcatcaaataaggagacttaagagtttgggtcaacaatcttctcatttttaatgatatcaaatatttgattattttgaaaagaaaataaataaattaaaaaaaaaaaaagattagctccctcttaatgtgtgcaatggttaaaaaaatatatctttcaattttacctcatatgattttgtaaactcctcctcaatttattacttaaattatttaaaaagagttaatagccaaaaaattaaggttttcacaaaaaataataataataataataataataataatcaattatcttagaatttctccccctcttgatttatcaaaaatggtggcagaagaattcgcaaaataaatagcaaaaaaatagaaaggcataacataccatccattaaagaaaaaataacaaaaacatagacatccaagttcaaa

SEQ ID NO: 58020 - DNA, 1717 bp, Cannabis sativa
aaggaaaaaagagaagaaaaaaaaagcaagattgaaattgaggcacggcatgtattattttgatgctttctattgtggataatgtattgatcacacaaaccttgtgccttaatggccattcatagcaagggatgtattcttttctatttttttttttttaaaaaaaaggatacgaattaataatgtgttaattgtgaatgagaatcatcccatcccattaaaaaaaatcaaatagaaaggggtatcttttgttttgttttctaatctaattattccatttgtcatttctaaattttgtgtcacaaacaagttatctctgactcttgcatgtgaaagagaccagaataatattttagcatatgcctaaaaatgccctctttttgcttcactttctcattagaaaacggtattcattttttttttccagctacttccgattcaatctttaatattttaatactttattattaccggccatatatatttatatatccaaatttggacgttgtcacaccactcacttaacataaaattgtaggtagcttctaaatttagtaaaacaaacagtaagctcatccatcggtgtatatgtttcctaatcttatctgatgtgttgggtcaaaagcttacgtaattggcttcatattgccaagaagcaactctacaaggtaaaaaaaagacacttgagaaagtggcttgggttaacttccacgactcaccaaccacactaaataatattactatgataaatatcaaaagcaagaagagttcaaattgcaatcgattatttttataattttctcgtcaaagattttaatttaacaatatttttttaatacatacatttacatattaatttttcactctaaaataacctacacacttaagttttcttttctaaaaatcatgttaaaaaaaaagaaaaagaagagcgaactaagaattaactaactaaacggtaacaaatgaatcaatttacaagagcatcacgtactctcaaagaatttatgttgcatggtagtaaaaacattatatttaaattgatgcccacataaattttttaaaaattaaaatgtggtccccaatattttgtttaatttcaacgtggcaccattttcacgagacacacaccagtctttttttctcttcttctcaacggttccggactcttttgcaaaaagacaaaaaagctaatccatgagcgcgcttacctatacaaattacaaaccaagcacacacagtataatatatattgcgtttcaatttttatttttcttttcaaaaaaagcttacattttcgaaaaacttttcactcacgccctcactatataaatatttatcatcaatcgaatcctctggccccgggatctgattccttctttcacggccgacgatggaatcttctccagtgactaagtcggactcggagcatctgcgttcctcttcgtcacttggaatcggccgagatttagtcgatttcgatgaccgccaagataaaccgttacttgatcgtgttgtgagtgagcccgtagccacagggaattttaaccaccaaaggcgccgccgtgtcggtgcaaggcctgccgccttggatcggccgcgaaggcaacagtcgttaagccgtgatattggacacgctgctaaagagacgtatttgatcactggacttagcttcaagctccttcgatatctcgggtaaaatttgatacgaaaatgt

SEQ ID NO: 58021 - DNA, 1780 bp, Cannabis sativa
acatgttaagaacaaatacaacacaaaaggccatgaaaggtatccgttgttaactgtttttcaaatctttttgcaaaataaattatgcaatatttgtgctactctccaaatctatatattttaattcatataatatatacactacacaagttgggtaaggaggtaaatctctataccttcaccccaccaatagtacatggggtattacaaattataccattatcctaatctaaacctaaacccccatttcaatgtatgtgttgtcttgtgagaaagatacaagtttttaacttctttcttgactctgatgatgaggacaagatatgaccatatccattttctatgatttcggttagctggaaaagaatactctgttcactggtatatagtatgttttccttctcctctctagtctcttatttttattaataaaagcctatttctataagaaaaaactacataactcagaaagaaacaaatgttacatgattctttctatttctctgttacatgtcttggattggatggcatgtttgtattataaacattcgagtgtgtgtagttatggttgcgtggatttatatagattagtaatacggtgtacctttagcttcttcgcatccatcccagatgtaaccttgcagagaataaagttagaatggcttggaaatgggtttagaaaaggcacgtctttgagaaggttgtacagcctctcacgttcttttagcaaagcatctttcacattctggagaagataagcaagtactcattagttataacctccttatctcaaacaacccatatattattgtattcaacagatcacccacctctaaataggtaggattcttcaacgctgcacaagcagaaacttcagcggcaacagagacgttgtagggttgttttgctctccaaagatactcaataatgctcaatggaaaagcaccatatcctacacgtaatccagctaaacctgcaccatgagattgtcaaccatttgacaaagaataatgaaactgaaacaatagtgaactgaaaactgaaaagtcaaccatgcatcaaccacaatgttgacaaaaagaaagtatccatgaaatgtgaaaaaagaggtgaaaaaataataatgtcgatttgggggtggggggtttgaagctcatctcaactgaaaataaatgcaagagattgatgaatgaattatgttttcattccctacatccgttaactagcatgaagatataaaaaaaaaaaagtttgatagaggggcacataattagtgcataataaaaagtctatctaatagtaataaaacaatctacctgtaacttttatcatcaaaaaaagggacaagtcaattaaataacttcaagtttcctttctaaactgtaaattatcaaaagaatccattataaggaattatctaatatatccttctaaacatcgtgaatcaacaagtcctgcctcgggtatatcatttaacaaagtaagagaaatgtgaaccttttattgtaaagtaaacaagctcccaaccattgcacctactaaggtttggaattttgaaattaggccccctaatatttggggaccaagaaactatggaaattgttgtgtaggtacctcctagactctaacctaagaccttgtggtttgagctacccctcttggtaaataaggttcggagttggtattcaatataattaacaagtaaactgtaaatagagcaacaaggaaataattactagtacttggattatagattctatattaagatatacattaattg

SEQ ID NO: 58022 - DNA, 1168 bp, Cannabis sativa
  modified_base (1042)..(1068): a, c, t, g, unknown or other
ttggggtacaacttggtgcgggttaagacgtacagatttctctattgttagttcttggataaattgtccttcgtctattattatgtttaaacctattgttgacgagattcattctctttaagctgatgttggtgatggttcttgtcgtgccacttcgcgtgttgcgaatggtgtggcccatgcactagcaaaatctgttactagttcggcaggggttcagttgtggacagatgcttgtcctaattaaatttattaatactcctgtaacagctgattttatttaattgaatatatgctttccttcaaaaaaaaatctacgtttctatgtaacctcaaacttttatataacattatacatcaattattttattttttttctctatataatttagatattatatttttaaaactttatttatttaatttatttttacgtgtttattaataaaaataatgtgaaagaaagagaaaaaataacaaaaagatactaataataaatatttagctaagaggtatattttaactaaaagtgaagatgtactatgagttaaaataggaatatttactgcaaaacttctttaatatttgtaatttaagttacacatatgacgctaataataaaaatagcagcaaacgtacattatcttgcaattttgttacaatcgtactcttttttggctgttaagtgtcaattaagcccattaaatatcagctcagaaacacgtgacaacatatttctatagcttatttaatacttattccaataatatgtcagatgtgtttttgagttgacacttaacgaccaaaaaagattatgactataacaaaatcgtaaaataaaatacttttaccgctaaaatattaagatattataattcatttataaaaagagttattttggagaattttaaactataatttaactttatagctattatccatacatttggagtgctattagcatttctcatattatttctttccaagaaagaaaaaaaaaacagagaaattaagaaaagtttcaattattattattattatnnnnnnnnnnnnnnnnnnnnnnnnnnntattattattattattattgtctataaatacttgtcaatactcattttccaatccccaaaccaaaaaacgctttcgtttcttcacaaaaaaaaaaaaaaa

SEQ ID NO: 58023 - DNA, 1393 bp, Cannabis sativa
aataaatggcttaaaatggtcaaaaaacattcccccgcctatattcaaatcttgaacttaacaaaatgtaattctctataatgaaaggttttaagtttacccatgtgacttaaataactctctgttgcattatccatcgccaccaagctaaaattgcaagaataacatattttgcatttaacatacatattcacatataattattattaataataaaattagtatttataactccactaatccatttctaaatcatgcggtcattacaattattcccccattaaaaaaatttcgtcctcgaaatctaacttgaataactctggatattgagtcctcatgtcggactccaactcttaggtagcttcttccactttactattcttccatagcaccttaactaacgctatagttttgttttgaagaactttttcctttctattcaggatttgcactggctgttcttcataagacagattcggctgtaacttcagggcttcataactcagaatatgcattgggtttgatacatattttctaaacatcgaagcatgaaatacgttgtgcaccgctgataatgctggtggcaaggccaactgatatgccacatgaccgaccttctccagtatttcgaaaggccctatgaacctagggcttagcttgcctttctttccaaaacgtctaatacctttcattggtgaaactcgcaggaagacgtgatctcctgcttgaaatgtaatgtctttgcacttcgaatctacataactattctgcctgctttgcgaagcaagcattccagctttattcttgtctattgcctcatttgtcctctgacctaattcagggcctagatacttttgttctccagtttcgtctcaatgaattggagaacgacattttctaccatatagcatctcagaagccatccttatagtactctggtaactattgttgtaggagaactcaattagaggtaagtatttattccatgaacccttgaagtcaatgacacaagctcgtaataagtcctcaagcatctggatgattcgttcagactgtactcgtctgtttgaggatggaaggttgtactaaactttaggttggtacccatggctttttgcagactcaccaaaattttgatgtgaacttgggatccctatccaaaacaatagatttcaaaactccatggagacaaattatttcttttacatacaattccgcatattgatttacaacataggtcattttcacaggcaaaaaacttcgtgaaacggtcaactatgactcatattgaatcatacatacccgtggttttgggcaacccaaccacgaagtccatcgcaatatcttcccacttccattcaggaagtgctaatggttgaagtaaccccgccgg

SEQ ID NO: 58024 - DNA, 1206 bp, Cannabis sativa
  modified_base (62)..(63): a, c, t, g, unknown or other
atacagaaaatgtaacaagttttgtcataacatctttagatcagattattattaagttttannttgacaaaaaattagttcaagatcctatttgtacaattttgaaaacaaagtttgtcctagtacaaaatttgtcccatttgcactaagatgtttttgaaaactgaaaccctagttgggttgtcaacctgggcgctgggtgaaaccctaggcgcttgggttgacttccgaggtgctgtgttatgtacttttagcttctaaggcgtggacttggatgtttcatatatttatggtacaaaatactgaaagatgatgagttggaaacatcttagcgaaatttaaacacccattttggagttcttggagtcaatctgggcgcagggttagggaccccttctaggtcgactactatgactcggaactacttaactccgatatttcttgccacatatcaaacattgatgtccacgtcaccaaaaatttttttcggattaagatatgttatattaaacgtgactatatgacaaaaattatttttttcttaaaaaatattacaatttaaatttaaactcattacatataattctcttatcttttatcttatattaaatgtggctatataatataatttttttttttgtaacattgcaatttaaaaatatatttctaatattttataaaaattagaaaaattgtataatatttctaaaaaataaaaagtataataaaattaaaattattatgattaaactaaaattataattaacaataaatttttaatatatatattttaaaaatagtacttaaattaaatattttttaataagaaaatgatgttatttattgaataatataaaaaaattaattatacaattaaaaatatatataacaaaaataaaaattaaaactataattgaatcacatgtaatattaatctggtatataatatatgtatatgaaaaatttgtattataagaaatattgtcaaattttattatctagaaatgttgaaaaaactataaactaaaatgtacacgtatttgttaagcataatatatattatatatattcacctttttttaatgcaaataaaattagagaaaatcttcatgtccctacatacataatctttatatattaaaagtgcctatctaacggcaattcttggtttaacgattcttagtttaacgattctttttttattta

SEQ ID NO: 58025 - DNA, 1723 bp, Cannabis sativa
atttcaacaatccaagctgtgcttatggatgcagagacacaacaatgaagttcaacattggctccaaaggctcagtggtgctgttcatgatgcagacaacttaatggacgagatcaacactagagctttgcaacaacgaatcatgtctccaaatcaggtaggtatttcattcagaaaatcaagatttctaatttatttttacattgtttttgaggcaaatagtcaagcttgctatgatgatggtgttggattggtttttgacgtatggttttcctccacttttttcaaaattgacagtttatgtcaaaaaagattgacagttggatttagttttttgtattctctacaagatcctttatttgtattgaattttttattaaagatttttactagtttacttaccaattttcctgaggggtccctaattcaattcatgacttagtagggcatgcactctaatagtgaactagtttggatagattctctatctcttatggtttttcaatgaaatgtttgttcattgttcaaaaaaaataaacacacagtcagataacaatatagcgacctcagctccttacaacaattacatttcattgataaaatttagagttgttgagtctttttggaacacctgtgccgacaaactaggaggctctaaactttaatcaaccgatcaatactatctattatcatagtgtttttctcaaaaatacataagtttttttgtttatcaaaatactataaaccaactagacaccctctgaaattgaatgatgagtctagagaaaatacaatcaaactatgaacaatgactatgaacagcctgccaaactatgaaacaatgcttaggagccgaaagtttgcaacaccatgtttccaagttagagaataatatcgttcccacaccttcttagacaaatcttaatggggtgtttctgtcgtttgatttcattattatctacagaaaaagactattttttctggctccaatgcacttgcttatcgatttaagatgagtaataggataaaggacatcaagaagaaactagccaaaatctgtgatgatagaaagtttcatttggaagaaaaacatgaaaagacagattattcgaagagcaagagctgatacgcactcgtatgtgcgtcaagaagaagttattgggagggaggaagatatatcagctattataagtatgcttttatcggatcgttgtgaagagaatgtatcaatgatttccgtttgtggcataggaggattaggaaaaactacacttgcgagcgaatccagaatcattttgagttaacaatgtgggtatgtgcggctgataattttgacttaaaactaattttgaaaagtatcattaagtctgggggagacatcagaatggaagaactgcaaaagaagcttcgagaagtgcttggtggtaagcggtattttcttgtactagatgatgtatgggaggaaaatcgtgctaagtggttggaattggaagagttgataagaaatggtgcaaaaggaagtagagttttggtaacaactaggagtaaaaagattgctaatttcacatctagcaaaggtcaattgcataaattggggatacttaacaaagatcaatcttggattttgtttaaaagggtggcttttaaaaatggacaagagccaaaaaactctaatattgtgaagattggaaaggagattgttgaaaggtgcaaaggggttcca

SEQ ID NO: 58026 - DNA, 712 bp, Cannabis sativa
tcatgagatgaacatatatatatattagaaaattaaaataaaaacaaagtcatatattatggatcgactaccttaattatgtgtgctctaatttaagagtgtttataaaatatttgcttcaattcaatttgcacgatttaatttaatttaatttgtggagtgtgaatatttgcactcgtataaattgaattatattaaaaaaatttaaattcgcacttgtgcagattgaatgtttattaatgtgtaaaagtaacttatccaatctaatttacatatatatatatatacattttaaaaattatacttaatacattaaatttatattttattattattatataggaataatataatttaaaacacaattacatatttttttacatacatttttttttctttttttgaatttgttattttatttattttaatttgttgtcggaaacataaaagaataataatttattttgttttgttgttagttatgtaaaaaaaaaataataatattaaattacttaatattaaaaaataaccgattatttgacaggattggatttaaattattctacagattaatttagattcaaaatataaatttgtacttagtgtaaataaaatacactataaataaaataatacatattaaattagacgaacatccctaccctaattagctactatatatttacagtagggatatatatgatgatgggtc

SEQ ID NO: 58027 - DNA, 567 bp, Cannabis sativa
gtggattagtattgaaaatataaagtgatgaaaaaaaccccaaatgtaagctctcctctaactcgtttcagcctctctctctctctctctctttccctaaatcgcgtcaggccatctctccggccgtctgagtttctccggtgcaacctgcaacaactccaccatctgcacatctctctcggcttctaattctgaccggtatctctctctctctctctcttatttgttttcaactcttcatgtgtgatttagattgtccctttcaaaattggagtgggttcctttttgttgttggggttgaagtcgtaggttgatctgaattcaccttctttcctcattaatgccatttgataatttttaatagtatcaacatttgatttgactatattttagtataagcacttgttggaagattggaagataaaggctaattcatttcatttgtctattcatctctatatttgataattgattttgttcatctctttatctctgtgttttgattttgttctttgttatttctttctcattcttatctctcttccgctttcgcaccagaaaaatgga

SEQ ID NO: 58028 - DNA, 736 bp, Cannabis sativa
gtccgggaccggatggcatgactcaggctttttatcagaggtgttgggatacggtgaggcacgatgttgtggcgggtgtccgatcgttttttaacgatggtagtttggaggatagttttgatgaagcaaatgtggtactcattccaaaaaagaaaaaccctgaagctatgacggatcttaggcctattgcactttgtaatgttatgtataagataattacaaaggtcatggtcaaccgaatgaagccattcattgattctattgtgggtgaaaaccagagtgctttcatcccgggtcgcttaatttctgacaatgttctggtgtcttttgaagtattgcattatctaaaaaggaagcgtacaggaaaagaaggatacatggcccttaagcttgacatgagcaaagcttatgaccgtgtcgaatgggcttttttggaagcaatgctaaggagattaggcttcgcagagaaatgggttcaattgattctgaaatgtgtgacttcggctcaatacaagattatccatgggagccatgaaattggcccaatcactttttctagaggtattcggcaaggggaccctctttccccttacctttttatcctatgtgcagaagggctctcaacgttgttgagacaatatgaaagaagaggatggcttcatggttgtaaagtagctaatggcgcgccaaggatttctcacatgcttttcgttgacgatagctatttatactgcaa

SEQ ID NO: 58029 - DNA, 946 bp, Cannabis sativa
ttaaagaagtcttttattgtctttatcttaaatggttttaaacggactagctagtgtgacgtctcgggaaatcggggcgttacactagtacaaccaactaaaaaattcaatatacataagaagataaattaaaacaaattaatatacttcaaaaaaataaaaaaatacatacgaaagatgaatccttaaaatttgaatcagatttactcttttttttttcttgtgaataaccttcctaaatattttaattttaattagcagaagtttcttctcaaagtgagcacttgaatttttaacatctttcattgcatccttattggaggaatcagattccatctgaacaaaacacaaaaaataaactaaaaccattttcacctttcaacaacaatgaacattatgaaaaccaaacaaaaataagttgtcacacaataacaatgaagattatgaaaataaaatataaatgagaaacattgaagataactgaaactagtatcttcagttaaccaaatggaaaacacacacaacacaaaataaaatataaaaatacaaaaaaaaaaaaaaaaaacccttcaaatataatcaaaccatcatacaatgcacaacaatattctaaaaaaaaagaatataagtgtgaaaacaagtttcgaacctagaaacaaaataataaagagaaacttaaaatcaaaatatacaataacatcataaaatagagcaaccccattacaaaatccttaagacctatgaaactaatttgaaaacccttaagcctattaaaccagtttcaaaccagtgagtagtgtgaaccctgtaatattagttttgaacctgtgaactctgtgaaaatattaaatgaataagtgtacgagattgatgattttatgttttaattacaaacaatatattccaaaaataatattttttgtgccaatccaatgatgttattact

SEQ ID NO: 58030 - DNA, 1439 bp, Cannabis sativa
accctaataatctcccactttcccaaaaagcaaatttggcatctcccttaatttcatattagtaatatgaccatatagatttcactggtagcatctttgtgaattgatcttccaagttatgttctgatgcaatcttcaagactgtcacatgacctttctatactatatttcttagtagatggtacttgttttcaatatgctttcctctcttatggcttctcggttccttggagttagctactcctccattgttatcacggtagagtactggtggtttatctacttctaaaactacttcaagatcagtgtagagtttcttgaaccaaaatgcttcattaggtgcttcgcaagctactatatattcgacctccatggttgaatctgcaatacatgtttgcttattgcttctctagactatatatccacaacaaagagtgaatgctgacccagatatcgattttcgactatctttgtctaattgaaaattggaaccagcatatccagtaggatttaactctccacaaaaatatacatgcatgagatctctctttctcctaagatacttgagaatgttctttatagttatccaatgttccaaacctagattagattggtaacgactaaaaatccctacaacaaagtatatgtcaggccttgtacacaacattgcatacattaagatcccaactattgatgcataagggtactttcccatgtctccttttcttgagaagtcttcggacattgattcttgcatagagtaattccatgtgtggatggtaactgtgttggaagttatcctaccaagatctagatttactaacatgtatgttgattattaactataatctaacacgataaatatgactctcctaatatgatgaaataaataagttagaaaatcttacattgatggtagcggaataaaatgactccttccgtgcatatctctagccctagttcctttctatcgcagagcattatcaagatctgaacttgtatcttctctcatttagtttagttaaccacagtcttccaaaatatgattgagtacttgacttgatatgagtgggcatgatactctatcaccaaaggcttgaatttaatgaagaacaacaagaaggaattcgaaatcactgtagaatgaggatctcaatttcaagttttctgtcagagttagaaaactaggttgaaggttggataagaatgagaccattatgttccttttatagtatttcaactaggaattaggatttaattatatggattaaaaaaataaaaaaaaataggcaaataattgctttagtggccgaccacttaatgagcctcactagttatgatttttccactttatttaaatcatttatcttttctttttaataataccatattttccaatttcaatcctataaatgttaaaactatttatttaataatta

SEQ ID NO: 58031 - DNA, 1186 bp, Cannabis sativa
  modified_base (848)..(849): a, c, t, g, unknown or other
gagagagagagagagagggaagaacaatttcaatgggattcattatgtagtctcttgacacattcaagatgtaattacataaagcactatataatatcatgatctcgcaaggagtagcacatgccttagcctcaatgagtaccaatatcactatccacatgttagaacatttggtacacaaaaagataggatgccaaactttttccgttactcatcttaatgatcaatccttatattgcttgtcaaatttttccaagtaactatcattcattattgtcataatgttcaacatttttgtgaatcacaatttctacattaccaaacaaaacacatggtttgtcatctattctaacgaatctcaatccaaataattaaattctacggagatcgatcaatcaatcgttcttagcaacttaattaacaatggtgcgggttgtagctttttaaaccaaattacatatgcgatttttataatttttcaaaccgcaatcacacctcgagatcttaagaccgtaaaaatcacactgcgaaaatacagtgtggtgcgatatagtttgaacaatttacactatcgttattatcaaacattataagaaaagttgcggcaaaagtctccaaaaaggtcactttcatgcagattagtcaccagcctgtaaaatagcggcaatagcccttatggtcacactttttatttgtccgttagtcgtaattttaactgagccgtttttttttttttttttacattaccacgtgtcaaaatattattggtccaaattattattttaatttaaaaaaaataaataaataaataaattatttaaaaatgattttttttctttttctttttnntttcttttttttttatttttctttcttttcttcttcgtcttcttgttctcacttgtcagcaagatttttaaagctaggtactaccgtaatggtaccttcttaaatgttgagttggggagcaatccaagtttcgtgtggcgaagtatttatgaaactcaagagattgttcgaaaaggggcgagatgcagagttggtgatggttctcgaattaatatagtgtttgatccgtggttgtcgaatgaagataatccaagagtaacttcgaataatcctgctcttattgatcaaaatgttaaagcacttatggaaactgatacgttggcttgggatgttgact

SEQ ID NO: 58032 - DNA, 588 bp, Cannabis sativa
acactcttggcaactacttagacggcttgctgaaaataataatggtccatggctttgcgggggcgactttaatgaaattagagcgattcatgagaagcttggtggtggtggcaaacccagttatctcatgaagaactttaataatgcaattgatagatgtgcactacgggaactagaatacaatggcaacaagtttacttggtgcaatggaagggcaaccaacatggttttcgaaagattagaccgagtcatggtaaacaacacctggtggcagatttatgcaatagctaaagtcaaacaccttagcagatggtgttcggatcatagtccattactagtaacctttaacaccatgccatgtgatgcgaagactcaacaacggtggggacacagatttcattatgaaaaggcttgggcggataagaaagaatgtcaccaaattgtgcaagacgcttggactgaggttattcatataggctcggcagcagaccttaatgacagaataaacatttgtggtactttattggatcaatggaatacaagccaaaggaaaaccaaccaagccaaaataaaagagctgaaaaaaga

SEQ ID NO: 58033 - DNA, 2557 bp, Cannabis sativa
aatacttctccatgtgaaaaagtgggccccacaccacgatcaacttctctcccactctataaataccctccaaatttcactctaccatattattattttcatttttctctaaattccaataaaaaaatcaaatattacaccaattcattattattaacaatggcttctcttcatcaatttctcctcttctctctaatcattcccttcttccatttccttcaaggtaatgatattagagcaattcgagtcacgtagcactattttagatgtttatataatttgatttgatgacccttttgtttgttttaaacaggtgttaattcagctacattcacaatcacaaacgaatgcagttacacaatttggccgggaattttatccggtgccggaacttcaccactttccaccaccggattttctctccaaccgggagaatcaaactctctccaagtaccaatttcttggtcaggtcgattatggggtcgaaccctttgctccacagacccaacaacatccaaattctcctgcgtcacaggcgattgtggctcctccaccgtcgaatgcagcggtgccggagctattcctccggcgactctagctgaatttacacttaacggcgctggaggattggatttctacgatgttagccttgttgacggttataacctccccatgaaggttgctccggtggtcggtgaaggtaccggcgggaactgtactacgacgggttgtttggtggatttgaatccagggtgtccggcggaattgaaggtttcgtcggcgagtgtggagagcgtggcgtgtaaaagcgcgtgtgaggcttttggggacccacagttttgttgtagtggggcctacgctactcctgacacgtgtaaacctagctcttattctctattctttaaaaatgcgtgtccaaaagcttatagctacgcttatgatgatggaaccagcaccttcacatgtgccaacgccaattacgtaattaccttttgcccttcgccaactacaaggtaaactttaactgaataggggtattttcgtaaattcatatctttgctatagggaattatagtggggagttctattagcttagaataatttataatttttatgttattatgtaaaatgtaatacttattttaatttattttttataaattttttaaaatatgtataatttttttcagtaaaattttagtattttttttattttaatttttttattataatatttaaaatataatttatttttatttgattggtatatatttttttttttttttgaaggaattggtatatattttttaatacaattaaaaatatatattttttaaaataaaaattattcaaatagaatgtatttataaatttttaaaatataaataattgacataattttatctaacaaatttatacatatgttaaattagtttacatttattttcaaaattctttattaatttttttatgtcttcttttccatttttgtatatagtttttcaaatgtatcttctattttttttatatttacacaatatatttttttttttccgattttgataattttttaaaataatgcttctacacaaattctcaatgttacatttttagtttccagaaattattacaaagtaatattttgatgtgaaagaatgatacaagtgaatacataacactcaaaattatttattttctttaaaaaaaaaacaacattgtgaacaaaaagaaagaaagataacttgttagaatttttttgtttgtttaataaaatgatgatttttttctcaattaatttaaataatactaaaatatgaattcatatttatgcattgacctatgagatgatgtggttgtcacgtttgtttgttttttcttttaatttattttttaaaatttgaaaaaataaatttatttacgtaaaatatataaatggcggtgggtgcagtgtaaagtcttctaacgggaagtatcccgaggcagccgaagtatcggccagttctcgcaaaacgacaccgtatctcattggatttggcgttttaggggcaagttggggatttcggcaactattcatttaaccggcgggttcattgagtgggcccggcccaatgttgtgatctgaaactggatcaagatatggacaatgaattggggcccactttatttttactattggttacaacttgttactacaacggcccaattgtcagtgattattcattctggctattttgtcttatctttcaagttgtatgagtggaaattaaatagtagaaaataggaaaagttaattttttatttttttaaattagaaattactgtaaaaaaacaaaagagtactctctatttcgaatctgaatattaatatagtttagttggatcttgaattcttgcatatattttttctaatattgattttgacataatggtattgttatgttaattataaagtttaatggtaaattaatatatttatttatgtatataaaaaggtaatagatgtgatttattttgtttatggagacaaatgcatactaacacaagaaaaagctactat

SEQ ID NO: 58034 - DNA, 596 bp, Cannabis sativa
ttacctcaaactcaatccaagaacaagcttaagatttaacaagaacaaagctccaaaacaagccaagaatcaagcttttcttcccaaaaatcaatttaaataagaagagggtttgagagagggagaggggtcgggtgagagggtaaacaaccagaatttcatttgcttttcctaaaaaaatcaattttgtcaaagtaaatcaaataaggtcaaaagaccattttgcccctagggccatataacatgcataaacacgctcaagggcaaaattgtcattccatgcataactaatttcaaataaaaaaaattcagatttctcaataccaaataaaatgccaatatttaatccaatttgcatttcgggcccaaacccagttcggcccgaaatactcgattgtgactataccgcgccaacctgtctgaacacacctgaaaagacaacagaggcatactatataataatatagttctattaagcacataattaaattaatttcattaatttacccttctcgggctataattactaaaatgcccctggctcaccaacagggttttaccatataacaaaaactcccaatagcttctctactcta

SEQ ID NO: 58035 - DNA, 1022 bp, Cannabis sativa
  modified_base (285)..(287): a, c, t, g, unknown or other
tgatgaataaaagaggcatttttcaacttaccccttcatttttctggttcatgatggtactggccaaaatttgaaaataggcggatttgatgttgattgacatgtaataaatgatccaaaattatatatacatttaacatttttttctagatgtattttttttttgaatttattatttgttatttagtttattttcattttttgttggagatataaaacaacaataatttgtttcatttgttgttagttatgtgaaaaaataatattttttaataaatattaaannntttaatattaaaaagtaactaattcaaaattaccgaatatcaaacagatcaccgaaccagaggaagcatctcgggtctcctacatcaatagaaaaagccatacaagtacaactgctcaagcatttatccctacattcctctaaattcatactctcattcactcaagaatattgagcaatgccaggaaattttgagtgagaaaagtcaaggaacacatcattctctttgtcatcacagctcagaggactttttctcacacacccttctgaccagttttcattatgctttggcttaaacccttttaaacattggcatattgtaccaacacattctgaattagctccacaaatttcatagtagtcacaatgatcattgatttatttttcacactgtatatgtagtaaacttctgcagcatataagtgtctgtacacaaatttgacaagctcaatcccataagtaaaatctccatgacaggggtcaaattgaggccatttgagacctctcctcaagtcccaactcatctctcaaaaccaagttaccattatccaacagctgaactagtggttcccgagcttgtttcgacgagtttgtagaccaaacaagcactctcttattgtaatcattctgtcctgaaaacaacacaagatttcctgtgttgtctatagtcaaagatcgagataaatcggtgataggttcacaacggtttcccacccaaacaacagtttgaactgag

SEQ ID NO: 58036 - DNA, 1238 bp, Cannabis sativa
atataacaaaaaaaaagtcgttctcaggaccacattgatgagagttgtgacaagttgtcatgtctctcaagaaaaaacaagcgctaaaatttcttaagtgacataatcaaagttggagattgcaacgaaagctatggattatttattaatttttttttttttgagaaattgatattttaatgaaaagcagctatcagaaagaaatattctgttcataagcatgagtcaccatgaggaaaaagagtgcacaaacaatgtcatatgcaaagaaaatctgggtagtttgaccaagtaaataaaagcttactgcaagtaggacaaacccatctcgctcattgaaagtaaacgctcacacttgagtgtggtgagtaagaattttcatttgagtttagttttcttcactgggtacattttctcaccaaccaaacaaaaaatatggcaaagaaaaaatgaaaaagagagaagaaattcacataaactttcgtgaaaaaggaaggaaatataaagacaaaacaaaacaaaaaggtagaaatcctatatctggatcataaacaactttgtgtgaaaaatcttgttttgtcatattctaacaaaattgtcagatctaaaatgcatgaaccacattacacaaacaactaacaaatctttctcacaataataaaaacaataagaataatttcaatcccaaaaagacatgttatgaaaaagaacacaagacatagttaaaaatattaaaagaaaaatccatggccagaaatattaaaataaaataaaattcttgttattccgacagcacattctttttaattttttaaacaaacaattaaataaaaatagaaagcaaagacataaaaataaaaacttcttgattcaaaacaaaacaagacataaaaacaagagagaatataaatatcaaaattaagatctcaaaagaaaaaggttaaaacgaaagatttacctgatttgcgaaacctataccgaaaccaagcaagatacgaccaacgatcaacatccaaactttttgggcgaagccattgagaatggctccggcaaagaagagcagaccgccgaaaagcatagacagtttccgaccgaattttctggtgacggtggaggccaccagtgaggatatcagggcagccagatacagagaagaagtgaacatggtcagagtttgactatcgtactggcaatactgattggtggactcttctgcctttttcttacggtacaccgac

SEQ ID NO: 58037 - DNA, 828 bp, Cannabis sativa
aacattactcaaaactcttgatcaatgcagataaagaaaatttcatagtcaaagtcaagctcgtaggtgtcttggtcaataatattcaaagtcaaagtcaacatcaaattaccttttacattttcttttagagaaaatacattatcattaagtttgaaaaatggttaacgttaattttcaaaaaaaaaaaaaaagtttgaaaaatggttaagtagtctacaccaatttgtgtaaatgctttgatataacaaatgtgagtcattgaaatataccaatttgatttgagtctaaactctaaagtaacttgtataacatgtaatctttgaagaggccttataaaaaattatgtggagcacttgatatacaagaaattattccatttcaatgttgatacaattatatgttatttatcatcaaacaaaatagtaccatattatatatattaaaaaagaatttaaattttgataaacaactacactctcaaagcgcagtttgttttctaatttaaataatctaaagtaatagagtgtatataatcttaaactattaagcacttaaaaattattattgtaaacattaagtcagtgtgtatttcgttaaaatataaagtatggaatgaatatattgccgaaaaaagatgaataaagttacactggagaatcaattgtatgattaagcaatataactatattctgttcggtgtgaaataattcagcctagaaatctctctaatttagggatgtaaatgggttgggtcggccccggtccgctaccgacccgaccctacccattatcttttcacctgactcgaccaattaagctttttga

SEQ ID NO: 58038 - DNA, 1204 bp, Cannabis sativa
ttattattgtcaatttttatgtgtgttcatgctctattaatcttgtgttagaatcataagaattctcctaaattcccaacaacaattggtgcagaatttgaaattaataataatatagatgatggcggaaatgataaagatatagataaatttaatgatgtcttaatgacttcgatcatagatccactaagagtgcgcacaataaccaacaatgaggacaaactaaaaaaaatctaaagttatggatagtatttctacaaatattggtttattgggagaatttgtatttaaaattgtcttgaaactttaaaggttggtcgatacattatctgataagaaagtaactgacaacttatatgcagaattaagatcaatggtctttctgtaatgcagtgtattcaagccactaatatattattgaaaaaccttcattcatgcaagtgtttcaatatctgatgagataaaaatacaatacattatgaaaatgatgcataattatataattgttagacgtttgtttttgttttaatatattagaacattgttattttaagattttatttagaatttaatttgcctatttgaataatatgtttataatttttttcttctgtaaaaaatatttacatatttagctatatgcaacgtttcaaagtggcatatcattattgtgaaataaaaatcagtcataaattttttttatgaattttgcaataaataaattaaaagtaatcaatctatgaaggataatttggtcaaattaaaagattacttttcttaattatataaataaaatgattagaattcttttttcaataaatttattaaataacatataattctgtcactgaaatattgaaagaatctatcggttggagagaaagaataagtataattttaattgttttgctaatgtacaaagtaacaagcattatatataatttgatcagttgatcccctttcaaagaggaccaaaatataccacataaaaactctactgagacaaagatgggtcgtcaagaacgtagaggatgtaggatgggcagttgtggatcgtacatagatagtaatatggatcaaagccagctagaggatatggcattgatacgatttcaagaattatgaggttctatcttaaaatttattatgatgagtggagtagtccatattcacatatatcgctcaatattttttatatgtaatg

SEQ ID NO: 58039 - DNA, 701 bp, Cannabis sativa
tgtaaataaatgggtaatttgtgatataaatttttaagtttaatttctggttacaaactactttgttttttttaatagaatcatgacatcttttgttagttatttgttttgtaatattattacaacttgtaactttatggctcataatgtgataaaataaattttacttacaatctacttggtcgattatctatctcgtctatttttaagatcatcttttgtaatgatcgtgagatctaattctttctatctaataaacgttttctttttaaaaaaaaaataaaactcttagttgcaaataaatacctaagtttaatttttatttaaaaaaaattaatttaaatataccaattaaaaattaacatgaaactcagttgtaaatcgtgctactcgatggacgccacctcctcttgaatcatttgctctaacaacggatgcttcgatagttctgggaaggggctttgtcggattggggagagtaatacgggatgtagaggggtggtttggttggcgtggtgatcaggtgtggtaggtgatttctctgctaatgtggcggagctgcttgctgttcgtatgggtttgactcttgcgcatcaatttggttttaatatatccctcattaatagtgattctactgtggcgattggttggattacgaagcttcatattaattttagtattcagtctattttagtagatat

SEQ ID NO: 58040 - DNA, 3317 bp, Cannabis sativa
atattctcccaagataggtttgttagagagatatatggttaggtttatttgttaacgggatttttttaaaaaataaataaaaaaaattattaatataggtttgttagagagaatattcttttctgttaaaccaaaaaatgccttagatagacacttttaatatataaagatatgaaaaatctcttaaataaaataaaaaatttgaaacacacttttgtagttatagaacacaattcccgcccccatagcaaaaagattgtagtactaagttgaatttgaaggtttgaataatttcagcccaatatctgatgataacatggcatatgatcaaggtcctgcaatctgcattgtaacttcctcatacgtggaaaaaatttaagaggcaaagaagaaacaaaaaaggaaagttacgatcaatacaagtaggaaaagtaattcagtacataaaagtattctcgttattatgatatctgttaaagaattccaagcaatgtttacaaaaactttgatactaataaacagttgaaccaattaaccaagtcattcttgatctaaacacactgattctgagtcccctacatctacatcaccagctgcactactttcttctcttgttatagtaaaggatgaggcagaagagccaacagtttctggcaaagataaagcctttctcttgcttctgccacgcctccattttctcagcatttctgaaacatcttctccttcatcaccactcatctgtggatgatccatagctggttcacctgccaatgttcctctttcaccaaggtcgcccgagattgcagccgaaaatgggaagaagactgatttacaacaagaaaacatagcaatcaaaataataatgtaagtgtacagagatgaccacacatagaatgtccatttccaacttcgaacgaattctttcgtccatggaagctttgatttcatcacaatttcagattcatacaactgtgggagaaaatgggttccagctcttggactcattattactcttatagctcctgttcttggatatccctccttgtattttagtatttcaatggttagtttctgtgtttcaccagctattccaagtactagtggtatgctcataataaaagttcttgctaatcggactggtaggcttctgaaacgtaacatacaaggcagacttgattttcccattacgtgaccatcggtggataaaacctctccactcaactgaaaaaataatacatatttagcctcttttataaagagtaaattaaagatgctgtattttgcaaaatttaaatgtatttcttaaaaaaaactgctaaaaaccactagtagtgcttatcgctatctatccaaaatctcacattgcgtcgaattatctggctcgcaaaatttaatttcaaaataattatgaatcatagctggtcatttacaaggtgcccattgtgctaaacatcaggtgtcataatggtataaaataataaatacaggctgttacagaattagcgtaaagggggttattttgtactattttcatatgaaaattaaactttattttgtaccgaacagatccaaaacttttttgattttgtctccgtatcttctacaatgcccctatcaaaggaatgcactcatgcaccttaagaaacttttagtccaatttaatttataactattcaagatatcggtgttccaatctaaaataagatagtcacacttttttaagtgttacattttttccaatttcttaaaattttggccttcacagtacacaaacaaattcacaaatagtttcggtacacaaatacaccaatatttgagatttttcttttgaataatattttagatattttacgatgtaataaccaagttcaaagaactaaattcataagaaaaaaattaaaaataaaaagtaaaaagaaaaactcatcattcttcggttgataaaaacatcaaaattcttaataaatggtacacaaacaaattgagaaatagggacacaaaacaaaactgtggatacctgaaatacaccaacctccctattgaaaccagattcaggcatcagaagtacaacagagacggagaatgtatgacccattggaacgcccataactggtttcttcttctcacccatttcaaacccttgccaattcccgaacgagaacattgctcttgggtgaggttcggtaaaatcaaaatgcaacctttctttcaaaatcacaggctcttccacccaaaatcggaccaacccaacacccaaaacgacagcaaaaatcataacaagaagcagaaccatgcagacgtaggcggccccgacaatcccaaaccccaatcgcttcagcaatgcgatggtcccatgggtgaggacagttggggctttctgaaccgccgtctcgatagagacagttgtcttctctgcgcggcggtacgagtcggagacaagggacataaggaaaatcacaggtgagaagagaaacgacaatgagttgtggatcaactcggcttggagaagcactagctttgtgaaccagtctggttcgggaatgggtttgtaatagaagtacttcttatcttgttcttccattatggtggttgtggttatggcggctatggtgggtcggtggtgaatgacgtgaccatggtttttatcagaagagagagaagcagaggtctcaagctccaggtgggcattgtgcatggaagagaaggggaagaacaagacgtggtacgagaacagagtgaatagatgacaagtgttaccgaaagagataagtgtctcacgattgtcgtttactttgctaggaaaacaacgaaatcttagtggggtaataaataaattaaggaatatttacgggaaaatcgctattttatgttttcaacacttaatgaacctattatcttttactttttacacttttctctaaaaaatttagccaagtatcaccgtgaactattgacatatatacggagagttttagataaaaatgttaagaacaaaacgataagccttcaaaattttaattcatgtatgaaaaaataattgtcaaccaagctatagctcaattgttcatgtcgtggaaagcttagtggcgtttatgagttcccttgatttgttcgaaaataatgcaactgctaatttttttgtgtctttaattttgtattagtgaggggagattattatttttttttaataaaagcgaatttagattaaaactaaaaagactatttttaaaaatatggaaaaaattattaaggttatgataaatatggcataaaaagtaaatgtcactaaatatgacattatctaaccaatcaaacta

SEQ ID NO: 58041 - DNA, 910 bp, Cannabis sativa
gtaaaatatttccaacaggatcccatgtttaaacttttacaatctttatcaaaatacttttacaaacttgtcgcacaatgactaaaaaatagagcctaagtcgtcctgagattgaacactttaggtcgcgccgtctcaacttgtacactcatcccccgatctcgaaactcactcctgttcagcctttgcctttcttttacctacacatagaaataatatctgtgagtcgacagagtcagtaagaaatgcacaaagcatataatataatactgactttcatctaggcgcccatacacctattcacaaggcttatcagataagtaagaacgttctttagtaaggtacagccactataccacatgcactacgtaccgcgactgtacgagtgttggtagggtttgccccgtacctcgagtacccctaagtgttataccacatacacttcgtacctatccatactatagtatttgtaacaccgtactgcattctttaaacattgtacattatgctagtgcactcatactgctaccgtacaagtgttggtagtgtatgaatcacagatagcatgcatataacacacatacacataatcacatatataacatgttctatgctttcgtacctcgtttccgaattcaagtgagtgggccgacttgaatgaaaaatctcatgctagatggataccctaagtcacatttacgtaaacgagtaaataacacaccaaaacctaatttgggaacttaaactcacaactaagggttttgttatcaataattattataacaatatcctaattattgaggaaataactaactaaggctctaaaaataatacgaattaacaaatcacacttttcgggaatcctgcctgtgatccaattaaccggttctacaatacctgtagaaccgat

SEQ ID NO: 58042 - DNA, 1603 bp, Cannabis sativa
taaaaaataaaatatataaaaattttcatattttttaaataataatattaagtgtactaatataaacgtgtaacgtgtataagagtatatacatgaacagtctatgttagaagttaactggaaagtgaataataccttaaatttacaaacagttaatagtttaaaggtttttacggtcagtatttgagcaagttaattaattacaatgatagtttattaatagtaaaaaaacactttattatgttaaaatattgaaactctatattaaattacaatatataacataccactttttatggattatggtgctttacacatgtccctaagcatttctcattattcacatatactcaattaaaagttctgctatatcaaacacacgtcaaatctttttacgagtctaaatataaattccatcatttttttttaattccatgcatgcatcgatactcatacttctcatatgcacactgcatatgctaattaaccaaattcacacatccactagtttagctaataaatctctaatttaacgtaccattaatttttttaataaattttattaaaactatttctctgcagctgcactattatttattttttaaatcacgaaatataacaaactaatcctaattaatatctgttgtatatttagttcacatatataccttatttttttaaaaaaaattctgttattataaattaaaattcatataataaaaggcatatcttctaaataaatacaattactatctaattgtaaagcttgcttaaccaattaatccataagctggttagttagcatcccgtctaatatgaaatatacaagcattaagaggataaataaagtgaaacatcgaatatatattgtgatgttcttccatttaacgcattgacaagcatcaaacaatcacatagtctagttgaagatgcaattgctcagcccaacgaagaccgaacattgcttttgcctccatttcccgcgacttaaaatttcctagtgctggttttgacattatagctaaaacacgtccattcgaatcacgaataattacaccaatatcaatttttactccttgaagaattcatttttaatttgttctccggttgccacgaagtagaatctgctggtctggtttgagtgctacacttactggtttgacagcaatgttaaaatgctaaaaattctccagatacgcaatagcttgtgacaaaagtactggttttttttattgttttccatgaatgaagttgttcctatttattgattaactttttattttttgtgttttggttgcacagtacttttaactttccaatagacaaataatttacttaatctagtatctttaattaattaatttctctccctttatttatttattatactttaatatattaagattaatacacataatctaaataatacatatacactgaaaataattatcattttaaaatttttaaaatatatatttctttaaattttgatagtattaattaacataactcattagagttttgaaatatttttccatatgtatttttttttttaaaaaaaaaatcattgtgtgtagtttttttagaaatatattaatttgga

SEQ ID NO: 58043 - DNA, 1620 bp, Cannabis sativa
  modified_base (437)..(445): a, c, t, g, unknown or other
atatatgtttttgattatttgaatttattttgattagttttgatctaatttagtattttttgtttgatctatagtttttttcctttttttttttttaaagaaaatggatatattccattaagtctaaaaggtttcaagatacaaagaggagctcaaaatagatgaaacaactaaatccaaaaagaacagcggtcactcgacacgagactcatctaaaactaacaccctctttgcaagagagtgagcatggtattcaaagacctattacaatgagaaaaaagataaactataatggtcattgtcaatattgacttggttgtttttatttatatttataaaattttcatccataatggtaattatttttttttacatttaggtaatggtcaatttttgaatagttttgttgaatgatttattattattattattgttannnnnnnnnttattattattattattacattaagtaaggtgcagtaatgacatcgactttaaatataaatatgtaacacattacaaaagatgactaacaagataaaagtaatgtctaaatgaataagagagattatttaactttttttttaatcatgtgtattttgactcttcgcttattaatttgacatattaattaatagttttagtttatcattttgtacatataggtcgaattaacccgtttgtccacccaattactttttatattattcaaagaaaaattatataaaattagtacgttaaaatttgatacaattttattacttagttattataaaataaaagatataatttatttcatatatataatttaaaaaaattcaaatacccgccgcaaagcgcgatttgtttactagtatatatgataattaataacaatgctacacaagtcaactttatatgcaactcaagatgtatattttttttatcggtatgagtgtatatatgttacactatcactttttcaatcaattttattttgaggagtgctaaggagactctctatcccactctcttttgcactctctctttgatgtaatgacaaatgtcaaattttgagtaaagtttgtttttatttaatatttagttatgatattctaatgttattacaattatgccattctaactaaattattttataatgactagttatttattataatttaattactttattaattttttatttttacttaattacaagtaaaaagttatatatttggaagaaaaaaataaccacaattaaaaaattaaaaaagtacaatacatatatttaaattatacatagattaattgtaagtttttttaaagtaaaacctataataagtttaatgtatacaaaagttaatactattaaaaaaatcaatgacttaaaattattattattaattttttgtacaattttttttttattttattagttctttttattatacaatactagttttttttttcggattcaacactctatttttaagttgttttttatttttcttatacaagtgaaaattcacaccacttgtaatatagtatttttcaaatatttttttaattattttctttatttaatatagcatgatgttcaataaattaatatattattgttcaaaaaaattaatatac

SEQ ID NO: 58044 - DNA, 909 bp, Cannabis sativa
ctatgactctctttgaatgttacattaatgctgagaacaatataaggcaaatcaagaactagtgagttcttatgaaagactaaaaaagatatgacttagtgtctaggtggcatgtatgagatgtgagacttaagagagggagagagaggtgcacatgtatgcatgaggttttagaaagcctttgtagcatatggaatgactaagaatgacttagcctagtgctctttatataggagagagcttacagaagatctaagctaaagtaggttgatctcccttaaaatgagaagatattacctatttgttacatattaaatatataagaaaataacctattaattattcctaaaaaataagtaaatatgaagttgaacttttattttcgtgggttgttgaagccaactcgtagctgagagtgtctgtctaggttgaaagctgcagagacaccaaaagtgtctgccagaagagaagctggctggccgaccactttggcgccctaccactttggctgcctcctagaacgatgactgaccctacaaactaacacgagtatttttaacatgctttatcctcacttgcattgcatgcttcttgggaaaacctctcagaaagtcacctatctcgtaatcactccaggtcaagcatgcttgacttttaaatttgttagttttccatttttttcctaaatctgaactgacaatttgttgttgtagtggtcaagctcattcctacaacactaatagatgcgtgccgtatgtctagtgagtgattctttcttcatattagtcttccagggtgacactatattttatacttatgatactattttgctccaaccatatttgtgcattgcatcctgattcgctttaattgaaaaacaattgcaggcctctttaatttgcaaacttt

SEQ ID NO: 58045 - DNA, 1037 bp, Cannabis sativa
tacgtgtgagtagatctaagatcctggtaaaataatatccaacacataacacatatgaatgtaataatttgtagcaggagatcgagttcttaataagaaaaaataacctgcacttacaaaagtatgtcaaggccgactaagaacaaagggttgcccaagaagatagtaaccaaaaccaactaatgcatccaccagtggacaagcatcttcaagttatcatttggggctctcatctcgctggagacttgagcaaagatagagaaaagtatgcatgagccttgcaatatgaacaaaacaatgcagtccttgctgtggaagatagaaagcccaaattatcacgtgttagagaaccaatcataacattcaccaaagttgattctagctacgtcatttttctgcacaacccctttggttgttgaggtgcagattgcaatgtggcatggactatggtggacaactaagcttcctcaaatattctattcaagaccacatatcaaaaaatggggctccaacttaaagatttggttccttgcactcacctagtctacgggttctccgactagagtgtagcaccacttggacaaattcgcctaccacttacagtgggacaagtctcgacaagcataccagtaatggcacaattcttagtgattgatgtcccttcagcttttaacgtcatgttatgcagattagccctatatgacttaaaagttatcacatcagtatttcacatgtgcgttaagttcccaactaaaagtggattgggctttctatagggaaatcaaaggattacacgggaatactacaaccttgctctatctaaggtcaaaaaggaaattacttccggccatagttcagagaaagggaaaagcattgcccaataggaattcacccaaagtggggacgaagacatggatccccaacttggggaaataaatgcaaatattgagccaatagaagaattagaagaagtggagattgatctagccattctaaccaggaagctcaaaattggtaaaggtttgttgcttgaaata

SEQ ID NO: 58046 - DNA, 983 bp, Cannabis sativa
tggactgatcgatttgaaactcagcctaaaattatctcaaaaaaataagtttaatatttgacaagaaaaaatgctcttagaaaaagtagaaacaaattgatcaacaataccaaaaatagataaattgaaactaccacttattttatgaattattttcatttttttaaaaaaaattacaattttaaaaaggctaattaagttttttatcctgaattttgatatattatgctccctgaacttttaaagtcgtttaaaatactctttgatttttgtctaattttagtaaaaaagtttaatatggatgaaagtttaagggacatgatttagtacatgttacagctggagggacatgatttggtagatattaaagtctggggagcattgtttagtacataaataattactgaaatagtaattgaatgaaattagacaaaaaaatttacattcaacaatctcaataattcagaggtatttttaacaactttaaaaattcaaggaacatgattcggtatatgtcaaaattcaggaacaaaaatcttaattaactttttaaaaacaagctacttttaaaatttatttaaatagtttataattataatttatttcgtataatcttttattttgaatttttagttttataaaattaaagttcaataataatagtttctctggataaaaaaacataatttttatttgctttagcttggaatttagaccttgtattattaacaataataaaaataaggtaatttttgacaattttttttaatataactaaaatgaagataatttttaacacgaacagatgtataaaatataattagttttattataacacctctaaattgaattattattaaattttattttaaaatacacggtttaaaatagtatttaccattttaattttggcaaattaaaaactttttcttttaaaataaaagttataaaaataggatgtgttttcgaaatgcttatggaaa

SEQ ID NO: 58047 - DNA, 1783 bp, Cannabis sativa
ttttgttttttgttttttttttgggggaaaggcttcatccgaagtgattagtgtgttattgttctgttcataatgttttttattttttgtttttggtttggttgtatgtttagtgttttgttatttagttttacttttttaaattttttttaagcatcagattgtttttgttgtccttttttacttttttgttttggttgtgattaatgttcattttctttttggtaataatgtttctggtttttttatttggtagaaactggttttttattttattttgtttgttgttttctgtagtttcggttttagggtttttttttgtgtgttttgtgtttgtttaattttgggaggcaatgttaaacattaaagagcttggtgccgcattgtgattattttttttttgtttcaatcaagtgtcatttgtaaacattattcttggaaatcctcttttgcccaaatttatggttgtcattctttaggttgttttagaaatttgtttttatgtttgttattttgcccaaattaggtgtcatttttgtttttgttgttttggaaattgatttttatgtttattttcatgattgataatttttttgggtctaatttttattttgtactattcttctttatcagatggaaagtgcatcagattctgaagttccctctgtaactggaaaggttaaaccttctaaaaggctaaagttcaatcaagaaaatttgcacggtaagctaaagtatgttttaagagttttatgaaaccgatttttaatctttagtgtttttttttttaattttctttgttaattctcctgaaactagtttttatatgttttcttagtatgcttctgttgaagaagaaatcactgttaaagttcaaacgagaaaatctcctcggaaagctaaagtatgttttaagtttatattgaatctggtttttgaggttttatttatttttcccttataatttttttttgatgaaaccggttttttcatgtttttataaggttactactgttgaagaagaaatttccattaaaataccaactaggaaatctccacagaaagctaatgtatgttttaaatttttattgaaactggattttgagctttatttatttttggttgtgttcattattgtttcttaattgtatttagttttaatttttcaaaattttctaccaacaaatatgtttcttatgttttatatgttagtttgtgatttagagtatgttttatgaaaccggttttttgtgttatgtattttattttattgtgattgtttgtgatttattaatttgttctattttatttttatatatttatttcaggatgataaaaaaaaattaaagttgatgatccaaattttgttactgagaaacatcatagtaagaaggtgagcaagaaggcttctaatgtccatcaagcagatgatgatgatgatgatgagtttcagactgagaaggttgtctcagaagttgttcaaccaaaaaaaggaagactgttagtgatgatgccagtgtgtcaaagagggctaaaactaaggctcctgttaaggattctaatttggtatgtcttgttgtttttttatattttttggttgatatgtgtcttgtcttgtttgattaaattttgttctttttgtacaaattttaaactctatgtttgttttcatagttttttttttttttttgaatttgccttttaatgaattgtgttttttattgttaggaaaaaatgtgtgaatcaaaacttgctgatgatgagaaactagttaatgtcatta

SEQ ID NO: 58048 - DNA, 2075 bp, Cannabis sativa
ctaactttaaagacccaaaacataggctaattataacctagcaattgtacattttgtaacctgcagtaatcatatatttattattgataaaggtagcatgatcaattcagtttttgagctcattcttgagttcaactaacttcctccaataccagctgctttggagaggggctttgtatccccaccattcttcatttttgatgtagacactatgggcccatttgacccacaggttgtctttttttgttgcaattgaccagatgttcttaattaaagcagctttgttccaatcggctatactcaagaagtcgatccctcctgctgactttggcttacagatcttagcccaagcaatgtttcctagcccaaccatttgacttgcacctttccatatgtaacttctacatataccctctatttcctgaactacatttgttggaagaagcagtatttggcttcagtaagtatgtatggtcataagaacagaactaatcaacacacttctccctgcgaaggacaaattccgagaactccatgttttaattcttccagtcatcttttcaacaaggatcttgcactctactgctgaaattttcttggaacatataggaattccaagatacttgaaaggaacctcttgcttagtgaaacccaagacattaactactctttggatctctttctcctccatgccactacaatagattgtcgatttgctattattaggaagcaaaccagaagtttgaaaaaacagcttcaaaccctgtagcatgagatgaatactactgaagtcacccttacaaaataataacacgtcatctgcaaaaatcaaatgtgttagcttcatggatctgcatctttcatgacatccaaattcctttttctttcccacaactcccattattctgctcaaatactccattccaagtacaaaaagaagcggggacatgggatctccctgccttagccccctcttggcttcgaaaaaaccatgaagagagccattgaaaagaagagagaacctcggggtagacacacattgcaagatcaattgtataaacttcttaggaaactacatagaaattagcatctcctctagaaatccccgctcaagagtgtcatatgctttttgaaggtctaatttaatcatacagttgggccttgaatgtttccttccataatgccttggcaaatcttggcatatcattatattatgggcaatatatctaccttgaatgaaacctccttggttctgagcaaccaaatctggcaatatattcttgagtctgctacatattaacttggtaataattttatacaagacattacaacaagctacggggcgaaattcactcactttgttagggaatttgatcttcggtatgagagtgagcactgttgagttcacttctttcaatatctgccccgattttaagactgataggattgcttcagatacatcatggccaaccaaatcccaattatcctgaaaaaaggagctgctaaatccatccaaacacggggctttaatcccttggatactaaaaactgcttgttttacctcctcttttgaaaaatttccttcaagataaatggcctgctgactagaaacaaccggacccaactccaccaacttctttttgacctccttcccatcttgcattcgggttcccagcagctgcttataaaattcagtaaaggcttcagtaaatctcagccggttcttcaactctttcccctctcatgttttcaatcgagaggatattatttctggtccttttttctctgatgtacgcatggaacattgtagaattactgtctccatctttcaaccatgacaatttagccttttgctacaagaaagagcagtaattgctatgtatttcaacatattgagttctcgccattgcttcctgtcgctgtagctcttcattgaggggattattgtgaagcaaagattgacactcagccagccttgcagcagcttggatatcagcttgttgtaaatcagaaaaaccacctttgttcagctctctaaacaccggtttcaatgccttgagctttgacacaacttg

SEQ ID NO: 58049 - DNA, 529 bp, Cannabis sativa
tagctattttacattagctagtgtaagtgatccaattggttttttcctgctataggtagtattggattcttctttcactatttcactaatagaagaaggccattgttaaattaaaaaccttctgttcatggctctcttgactgttggtcctttctttcatgcttcctaaaatatttgttcggaaaacaaacagattattctcgcatgaggacattctcgaacaacgtcttacatcaactcatttaatttatttttttaaaatatatcattaaaattttattttttatattacctcacacatttatattacactatttatcaattttcttatattttttctgtataatttaaaaaatatttattataatatatattttattcattttttaaaataaataaaagaacattaatatcacacacaaatattataaaaagattttaaaaaattaatataatatgtatttatagttcaattatgtagctaattactattcatgactaatatatatctgataaagcaatatttttt

SEQ ID NO: 58050 - DNA, 1049 bp, Cannabis sativa
atatacctggctagtaagttggtcagccatgaaaaaatcaaccatcaaaacctgcatacatacagagagaagacaaagtagtaattcaaatcattagttattggtcaatacagagtattgtgaattatgattgaatgaatgaatgtaccttgtaaaatggagagcaaattatgttacgaatcactcgaatgaagcagtagcgagttgggcggtagaagatgtcaaatgggctaaccaggaatactatgaaaacctgcagaaagaataataaattattagaatgatgatgatgattatgttataaaaataatttggattttgaactaggatgacgaaccataaggaggagtcctggaatggcatcaacttgggatggagaaaatccactggctctcaagatgagatgaagaaccatagctgccacaactgcagtcatgaaggttgtgcatatgaggaaagcatccctgtacttgagagctgtagttggagagaattcgaatatgaagttgtaattgattcttgtcttcttccacatgaacaggttacatccatacataaacaggtgcaaactcagcaatgcaaacacactgcacagttcacatcattattaattacttaatttcagtttcttattaattaatttattactaataataattaatagtaataaaaagaagaggggtatgtatataaatagacctgaaaacagggtagacagtttccatataaacagttcctttggtaggggagaaaatgcctgatatatgtgccagaattgcgtacacactaaatagtgatacaaaacaacctgttaacaaccctgcaatgcatccacacgtacaccaaaacaaaataaaagttaatgttatatcccatgtaataaaggctcactactgttttaatttaaagtggggcaagacaacactaattgagatgtatagtattattattattattattagtggccagcaagtttgtagcattaataagttaatggagcatttaaataagtacctaaagcttagtcacatgactaatcattcatttat

SEQ ID NO: 58051 - DNA, 1190 bp, Cannabis sativa
tgaggtgcagagtaaagaatgcaccctcatgactcatttctttacatcccctctcaaactgaggggtgatttaaccactccaagtttgcttgtaagaaattggaatcgagatgttgacagacccttagtgaagcaatcggccacctgatcatgtgagggtatgtacctcacctccaattgtttattcagtaccttgtctctgatgaaatgaacatctacctcaatgtgtttcgtccttgcgtgaaacaccggattggatgccagagcatttgctccttgattatcgcaccatgctacagcagtagacaaaggaaattcaagttccttcaacaaggattcaatccacgaaatttcagctgcaacatgcgctaacgctctatactccgattcggtacttgaccttgacacaacagcctgtttctttgaggaccatgacacaagagtgttgccaaaatacacacaataaccagctacggatcttctgtcgtcggggcagcaagcccaatccgcatctgagtatcccgttagtctcaattgcgaatcacagcctatgtgcaaaccatgcttcatggttccttttagatatcgaagtactcgcttggctccattccagtgagctgtagttggggctttaaggaattggctaagcttgtttacagcgtacgagatgtctggtcgagtatggcttaaatattgtaggccaccaatgatactcctataggcagtgggatcatttagagactctccatcactcaaagacattggttttcctgctgtggctggagtgggacaggtctttagattagtgaaattagttctccttaggagttcctcaatatatctggtttgtgtcagatagatacctgtctcatcacgatagacttctattcccaaaaagaagtgtagtggaccgaggtccttcaatgtgaatctcttgttgagttcatctataaattgcttcatgtgtttgctgtcattgcctgtcacaatgatatcgtcaacgtatattagaaccaagatgatgattgtatctgttttgtagaaaaagagtgatgtatcagcctttgagtttctaaatttccagcttgagagtgtgcttttgagtttctcgaaccatgctcgaggtgcttgtcgaagcccatataaggatttgttcagtttacacacatagtcttcttttcctttttcaa

SEQ ID NO: 58052 - DNA, 4636 bp, Cannabis sativa
taattccctttttagaatattcctgttcttttcccttttttttattgtgtgattaatttattggctttaagaaatttcaagtaagagttgtaagatattatttatttaaatgatagtgttagattaatgtttagtttttatattctttcttacaaatagattgctttcttaaatattttacctataatttttttaattttatattatattaataatttgataaaaatattatagaaaatatcctatgtattatttttttttaaatttatgatataggttgctcaggtagtttctatgtgagttgctatacgaatttcgattgcaatttaagttactcaattagttgctatataaatttttgtgtacaattttgtaaacatctagaaaaaaaaaagcaattttcaagtataaaaaagaaaaaatcccaaaatattttttttgagataaaaggaaattaggggaataacctcaaaataattaaaattacagtctttagttccgtagttccctagataaaaggaaattaggggaaattatgcagtagtgtgtgacacagtgacggcctgaggggtgggtggcccctcatgaggccatattaaccctttaaactcccacttaatccaaacttcggacagaaaataggagggcatttacggtaaactacacaatcttattccggcgccactgttatgaatctttctctccaccattttcttactcagagcttagctcaccatccatggactctgccatcgctctccgccaaccatcctcaatctcttcttccaaactcttccaaaccacgaaattccttaattcccaattgcttaaatttcaaacctcgccgttttccttcgagcgtctgaagccaaaaccacgttgtttacccataaacgtttctaggcggagttctctgctcagaattcgactccgccacggctcgactgatgaggatggtaggtccccgcttaaccactcggtcaaggcttcttcaaacgacgctcatttcagtgcgtttacggagaagaaggagcttcaggcaccgagtttcgctgagttcatcacctcggaaagggttaaagttgcggcgatgcttgctttggccttagccctttgtaacgctgaccgggttgtgatgtcagtggcgattgtacctttgtcgctttcccatggctggaccaaatcatttgctggtattgttcaggtgggcttggctactaaactttcgtatatgttaaattttcacttaattggatattgagtttgttatatgtaataatttggaaaggaaaaagaaattacatagagaatgaagtaacatggttagttggaggttaaaggtctaacctctgcctccgagttatgggctaaaattaagtaaagttagcattttccttaatgggtttctagaaaatatagttttagcaaatgttgaaattacttggaactcatgtgaaaaactcatgaacagtcatctttcctatggggatacctggtatctccaatagctggagggactcttgtggattattacggtggaaggatagtcatggcttggggagtggctttatggtctctggctacctttcttacaccttgggctgctgaaacttccttatgggctctccttgctatgagagctatggttggtgtggcagaaggagtagctcttccttgcatgaacaacatggtagcaaggtattggtggtttatggttataatggaaacgtgagattgaacctgaaaggctggttgtttatactttacaagtaccgaaagctaaactgttgttttcttttaggtggtttcctccaactgaaagggcgagggctgttggaattgcaatggctggatttcagtttggaagtgctattggacttacactgtctccaatcctcatgtcaaagagtggtatctttggaccgtttgtgatttttgggttatctgggtttctttgggtgttggtatggttgtctgctacatcaagtactcctgaccaaaataatcagatatcgaagtatgaattagattacataatgaataagaggcaaacatcatttcttgtggacaataaaactaaagcaactaaagtgatacctccattcaggcgcttactttctaaaatgccaacatggtccctaatcgttgcaaattccatgcacagctgggtatgtcacactcttctacaactagtttctccataagcaacgcgtttctaactgcttactctgtgctgaaacttctctcttacagggtggaattattatttgaatgcaaaacactactgaagtgtttttgtttactttcatggttgtgttagacctttatatagattcttgatattttctatttacgaaaactcattgttcttctcaaatattgcagggtttcttcgttattctttcctggatgcctgtttactttaactttgtgagaattaatacttatccttattttgtgacatttgctagtggtatctagaagaattttgaaactcaagcaagctacttcatactacaggtgtttcatgttgacctcagacatgcagcttggtttagtgctgttccatggagtgtgatggcagtcatgggatatcttgctggtttgtggtcagacatgttgatccgtggtggtacatctatcactttaacacggaagatcatgcaggtacggagttcttattcattaacaactatgttttgtgcaaggaccaccatttatagttttattcgtgagctgtttcgtttctttggtttttgacaagacaattagtgttcactatactgccctacacccttaaaaaaagacttagttatctagaaatctgaagatatttatcttccaaagagagaaaatcatattaaattgtttggacaatataggttgaatttcggttcttctatccaaaaggccaaaaatagaaaccccaagggatatttttcttctttttcctttggtgcatcagtaaacaactaaggtaaaacttgaggactagcacactaccgtatcgtttttagtcatcagaacattaatctcatcatgcatagaatattcaaaacatccaattgctttctctgcagtcaattggtttttttggtccgggagttgcacttgtgggattgactacagcaaaaagtccagtgattgcatctgcatggcttacattagctgttggattgaaatcttttagtcattcaggatttcttgtgaatctccaggtttgacccaattaccttaaatttgactgtttgtattagttcttctttgtctgaccaattttttttatttgtttctgttttcaggagatcgctccacaatattctggtgttttgcatggtagtattcatgacagcatattaacaagattgtgtaaaaaaaaattgttttctttttgtttttataaccttgtaattacatttgaacagcataggttttgcattaacgtttctatgcaataactatgctggatagcagtaaatgcaagtatacataacagcaacaaatctttttcttgattttaataccaaacttgatgacaaaactaaagtttttaactagcaacaaccttttcttttccccttaggactgtcaaatactgccggaacatttgccgcaatcgtgggaacagttggagctggtttctttgtagaattagtgggttcttttcaaggatttttgttgcttacatcactcatgtattttgtcgctgccattttctacaacttgttttctactggagagagggtaaattttgatgaacctggtaagtgtctttttatgtttatcttgtaattgctggttcattttctgtaaattgaactgctacttggctgttcggaactatcatcatgatatctaaagcatgaagtagtattattaccaacactaaacccatagtttcagttttctggacctatgctgtttagaattatgagtgtacctgctcagaatttgaattcattttattgtacctatctagtattcacccttgtgtttccctaatggacagcattcaaatcttttgcttgacagtgatataaaagaaatatgtagacaactactggtcacctacctgaagatgatgtattagtggaccagaactgatgtataactacataatgcttgaagaagggactctcgtccatatcatttcattcaatgcattcttctccttcctaatgccccaagccttattatgcatatcagtgattgcatgtcaattatagttggaaattttgcctagaaaattttgttaatatgataaataatgtgttgtaaagactagtgaggtatgtatatgaaggattctgttcaaatctttttggttgcttgctttgtgttaaataatggccaagaatagaatcgataatatcaaaattaaccattaattaagttaatactagattaaagaattttgaagatcttttttaagtgtcactccgtcatggctattatgatttttcaaagttctcgatgaacagagcgtgaaaagaggaccgtgtgagaggagagagcttgaatcgggaaggaaaagtgtagaatgatacaagagaatcatctctgaatgaatattgaagattcgagatagaaagctgtttttttttttttggctaattagtaatttttcccctgaact

SEQ ID NO: 58053 - DNA, 510 bp, Cannabis sativa
aaaaataaagtttccactactgagaataattaatagtggatggtttaaatgtgaagaagtgcagagaaaactatgacctcctactagtatatgttataatcagcaagcttttccttctgaaagcaagttttcattataacatatattaattaagtttgtgatgttacattcaaaagaggtctaaattttcaatttgtagatgcacactttcattctttactggatgcatatattactctttttacatgataccaaaggattatagatataactctttttgaagatcaaagagctcacagttctcaatcactattattgtattcgagcacaaaatgtctctttttcaatttgtttctcaacacctgatttacaatgcagacgctaaaacttgatgagcagcaatttcttggagaggcaacttgtgcactgtctcaggtattacataattctgttagagttcatattttcttttccttaactgcaaaagaaccttcaggatggtctatcaaa

SEQ ID NO: 58054 - DNA, 1065 bp, Cannabis sativa
gttttgggcaaatttcaaatacgaacacgttcccacattctgttttgtctgtggcgttatcggacactcagaacgtttgtgtgagaaggcgattgatatcccttttgaacagcttgtcaagccatacgggatatggatgaaagcaactccgcaaaggaaagcacatatgattggttcgcaatggcttcggtctgggaagtcaaatagtaagacttcggaggatactggtgggcaatttttcgatggtgatggagagggtggaagccgaaatccaatgagtcaaacctccattaatgagggagcaaatcaagccaaagagaggggaggagatcgttgcaaagatattgcctatgggggatttgatactggcaagattggtggaggagttaatggggaggatatcaacgagaatcatgggatatatgtggaaagattggaggatagtcaatgctatgtggaggggaatgaaatgttggctttaactgatccaaaacgcagaagagtttttattggggataatgcttcaaaggggcccattactgaaatgatagttgatggccatatggtgactagtgggccgagtatgaatattgtaggtgatgtggttactaaggaaaatattgataatgtcatcccaaaaaacttaagtggggcgggttctggtgtccaggcccgccgagaattatgaccatattaagttggaattgccgggggcttgggaaccaacggaatttacagttccttaaggatttggtaatccaatagagacccaaaaatgtctttttatgtgaaactctttgtggcaaagaagtggtggatcgggccaagtttaatttgggctttgatagtgcttttagtgttgaagcccaaggccatagtggaggaatagcttttttgtggaaaaatgaagaggaggtgcaacttattgatttttccaacaaacatatcaatgttaaagtatgcatagaggggcagccgatttggagactagtgggaatgtatggtgaaccaaatagaagtttaagacacaacaaatggaggcttatcagaaaccaagctcaagac

SEQ ID NO: 58055 - DNA, 940 bp, Cannabis sativa
ggggaagaaaatttgatagtagtgattgggacattaagtagtaaggcacctcagaaatattaaatgattaaaagaaattaaacaaaaataaaaataaataaatgataattattaatatttggatgagctatatttgcatattgagagaaatgagaagtagaacaagtacccagataactaaataaagtactgaaggaggatggtaacaatttttatcttgcgtatagtaatggaatgaaatgatagtattattaggaattttgctattgttttatattttggaatgaaaattattttgtttgataagatgtgatcctactcttcagttttaatttttcaaacaaaagtaaaaggatgagttgctaagtttatttcacttattaactatttaatggaaaagggtttccatttcttaaaagataatgaaattttgattgagttcaatcggacagtacatataaggggaaagtgctcaaagagcaaatccaaccaacataggttatctaagttgcttggctgggatgatttgaattgaatgaaaagaaattaatttttattttcttttttggtttagttaaaatttaaaattttagaatgctatattagtaaattagaataaattgacttaccattttagttgaatgacaatggagatagagtgataatggaaggataaattatttcaatacaagatatttattaattgatttaccgttatatctttctaagtcaatatcactcgttgatcttaggtctataaattttaatcttaagtttaactcagctgtattatttatgttctttaagttatttgtggaagccaaccaattgttctgacatatatttacatattgggaatatggtagttcaattgagcgggagtgctaatcatatatatggaatctatagcttctatgatttagaagtaaaacgatgattt

SEQ ID NO: 58056 - DNA, 1041 bp, Cannabis sativa
aaacataagcttgataacttgtaaaaggaggtaaatggtgttaacaatttgttataagccaatgttaaggcaccccatgcttgagttctaaaatcattaatgctagctttaaaatctgaatttgacatgtccagattctaatacacatctagtctcaagcgtaaaattaactcatcccatgcttatgttccatcttttgacttgggttctttaagtgaatgctgctcagctatgtgaccgattcaaggcttgaagtgcaaatataggccatggcttaagctgactagtcacataaagactccagcaatgttatccccacctcaaattgtaatgctatttttttctgtttttaccagagttggttttcccaatctactcttccaagagctctaccttaagaagctccataaaagacaatattcttggttttatctccttcatttgttacatcaaaaaagactgaagatagatttggcaattcaaacaaacaagcaaaaccgaattcacattacttctaatttaatttaattaaagcatagctttagcacaatcctgtaacatgtaaaaagggtctttaaaaataacatgtaaactcaataacaaatggtcaaaaacccaaaaacgatgtctccataataacctaaagaggtgtcatccttgagaaacagctaccttacttctcagaggagttgggtcccctcttctttccaaatccaaccactgcaacaaatacaaaaaatgcccatagggataactcaattaaaattcaaaggtcaccaaaatcaacaatttatataaatttgatttgtttaggaagaaaaaaagaaattattatgaaataaaaacttaccagcggtgacaaaacggcggttgtattgcatgcgcttgtgagcacgacctctgggcttcttcttcttgtcctgcttggcaactttaggggtttgccctctcaccttaccagcacgagccaaagatccgtgaaccttacctgaaaatcagagagaggactcagtaatcagtgaacaaatataattttggtta

SEQ ID NO: 58057 - DNA, 2064 bp, Cannabis sativa
ttcttcctcgattaaacaacaaacgtatatgtaaaaaaaatttatcttttttattgctgtaattttcttttatttttggagcaaaaaaaactcagacacttttaataatttttttattttatcctttaaaatatattacataaattttaatttttttatattacaacacccttttataatcatattataccatacaccaaagtttttataatacattattaaaattctatattctatatggagtgattctacatttctcctaataaagaagatgaggtcttaagtttaaaattttctccctaatataaaaaaaaaatagtattttatataaaaataatttgtggcataaatacataaatttaacgttcagttataaataaatattaaatttaatttttggcggtagtaatacttaaattatagttttagaatttttgtaagtacctgactattagtgttaagtaaattgtcacataacaattcttgattggtccaagtcggttaaatttttatttttttttaaaataattaatttaaatataccaataaaataataacacgtagataatgatttaatatttaacgattagttactacacagttacaaaaatataacttacatattattatcgtaaaaaattaaacttgtatttatttacaagttaaacttaagtatttataccgcaaattaattcttatacacatatagagcataaataatatattttgaaaaaataaaactaacctatttttagtatattttttaaaattttaaaagttatctattttgaaaaaattattatgaatgttattaactcttgccatttaaatttgaagcggcgaaattaataaaacaaatgttttaattaataaataaatagctttaaaaaaaattaataacaaaagccacgacttaggtggcgcccttgcgatgacgtggcaatcactggttggaaaggtagtgtaagatgtcgcttagaacgtaagctgacttgggggtatttcggtaatttcattgggcataatgctcatacaatacctcacctggtagtattttttccgatataaaagcgctcaagttgacaattctttcttctcattccatttccatttattacgcgttggtctgaagcttgctttgttccttctctttctctctcttcgctttctctcactagatccctctgcgaaatctctacagagaaggtaaaatgctttgaatctcagatctctacgtcttcttctttttcagattgatcttaatttcgttcgattttgctcattactagttcaagaattggtttacaagttattcttcatttttcgctttgtttagattttcttgtgcgttgtgtagttctggaatcgattgcattttgtatgtataagtttggagtttctcttataatttagtggatttgttaatataaaaaggtctgaatgaatgtgtatttatgctatctgtattgtacgtttgaattctgcggtggatcgttaggtaaaatggtttagtttcttggatctgttgagattatacgatctgttgttggagttgatgtaaattgaaattgaattgattataatggatattttgatgtataattttgtggccgagatgttttgatgttgatttatagctttttggttatagatttgtcgttaccttcggatctattagatctaacgaagcatctggttgaatttcacgtcacaagaaaatagttattttgtttggcagcgtttgatttaggagtgtatcgtgtttgctaatgtaatgttgacatgtgtagggatcaacagccaaaacaaatggggctgacattcaccaagcttttcagccggctttttgccaagaaagagatgcgaattctgatggttggtctcgatgcagctggtaagacaaccatcctctacaagctcaagctcggggagatcgtcaccactattcctacaattggtgagttcttccattcgtattattgactcaattcaagtgctcgtccgttttgctctctcttgtttgttcaaagagtgagattttcagttttgctattctgtgatcta

SEQ ID NO: 58058 - DNA, 819 bp, Cannabis sativa
taaatcaaatgaaatataattgtacgtggtaccactaatttttttttagcatttttctcaagggcattgtcattatgttttctatgggtgtatattggtggatttgatcgagttgtattattatactcgaaattcgactatttatcaaaaattgacatgtgttttataaaaggaatatgaatgatcccaaaaggatattataattaaattgtattattaaatgtgatttaaaataactcgttccatataattaaagttgatagaaatattcaaactcgttgactacataagcatatgcgagataagaataataactattaacagatataattgatgagactatatgtctgcctcgggataaacaaagtatataataagaatgtgcaagacgagacattaaggatcgtgtagctcattgacccacacaattatacatagagaagattacattcatccatctcgctcttaacgctacctcgcagataactttataatatgaagaacaatgcaagaagaagaacaactatacttagcattttttccctcaaaaagatgggtcacaaagataactcatattcagcgagaaacaatcttcttaattagcataaccgtttaaaagataaagacaaagagcagttgggtaattattaaatattatctcacctacatatagatgaaacgtgagaaatatccacgcttcatgagcagttgtaagtgaatagatcccaataaaaataacagtcaatctatacacctataaatagaggaagaattcatggaaaaaggaaatagaaaaattgagagaaaatactatcattt

SEQ ID NO: 58059 - DNA, 1220 bp, Cannabis sativa
tgtgttcgtgtccaggttcctgtcctagttgaggtctggggcaggtttcatgtctggctctggatctgacttcagattcccgggtccaggtcacgtcgtggttcaggttcaattctaaaatttacatcatggtctgggtcacggggcctaggtgccccatccaagtccggttcctaggtcctagtctggttccaatttcgggttagtcttggttatagtcctggtcgcggtccgtgttcaggtccaggtctcgatccctatctttgtgtgggtttaggtttgggtccttttaagggtctagatcctggtctggattgcgagtgtcaggatccgatgagggcttaggaccgggtcaggtccaggtcccgttcccggtcctcgtccatgttcaagtcttaggtctcaggtcccagtcctagtcaaggtctcggtccaagttttggtctgcgtttgagttatggtttgggttttgttatcgtcttaggtctgggtcctagtcataatttcaagtttttattctaggtccgagtttggttcaaggtccgggtctgtgtccaagttggtgtcacggtctgagtcttagttcgagtccgagtacaagtttttcgaatctcggtctgggtccagatctgagtcaaggtccaggttcaggtcttggttctgggtcccatgttcgtgtctgggtctgcgtctgcgtctgggcctaggtcccttgtttcaatcccggtctaggtctgcttcggtatttgggttcgggtatgggttcgtgtccatgtcaacgtccgaattccaatttaggtcaatggcttcatccgggtcttggatcgtgtcccgagttcgtgttaaggttctggttcgagtctcagtgctagtctgggtctaggactgggtctgaacccgagttctgggctaggttcgatctagttcagagtccgagtcaaggtccaggtcatggttccgctcctgttccatggtcctgatcacgttctttttcaagtttcggttttgggtcccaggtttgggtttgggtctaggtccatttccagcttcgggtccttgtctgagtccctgatcaagacatcgactatgggtcgtgtccaagccccggctctctaatcatttgacaagatctacatcccaatcacgggtcctagtcttgtttcaattcatgtcctaggtcagggtctaggtttgggtctaggtccaggaccgagactggg

SEQ ID NO: 58060 - DNA, 1031 bp, Cannabis sativa
  modified_base (968)..(988): a, c, t, g, unknown or other
agctccttgagttccgctggagccattctatatggtgctttcaaaacaggttctactccaggtgccaaataaatcacaaaatatatttctcgttatggcggtagtcccaacaacccctcaggaaatacatcgggaaattctttaacaaccctaactacttctggtccaaatgttttagatctactggagtcaatcacaactactaaaaatcctacacatctactgtgtagtaaatctctagcccttaagactgaaataatcaggatttgagacccctgaacagatccaacatacacaaatggatcttcgccctccagctgaaaagttaccatttttcgcttacaatcaatgctagttgaatacttggacaagaaatccatccctagtatgatatcaaaatctgctaattccagctctacaaagtcagcactcaactctctatcttcgaccctaattggcatagacctaattcgcctcttggtgataactaattccccactaggtggtagggtacaaacccttttcaataaggtcacaaggcctacccaactgattaattacccgtgttgccacatatgaatgtgtagccccaaagtcaaataacacaataaaataggagttgttgataagaagctgacttgtcaccacggaaggactggctgcaacatcagcttgagtgacagtaaacactcgagcaggtacgggttttgcctttggcttctgctcttctttctttgcctgagggcaatacttcttgaaatgcttaaccatgccacactgaaagcatgtcttccggttgcactctcctggatgatgtttcttacaacgtgggcactcagggtaagaataatcctggcgtccacctctgccttggttcccacagaactgcttggtctatcctgaaccaccagatgatggggtagcctttctattctgatcagcagtggaatctgttgggttttatgccnnnnnnnnnnnnnnnnnnnnnataatcagatttacttattaatgtagatcagaaataacattta

SEQ ID NO: 58061 - DNA, 1071 bp, Cannabis sativa
aatatggctgagtttgttgtgttgtgactgcaatttataacaaaaaaataccatgcctttaaaaagttcacctgctagttcaatcgtagggttttttattgcttctgagagtaacttggtaccttacttttgattatagttgagtttgttatgctgtgattgcaatttttaaccaaaaaaaaaaagccatgtcttgaaaaatgtcacctgctagttcaatttgagggtttttgtattccttctgaaagtaacctagtaccttacttttgaatatggctgaatgtgttgtgttgggactataattttttttagaaagaaacatgtaattttaatttcttataaagtaacttgttaaatgaattttattttttctttttgcttcaagaagtgacctggccctgtaattttcttagagaatgaattttattaaaacattaattcattatggaggagagtggaatgaaagtaactgctactcaaattacaaagtgattggtgtacatattccagataattgttcattatttgatcttggaaattaatttgatcaaaaatgaaataaatactaattgggacaatatagtctataagcacaatataccataaaagtacgattttacccatctcgggtcacaattacgaaaagaccttaatacatcaatggggtcttaaaatgtaataaatcataatagtttcacatattaaatcatataataatataattcctcattaatattaaggatatacaaaaaatttcataaaccgtccaacctgaataacccgcccgaaccaaactgaaaaaactgataaaaaatacaaaccgaaataatccgaaaaaaattctaaaccgcccaatcagttaattgggcgggctaaaaatagacccaacccgcccaattaaaccgaccaaaccaatttaacccggcttttaacgtttttttttaagttcagtttttaactttaattcttttattattattataacataaacataataatataatatatattgtttcaacaaaaaactacacatatattaaaaaagacaaagaaaatgacctctgacagtca

SEQ ID NO: 58062 - DNA, 962 bp, Cannabis sativa
tattatttttctaaaaaaaaaaagggaaaataatatacttatttatttatttatttatttatttttcacaaagtaattaaatatactgcttagtgtttaggcgagctcagatgggttggttttttttttttcaactgaaggaaataattactactttaaattaatgtttgggtgcataaaaatggggacaaattccttaatacttttgtagttgaattctttaattcaagtcatttatggtacgtagtttcatatataataagttgaagatatataactattcattgacaaagttcattccccaaacatattgttataaaaaaataagaaaaccatttatagaaattaattttattagagaccacagttttttttcaactcatttatatatatacatcatcatcatcattaaacatgaagtgaaagtagaccaatattaattaatatcagtgtcacagagagagagtatttcttttgccttcaatcatatgaaccttcctgctatggaaagttctgttgggtagacatcttgaatatgatgtttaggcaaaagagagaaaaaaaaaataattggatgaaattctctatcttttatactttgtaagatatttttattattattttttcttttttattctttttagtacaggaaatttgaatatctatgcattaatttggggataattttttccctaattgaatacatataaaaattaaaaatatgtgacaattttatttaaaacccaatactactcctctcataactcaatcctatctctctcttcgtctatttctctctctcaaccgaccgaacaacacttcaccgccgcccaaaaccacaacccccaatccccctcaccgatgcccaaagcgccggcccctcaccatctctctctcttccccatctgtaaagcccgcttagttaatttggaaattggcagttatttatgttaatcaggaaa

SEQ ID NO: 58063 - DNA, 3886 bp, Cannabis sativa
aggaagaggatacgaagccttgtgtgaagagaattattgatgcaccattgcagtagcatttcaggatgccctagatggaattgtatgaaggacggacagaccccagggaacatttgtcacaatacaatcgcatcatccaagtcaccaaggccaatgatgatacaaaatgttgaagtttttcattaacattaagtaagtccgtagaggactggtggaagaggttgtctcttggatcgatccacaattggagagacctaatggtaatgttgaaaaaacagtttatagcagccaaggattatgatttggaacctagctccttcaccaacgtcaactgtcaagcaacaacaagaagaaagtttgaagaagttcatccagtgcatgattaatgagacaaccaacactaaagtcattgatgacatgaaaatggtggctctaacataaatacttacagctggaactttactatggagagatctccaacgtaaaagggcagataccttgagtgaattcttaatagaagcccaaggattcttaaatctagaacacacttatgcccaagcatatagagtacttcccgcaccttctgctgatgtaacaaatgcctaaccttcacaaatgatgactccatccatttacccttcgccaacttcttttactagctatacaggttagtttctctgagtttagggctgcaccgatcggatatagtgctgctcctggacaaacaaactaaaaatcagaagttccagagtccaatataaccaattcaaggagtaaaaggagtacaaagggtccaaatcggagtgagcttttgaagaagggtaaaacctaagaatcatggtacactgagtacacaagtctcatagatactcaagagaatttatataaggaaacttgtaacatggtacactacatgaagccttcaataatgtacaaaggtagaaaacacagaatagacccaaacaaaaagacttaatatcatggtgatattggtcacactaccaatgagtgtgactacttataggatgaaatagaagggttggtaagacacggagacttgaccaattaagtgagaatcccagtcatctaatcaagacaggtagttgcacattgataggttttcattctcaaatagcagggagccataaatcctcctcatggagtaggccacccaaagcctcctagaatataggctccaaataagcccttcagggggctcaaaatgctttagcagctgtagtagctgtagcccccattcccaaaactccttaccctcttggaattgcattaccagctttaggtggtcatgtggcaactattttaggtggaccccatattgccgaaagcactcacaatctatagaattggtatcataatgagttaaactaaggcaaatcttaccattttgtgcagtcacctgcccatcatccaaggatgatgaatttacgccatgactttcatagaagacaacgccatgcacgtgcactatcctcataatgacccgctggtaatagaggctcaaatagccaacaaaagagtttccaaaatcctcgtggactatgaaagctctgtaaaaaacattttcacaagagcctttgatgccattagtctaggaaaagccaacaggttaccctgtccgattcaactgcaaggtttcaatggagatacgttgatccttatgggaaagatacaactcccaatgactataaataaggaggttgttggaagcaatgttgtgtactccttcaagtatagcacatttgtgatagtcgattgccctactgcttataatgctatcctgggaagacaatttctgatggacttcaaagtcgtgacgtccatccatcatctatgcttaaagttccctaatgataccagaagcataggaactattagaggagatcagagaagcgtgaggagttgctatagcatttcaagtagaactgttctcatggtccaggaaggaaacaactcatagtccccacattatttgccatgcactgaacatagatcccaatgctaaactagtatagaaaaagcaaagacctttagacccaatgagatcaaaagtagtgaacacaaaagcagacaacctgacaaacattgacttccttagggaagctctgtatcccgtatagctttccaacctggttttggtcccaaagtcatgttaggacatggaggatgtgtatagacttcacagagctaaacaaggcttgtctgaaagacaatttcccacttttgcgcattgatcagatggttgatgctatgttgggatttcaattattgacattaatggatgcatactctggttatagccaaataaaaatgcacgtggcttattaggagcatattagtttccaaactaacaatggaatctacaactacaaggtcatgccatttgggttgaagaatgaccgagccacttaccagcaaatggtgaacaagatgttcaagaatgtcctgggaaaaaatgtggagacaacatgctggtaaagtcaaagacatttgaaagtatttaccaagatctaaaagaggcctttgcgattatccaggagtacaaaatgaagctaaacccaaagaaatgcacttttggagtgtctttagagaaattcctagattgtataggaagcacaaagatgtccaaaagttgactggaagaatagcaatacttagcagattcatctccaaatccacaaataagtgtatagcattctttaatgtacttcgaggaaatcataaatttgaatgcacaacaaaatgtgaaacaaccttctagcaactaaaagaacatctagtgaaggctctaatactgccaaaaccagttgatggagaaccattgcttttgtacttggcaatatcagatcatgccgtaagagctacattagtgcaagaagaaagaaaggtacaatttccagtatattatgtaaggaaaagactactgagcgcatagtccaaatatcctatgataaagaaactctcctttcaggctcatgcaataagggtattaacaaaccaccctctctgtcaagtgttgtagaaactagagtcgtcaggaagactcctaaagtgggcaatggaattgagttagtttcacatacaatatgagcctagaatctctattaaaggtcgggtgttagctgacttcattgtagaatgcacatgggtaaataacgatcatgagacgtcaatccaagaaagagaagtttggaaaatatatgtagaaggaacatcaaatgagaaaggttctggagccaaaatcatcttaatatatcgacaaaacctccagcttcaaagtgaactttgttttgagttcggagcctccaacaactaagctaaacataaggctatgattgctggtttacaagtagcaaaagaagttgatgcttagaacaatgaactctgtagtgatccatagcttgtggtcaactaggtgtttggggagtaccggatgaaaggggaaaatggcttgttatgtaggtaaaacttgagagttgttgcagcattccaagaattattctgtaaagcaaattcgcaggcataagaatactttcgctgatatgttggcaatgttagcaacatatccataaatagaaaaatacggagtagtccccattcacatttgataacttcaagaatggaaacactaggggtctctgtcatcaacaatttaacttccaggatggctccaatactcaaatacttggaaacaggtacactcttcgaggatagagctgcttcatggaaggtcgaatatcaagcccccaaatatgtaatcatggagggaaagctatagcgcagaggattatcgatgtagtatctttggtgcatagccaaaacagagataagtgctatcatgcatgaaattcatgaatgattttgtgga

SEQ ID NO: 58064 - DNA, 1122 bp, Cannabis sativa
tgatagcaaaaatagaaggatttgaggaaaaaaaaaactcaatactcattactggagactttactcttatatttaattgtgaccattctcttatatacacactttaaaatatgtttatggtttaggaaagaaatttagatggtggaaaattgaaaagaataatattttatgctactgatcttcatgtgttgaataagagttgcatcgtggtcctatcctggtgtaagatgtttaatttattttgactttatttgagattgcaactattgtgtgttttgataggaagattagatggaattcatatagcttatatatagatttcttcaggtagatgtgaaggaattcttatttggcactgaataaagatatgctgattcacatactgtgtactgtgtagtctttttgttagtctttgtttttttttctaaagattcaaaatagtgttatatggtggctttggatctgcataattatagaaagttagtttggtatactctttcaattgctttttcctcatatgggtttctttcttaattgtcattatcaagatttggatttcagttcagaccacagattaatcaaaataccactagctaaatcttggtattaggataagatattctcttaaatatgtctttagtgttttgtttacatgtgggtttgtgctaaatgcagtcattaagtattgtcttgttattattcccatctctctgttcatcaaaaccatataaagagttcactgtgagcaacgatgaatcccatagttttcatctatcgttttgtgctttgagctgtaagtgttaatgaaatctatgtgtttgatagaatgagaggtagaaggccttattttaggctaatataaaatcataaaattgagatatcttatctattttgctaaggacaactgaatttcacaactaaaagatttatttggttataaattgacatttgctagtaatagaaatatcattgtgttaatatgtttgacatcttctatttgatgtttgataagtgttgtcagctgacggagatagggggaacaacgggaggccatgcccacccctaatatactttgttctttttaaaatttgtgtgcatatgaactgtttggttaaatctctc

SEQ ID NO: 58065 - DNA, 608 bp, Cannabis sativa
gagaaagatctaataacctacaatgttttattttacaatttttttatatttttatagaaaaattttatagtgtgctcttcaaaataagtgtatcaatgcaccacattcgtaatttcaatatttaaataattttaatcttaattatttatataacaatatcaaaaataactttaacacgtcaaaaataaattcttataatttaataaattatttgaactatacttttcataatgtaaattattttaaaaattttaaaactttatacgatatcttaaatgaatacaatatacaccatgatataaaaaaaattaaaattataactattcggatatctaaaagcatatttataaaaaaattggacacccatattctccaaataccgaaaatatacatatcatttttggtagaaacgaaaatttactgaaaattccacatcattttcattgatagggtttcctttatagagtggaacatacaatttttgacaaaatatactaaactatgatcaaactcttaatggaatcatttttagatgagaaattgagaattagtgtacttattattgtaggatttctaatttgctgtctaattgtattttttttagtatt

SEQ ID NO: 58066 - DNA, 2454 bp, Cannabis sativa
  modified_base (732)..(736): a, c, t, g, unknown or other
  modified_base (1802)..(1804): a, c, t, g, unknown or other
tttagttgaaaattgaacttgttaattataattttaacatcaatatattttaactattttttaatatcaaccatctattttttatacagtaatgacttgaatagtaatctgtcttcagtacgatggggactggaaggatgaacatgggtcatataagtggtcgccaaaaaataagaagttatctataattgttgatgatgattcgagaactacatttgagatgttattggataaattgtataagaagattggagccaataaaattttcagaaaatagctcaactgagagtagttgagctggactatatatggttgagattagtaaaaattgtaattatatgactcgactgtaattagtagagctcgaccattcatggttgagattcataattattaatcaagttaatttttatattgatcaaattttgtaaaggttagaggtgacaatagatattatactattttataaatagattaaaattatcaacattattatgaaatgtaaagaatgtagcaatacaaattattatatttataaaatatatgatttttgtctaaagtaaatatgaaatgtcacaataatattttagaaacacagcttttttcttaaataaattaaatcatcaagattattatcaattttctttattagtagagattgtgacaatagacattataacatctatacaatatatagttttgtctaaagtaaatatgaaatgtcacaataannnnntagaaacacaatttttttcttaaatagattaaatcatcaagattattattaattttctttattaataaagaatatggcaatagatattataatatttataaaatatatagttttgtctaaagtaaatatgaaatgtcacaataatattgtaaaaacacaatttttttttttaaatagattaaaacatcaagattattattaaatttatttattagtagagaatatggcattagacattataacacttataaaatatatagttttgtctaaagtaaatatgaaatgtcgcaataatattttagaaacataattttttcttaaatagattaaatcattaagattattattaattttatttattagtagagaatatgacattagacattagacattagacattataacatttataaaatatatagttttgtctaaagtaaatatgaaatgtcacaataatattttagaaatacaattttttcttaaatatattaaatcatcaagactattattaatttttttattagtagagaggcatagacatattataatatttataaaatatatagttttatctaaaataaatatgaaagctcaaccatattaaattatatagctcgactataaggtgtagagctcgaccattataaattatatagctcaactgtatgagtagagctcaactgtatatggtctagattttcaaagagcttaattatcattagtagagtccgactatttatggtcgagatttgtaaacactaaacaaaattaaaattatcgcttgtctataaagagtagagttcaattgtataggtcgagattcgtaaacattgaacaaaagattagtaaattgttcaattgtaattagcctgactatatgtggtcgagattcgtaaacactaagcgaaattcaagttattgcttgtctgtagagtaaagctaaactgtataggttgagatttgtaaatgttgaagaaaagattagtaaataactaaacacaaattactaagggtcctattgttgacaaactgccatcttccttctgtagaatgccattctatcatnnnataggctttcaaagctaagaccagccatgtcgaactcaatgaacttaattgcatacaccacacaatctcccctgttataagaaatttttgaactcaataatacatacatgtttgcaataaatattgactaagaaagcatgtatgaatatacttataaatatacttacgtgaattttatggaacatcaagtaatcgtttatatgtccatggattgtgaagacattgtgctatctcctgaaataggtaattattttaatttgttctttaagtcgccaatggtgatgcatgaaggtcttttacgaaagtgtctatctttgaatgattttgactcagcttgagattcccatcctttagggtactttgagtattacagtccaaatattaatgcatactatatcaatgaaaatcggattggtatcccattcacaataaaccacatctctgaatctctgaatctctgtaacaatctgctatccgaacgagtaatagccacatcacttggctaaaatgtctatagtagtcagaatgatcaagaaagtgaccaaacgaagattctttgaacaattttaagtgagtcgggtcattctttagtacatcattaatgtgccttgtgatctcgtccatccgaatttttatacttattttgcact

SEQ ID NO: 58067 - DNA, 1166 bp, Cannabis sativa
ccgtccgtgagtatactagccttaggcctatagggttcgatgaacatctccataggtttaggatgccttccactcggtgggggaatcatgccatggagtataatttctcccacttaggcaattatttaggtcggtcccggatgggttctggacgtccggcgcccatttccttggaccatttagcccatttatcttctagttggttccctccatcggacagctatctcgaggatgatgaagccagtgctatgatccgagattttgctagggccgaattagagagtcagggtcgtactcgcttaattgctttttgttaagtgtatgctgctctcacggatgttctaacacttgacctattttcttgttgcagcaaccaggcccatggatgaccttttggccactcttgctggagcccacagtcctgatgcttccccgcctcctgcttcttctcagttggtcactcctgggaggtcctcctctaatgccccttcgggcactattgtcttggtggacgaggaggaggttcttgaggaagttgaagaaggtgaagaagagcagtcgaccgcccttcagcgcaagcgcaagggcaagatggtggaggaggaaccctctaagcggccccggagggtggagagtccgcccccgagccatgactccaggattccctccgaggcggatgaatacacagtgcctcacggcatagtgttgactccggttcttggtgacgaggagaggcagaatattcggatacccaaatataactaagccctcgacgagtacagccgggggcatgctgaggttgaggccctgaagaggatcgtacgggaggagcagcaaaacattctcaacgaggagcccttctgaaatccatgggacctaaacatggacccgctgacggactggttcaaccgtttccttgggcccaccttggctccctttgcctcagagatgacgagcgagtttgtctcccatctgactcagttcccgcccaaacgatatgctgcttgtgcctccttgaactacgtctaccaggttcaagacatcagcaacgcgatggctgtggtaggtacttacattttattttttccttgatattttgtctaaggcattcgatcttactcttgtctcctttttcagattactgcggagaccagctgcctttccaa

SEQ ID NO: 58068 - DNA, 1022 bp, Cannabis sativa
tacccggtgtttccccttacggatcacgggattactactgtcacacctactctggcccaatgtattgacgtccctcacgattggctttgtctttcccaaaagccccactcctttcccgagcctttacctatatgttggcccaataaagactctgaagcctagaagctatttttccaattgtatggacctgatttccttaatctctataaggcccagcaatctctcatatgcaactcgcttgatctgtccgagatgattaatcacttactgggaaataatagaaaaagaaaagctcattgctggttacaacctttccctgcctcaccacatttcgagcttcctgattgtcctgtgaaggagaaaagttctgatcaagatgaaattggtgctttctgtatgggctccactgaaaagggggagggttcaattggtaatagtcgtggcaagaaaccaaaaggaaaggagaagaaaagtgttgtcaggaaattctcaggagttaagactcgcagtggtaggaagaagataattgctttggatgatcttgaatttccaggtaatctgtcaaatatttttgcaaattgtgttgatatcccaatcacctacgaacaaaattttggaggaggcgaggaggcagccgcaaccatgcccccaccatcctcatgaggtgcctctcgtggaattgctggggacttcgtagaccctcggcggaaaggactcttcggggtctgatccatcaatgtaatgcggatttgatcttccttgctgaaacgaaggtggatgggaataggatgactgagattagtaattgattggactttgcaaatgtttgttgtattccttctttgggaatcgcaggaggttttgtgttgcttggagtttgggtattcaatgccacgttattgaaacctttgaacatggattcaaaattgaagttaatttgggaaatggtctgcccgttcggagcttcttctgtgtttatggttcccatatgaggcacagaaaaatagttttttgctatggct

SEQ ID NO: 58069 - DNA, 1570 bp, Cannabis sativa
  modified_base (31)..(35): a, c, t, g, unknown or other
  modified_base (67)..(71): a, c, t, g, unknown or other
  modified_base (99)..(103): a, c, t, g, unknown or other
taatagtaaattaataaattaaaacaaaaannnnnaaattaataaattaaaacaaaaatctgaaacnnnnntaaattaaaacaaaaatctgaaacggannnnntcgttgagccgaaccgaaccactctcagacgactgctagtgtttcaatcttgatattcaagtttctttacaaaatttcacgcaccatttttttcgtatagcagagtaattttgtgtcctcctcatgtagaatcaccatttccttatatgttcatttatggccaacatatattcatgcaatttaaaagtgaacgaaataaagtgttagggttatgttttgtatatgaaacagggtctaagattgttttattaagaacaatataaccatacacttccttatataattgagatataaaatgtaaaataatgacatatatttatttatttattaattttaatttaattaaaaagttaataagatataaaaaccatatgtttaacataacaaattattgatgtaaaaaaacaaattactaatcaacaatttaaacatgtaccaattttgatcatttgactttagtgtaccaactaacaatattttagaactttcaacatgcatcatctatcatgatgcctactaagttgcctaataattcataatatttcaaagataatttacatatatatatatttatatataataaattatattaaaaatataattataatagttacatttttttgacctgctataataaattactaacaggtaaaaaatttatttttaaattcaaattaattatatatttaaaaaattaatttttttaattaaaatatttaataagacattttttgcaactaatgtttgtgaatattttttatttataaggaaataaataaaattagattagtatcatattacagaataattcaacgactaaaaataaatgtaactatcgtgattacatatttgttgtaaccattaaaatattttccatatataatatttacatatactagcacaataataataaattgtatatgtgatggcttcatcgaataacttaaaattaagcgaaagatattaaatattttaaagaataaaataataaactttgagtcactaaatttttttatccattgctacatatataagccatcaaacaaaagaggaatcattaaagtgtgttggacagctatctttagatgtctctcgtgtttagctatcctgacttgagatagctagaagtgggagatgttcaatcccttaaatttaatatgcaccctctgtgtgcctttctctttctcgtgccagatccaaaaaaacatatatactctctttcaagcagctttgaggtgaaaaatacctccaatcttctcatctctactctctgagcctactcctttattacttgttgctcagcctcctcagcaattagggataggtctaccactctcttgtacagagtgtcatgtgaagtggtaatttttaagtcctgattgattgtggtattcagttctcgcatatacttctgtttcctggtgaaatctgtgggcaccagatcaccagcaaacttggacagccgat

SEQ ID NO: 58070 - DNA, 1244 bp, Cannabis sativa
ccctcaaggagcttctagcatatggaaaggaataatttggggaagacaaataattcaagagggagctcgttggagaattggaaatggtcgtcacagtcgcatttgggaagacaaatggattcctaggcaaaatggaacaatattatttcggcatccgagtttggctcctaactctactatccacgagttgttaaatgaagatggtgaatgggataaagaggctatacatacacactttcattacgaggatgtcccttggattttgggcacccccgtgaacataaatatggaggattctctcatatggtcgttcacatcaaatggtgagtatgtggttagaagtggatatagagtagctcgggaattaaaccttagtcctacccggtgttcgaacatggaacaaacacatgagtggtggaaaaaatggtggcaacttaacctcccccctcgaatcaagttatttggatggaagttatgtcataattggctcctagctaaacttaatttgactcataggggaatgaagattgacactacttgtgatatgtgtggtaggtatattgaatccttaactcatgctttgtggtcttgtaaaaaggcaaaacaggtgtggaagctgctgcctttatacaaaaacatcaaagatagcaaaggtcagtccatgttcgatattataacagatttcaataacaagctatcaacagccgagtttgaggaagccattaagatcctttgggccatttgggaaaacagaaatcagaaaaggaataataagcaagtcatgaatggagaaaggctcatagattgggttctcaataactattccccgccagtcatgagtccgaagcaaaggaatcccacaccaaaaaacaataaagaaggcacctggctatctcctcctgaaggtttgttttgtgttcattgtgatgctgctgtaattccaggtcaggtgggcgttggtttggggttcgtttggagagattggaagggcaacacactctcggctgggatgaattttctccctgctatctgtccggcgatcatggctgaagcagaagccattgctgctgctttgaaggcgtccccaattggtgaaaatcaggcctttgaaataagaacagattgcaaattgctggtggagagtttcaaggttaaggaaaatactttaagtgatgtcaatacagtcatcaacaagattaagaggcaccagctttttcccttttgtacaaagctcatttttgtta

SEQ ID NO: 58071 - DNA, 883 bp, Cannabis sativa
tagtagtgtttgatattttttataaatgatactttacgattagttagcgatattttttaaaaattatttttttaagttatatggcataatactttattacactaataataatatgacaaaaaaaaaatattaagcactaattgaatattttagcaattctctataagaaaggcagtatagatggagaaagatatcaaacttgattttaaaatcattatattataactatgactgtatacttttttttattattgtttattttttttttatgaagatgggtttctttacttatttctattattaattaaggttgttgttgttgttgctgatttgattaattttaatttgtgggtcaaataatttagctggttttggaaattgtagatccaagtgttgagagctgatcacatgggggatgatgagatggttattaattattttcattgcttaattaattaaatgcatgcttatcaatcaatctatctataataatattgagttgggtggtagtagtcatgtaatattgcttacaatagggttaggtgtcacgtgccttaatcgtgaaaggtggggttgtatcatgcataatgagtttgtaattcctttgtattggttaaagatggtccaattttttcatgataaaataaagttctatactataaagtttattaaattaattatacaaaagaaagttaaaaaactatacataaattattgtaaagactgtcacagtgagttacatatggggatcaaaatatgtaatgacacacagtactgctgtaattagtgagagcagtgtttgctgacacatatcacagttgtccaaagcaaaatgtatcattatatcctctttttacaatttatttatttataataataataa

SEQ ID NO: 58072 - DNA, 869 bp, Cannabis sativa
ttttttttttttttttttaagaaggaacaatcttcattaatcaccaataaatgaagtctatacaatacaaagccaggagaaaaaaaacaacctgcttttacacaaaaatattctctacatatcacttctcatgagctttcaagcttctattttttgctatttgtaatctatagtaaactattttcttaatatcttgtgtaagtttggttgtagtactcgagtaattattgaagagacggttatttctgttgctccatatgctgtaaatcatgggagccaacatagagatgtggaccatttgcttcttgtttgtgttggtttgcaacagctaatgcccagccacgaacagacttttgccatcacctgctgagaaaaattgcagtaaaaaaaaatgagcattgctctctgctactaactcacaaaccgggcaattgatgttgtcaagcttgatctgaaattgctcaaacttgtcacgagttaaaaattgagcattgatagcttgccaaaaaatgaatctgtgcttcggcatgttgagagaattccagatacatttgttgaagtcaaactgggtttgtggaaggctgctattatacaataaagtcgaattcaatttatgccttcctgcccctgccttttctatatcttcccgagtgaatttgccccttagatggcataatttcctccaataccagctagtatcattcttaagctcatagtcccaccaagacttgttcttttttttgatgaatcagaatttgtattagcacaaggaacaatttgattacatccaaataacacccaaataggcctataaaaaagaactatacaattacaatatatttacaaagtttggaaccattgagtgtcta

SEQ ID NO: 58073 - DNA, 988 bp, Cannabis sativa
aaggatgtaacttctcaaaagtcaatttggtttgttccatcccttgggagaggaacattcatggttccaacattaaaggatccggtgttgttgtttctattagtttggttagcagtcatgataatttttctccaaaatcaaacaagacgttcccacagacagcgcaaatattgtctgagaaatttggacaacatcaaatttatgcaaatattcaagggctgcttgaatactcaaaaatagatacgtgagcactcacttagaatagcgaatactcaaagaatattgtattatatgtgagtattgtaaataatataaaatagacacagaaaagtatagtggttcaacaggaccttcaggctcggtctgcctaattcactcttgaaaagagcactctggttctatattttattataatcagcccccctttgaatggagggagaagcctctacttataggtagtagacatcgattgcaaataatggtcataatgagaccgttacaacaattaatatataaattgtattgattacattagttataaaataaatgtaacgtttgtcattattgctcattgaatgcttgaccgttagtttctgttgattcatgtgtgtgtacgcgccttttcctgttgatattgcgatttcaataaatatgtgaggtgtgccttccctgatatagcgagatctcttttagttaatattgcaagatcctttcaatattgcgagttctctatagccaagtcctcgcagggagggtaaatttatgccaataatagtatatattatatgcgaatattataaataatataaaatagacacaaaaaagtatagtggttcagcaagagtttcgggctcggcctgcctaattcactcttgaaaatagtactctggctctgtatttttattatgatcagcccctgttgaatggagagagaagcccctacttataggtagtaggcatcggttataaataatggtcataatgagac

SEQ ID NO: 58074 - DNA, 702 bp, Cannabis sativa
ataaaaagctgagtttgtatccccctccttaagccaagatagttttgctttttgctgtagaaaagacaaacaagccgcttgtgttgttgcaaaaagttccctcgcctcagcctcttgctcttgtaaattctcatcattctgttgcaaagcattttgacactcttgtagctgggattttacacgattcgcagcagcaggcaaatctgcaaagtgtatggcattcagttgtcgaaaaacatcttttaaagtcttcaatttagcaacaatctggaacatttttgaaccatataccacctgtttccaactttcagcaaccatattcgcatactgtggatgattagaccacattctaaaataccgaaatggttttttttcccctaaaatggcctctcgaaccgtgactacagcaggagaatgatcaaagatcccctcggattgaaagcagacttctgcagcagtaaaggcagccaaccatttagggttagcaagcaccctatcgatcttagaatagatcctatccgctcccttttgttgattacaccaagtgtagtacttgcttacatatttcacatcttcaagtttgcctacatatttcatatatatatttaaagagttgtattttcatttaatacttattttagtctatttattttaatttatatttatttaattaaaattactaatttagataactctaaatat

SEQ ID NO: 58075 - DNA, 907 bp, Cannabis sativa
gaaagaagaaaagaagaaaaggaaaaataattttttgttttttaattttcatttatttttaatttttaaattattaaattagcccttatactatttttaaaatttttttttttcaaatttacagtttctccaatagtttctactgtgattgctatgcaaattttggttgcaatttagactgctctgttagttgctatgggagtttctgtgtgaaatttaataaagaaaaaactattttgaagtgtaaaaataaaaaaactactattgtttatttatgaattatttttatatatgatatgtactaataaaaatatgttaagtgtatattattgtacacatcactaggataaggtggcatttaacacttacccactagaatagtagagagcaaaagagaactataattcagaaggttttaccatccaaaattgaatttgtggggttaatgtagctaaggtggcatttggttagaagtaataaactaaaatgaaataaaaaagaaataatcttcattgtattcatttgtttggttaaataataaagtattgtaacagagagcacaaattaaaacagaatcacacggtggtattattccttacccccaaccaaaattcagttagttagttagtctttcactaacttaactgtcaaatatgaaagcaactatagtgagcctcttggtctatataaagaagactactcatctcatttcagaaagggggaagaaacataagaataagggcaagaactgagacacaacaaagtagagagaaattggagtgagaaatggagagagagagctggattaggaaattgtattgagcaacattgtcgattatgttggctcggattagtgagttaatgagtgttgagggattgcattatggatgacttactttgattattt

SEQ ID NO: 58076 - DNA, 1246 bp, Cannabis sativa
atttgctcatactaaaaattatcttcaagttggttatattaaaaaaaaattgtcgaaaattgaactcagagcattatttatactattttaaaaaatacaagatttttttcgttatttaaacaaataaatagttcaatcagtaacttttataaaatacacagttgaaaataatattagtcctaaaatcaactttttcttttgtttttgttgaaaaagtatctacaaaaacaactcaaaatctatttttgttcaattaccctattcatattaatagaggtaaaatacttaattttagaggtacatggactccaaggcccaaaatatcatgttattattttttattaaaaaaatatccattttattacataacttctcattataaaatataaattctcaattatgagaaaaatcttagttcgaccttttaacattttatatttgacaacaataacacattgtatattatgtttttttgtccttaaattattattattgttgtatggatcactttgttttaaaaaagaaaacaattattgcaataacacatcatatattaatgttcaatattacacattataaatttgaaatagcactttattatttataatttctcataatgtgtacaatatattttttttaaagaacaaatgtgtacaattactcaagtgacttagcatcatggccggccagagggtggggcagccggggcctaggccctaggccccacaaatttggaggccccgaaaaattaaaattaatattatatacataaaaataaaaatataatatatgtatatatataaattttggtccaaacattcttataaaaggtcttacagcacaattggtagagggaatgtatgttggttgctaggtactgggttcgattcttggttctttcacattttggttgttttaaaaattttaaaggcattgattagatttaataaagattgtgtagggtttcaatgcattatttaaaaatgattttttttttcttacaaaagtcttaaaatatataatacttcaataaaagatgctattaattataattaaatattacgttaagttaggttatgtgtgagaaaaattatttattatatgaagataaaagagttaattatattgtgtcaaaatttcaataataaataatatctcagagcaaaaaaaaaattattttaattttttgtaaaaagaaaaggccccatttcaaatttcgccctaggcctctcaataccttgagacg

SEQ ID NO: 58077 - DNA, 731 bp, Cannabis sativa
gaagatagatgaagaaagggaaacttgtgccattgtggaatcaccagctcagcatcctgcaataatgatcctacccatttcattcacggaagaggacaccagacatgtgtactttcccataaatggccctttagtcattgaagcgcaaatttcaaacaaagagtttctaggatcctaatggacaatggaagctcagtgaacgttccgttcaaatttcaatgccaggtaattgggctcattgaggcagatctatcaccttatcccattcagctaaaatactttaatagggatgttttcattaaaatggggaagatactccccataacatttaaaggagaaaacaatttgtgtgccttcaagcattatacttttgtggtggtggattgtcccatagcttacaacgccacactaggatgataaattgaggtagactttggagtagtgacttctataagacacttatgtataaatttctcctgtgacaaagggtgcattggaatgcttagaggtgaccagaagagtggaaggagttgttgcaatgtcttcatctagaatgtgttcgtggtctgggaggagttaactattactctctaaatacagattcaagcaaaagttgaagccatctaaaaggattttgaagatgatctggaccaccgagtggggattaaaagaatgtttgaaccaatggaagatgtagaagaggccaacatttgcaatgtcgaccccaccaa

SEQ ID NO: 58078 - DNA, 1157 bp, Cannabis sativa
tgactgtttcattgaattttaggatctgtcttcttttcatttcaccaggtattatggtcatcccaacagtaatcaacgacttcacacttggacactccttaagagatgttatgacactgctcccaatcatccatggctggttttgggtgactttaatgagattctcactcatgatgataaaattggtggtcctccccgtaataatggtcaaattcaagccttccaaaaaactattgattgctatcatttagcagcagttgcttatgaaggtgaacacattacttggactaacaaaagtcaaggaattaacaatgttaaagagagacttgattatggtttctacaatgatttctggtctggattatttgagaaaccaattattcagcatcttgacttctaccattcggatcacagagcaattaaagtaatggtttcaatggttggggtgcaaataattgaaccttcatacaaatctcagttctgatttgaaaaaattttgctcaatgattaagattgtttggacatcattttcaggaattgggtcagcaattcttcgaatgctatatctcaaacaatgagtaatttacaatcttgtgctactcatttacaatcttggcatcatcacaagtatggacatatgaagaaggacataaaagaatctcataaacatgtggaagtgcttcaaaattcctctaacatagattcagatcactttacagctcttaaaaatttagaaacaatattggatgaattgctagcacaagaggaagactattggcgacaaagatctcagatctcttggcttaaatctggtgactcaaatactaagttctttcatcaatgtgccaatgctagacactccaacaataaaattaaaaaactaataagtgatgatggcagtgtttacaccagcagccgtgacattttggagcaggtagagctttactttgctgatattttcacttaacaaggtactgatcagcaggctcttgagaaagttctcgacataattccagtttccattacaccagattcacgagctgctttatctcttcctttttctgctgatgaagtgtatcgtgcattaaagtctatgtctggagacagtagtccaagaatagatgggatgtctgttatgttctacaccaactattggc

SEQ ID NO: 58079 - DNA, 978 bp, Cannabis sativa
caggtttgtaaacacactttttcagggactgatacagagcaaaatgcaaacgcttattctttctaatatcttctctaacccgtggcaacaagacaagcttgtaaaagcgctctgccctcttcgcacccatattggatgcaaaaattctaacagcttgatacattgcattgggagaccacttctcgggctcagtcaaatacagaatatcctcccagtttatcattgaagagatgagtttaaacagcttcggtatcttaccatctgtacagttgctaagaatcttgccaataagtctgttttacaccttcaataacactatggcatagctaaatacaagatcaattgcagtcgtggcaccatatattaaagagaaaagaaaaagtaattactaagcatactcggtatccagctgaggcataggctgtgcttctgcaatttgaaaaaaaaaatgcaaatgagttatatgaatcatagaaaatgcaccctttaaaccatattagatcccatgagtttgtttcttgtgcaaagttgagtagtgatggtcaaacctgaagacacaatagcagctttctctttgatctttgcaataataatgtcagcaagagtaggttgtgtaattgcatcttttgacatgaataagtcgagtagtttctcatccttttcatcaatttcctgcaacaacacaaataattatatatatatatatatacatacataaaataagacaaccattgctctgggtccttaaattgtaaactgaatacaaaacaccctacccttgttttgtaaaaatagcttatatgaaattttttattaacaaaataagtacttcacaaaaaattttaaaaaaattttacaatgtactctcttaacgggaatatgcaccgatgcacctgttttgatatccgaaatgccttttaagtctcgtgttcatgtacattatttaagatattctgaaaaattttaaaaaattcaaaa

SEQ ID NO: 58080 - DNA, 4880 bp, Cannabis sativa
tttttttttgaaggattttccttctaactttcattcatgccaaacaaatgaaattgattctcctttcactcctcttcctcctatcctttccttccctccacatttccatcatgtcgaaagtagtgtaaatatcacatgttcaacgaatcacttccaagctttatacaacaaagaaaatttgtatatttttttttcattttcatttaaacattatatattaccgaatcaaatatatttatataaatacaaggaattttctacaattcaaatatccttttattgatacacgcttttctgtattaagttcttgattaaccactagtttaattttttttgaagtgattgtgttttttataattacttacaaaatttaaaaaataataaatattttactacgtcaaaaataaaatttaaaccttatgtttcataccttataaaaatacacacatcacaataaaatatttaaactttatttttgtactacaatttatttgaaaatttctttaaaatttattagatggcttaaatatttacagggaatacaatcattaaaaaaaaagtataactatccaaaagccaataactatacatcaaaatatcaaacatgatgtattggtaggccttctggtacttttgattctccaatagctataaactcatttttttttataagaaacacaatgcattgcaagcgtatttatttttcttttacacaaaagtgaacaaattattttaaacttatttttgaaactattaaattatataaaattctatagaatgtcataataaccaccaccatgatcgtagtcctaaaaaatataaaaattaaaaagacagaaaagtgtaccagtactcattgtagagtgttgttggaggagcccctatacagagtaaattggtaacttttttaaaatatcaccttccaaaatggtctttttctatttttatttaataactaataataataaaatgaacttgacactgttgaatatataataataataataagattctaatcagattcaattttgcaaaagatcgctaaaggcccaactatccaatttttatgtctggacaaatcactctatagcaagtagccaaaaaaaaaaaagggaaattacagaccaaataaaatcgcagtctggcgattattattatgatgatactgggtgaccaaatatataaatacaatacaatccaaccgaagtatttcttacgattctcaatttatgccattttcccctctgagtaaataaataaaaatttaaccaataataataaaataagacagtagaacaactctgcaacacaattttgcaaacagtgcatgcaactgcacccatctctacaaattcattatacgatgataagacgggaaaagatatacagaaaaagattatgcattcaaacaacatatgtctgtctctttctaacaagttgtgaatcagagcctcacccacctagaatatgaacaccacactgtcatgaactcgagatttctggttctgagccacgcactccgatatccacatcaggttcctgatctcctgctccctcaatctcatgtatgcaaagaatacaccgtaatggaactgcataccagacaacaaaacacaatcgtgtcaccttacttttataaaagttcaaaagtagaggacgggaacggctaccacaattactctgcttagttcgctgaaatatgtacctgttgctcaaatgacaagcaaagccttttcacctcctcttcatagaatgccttgtcaagcatctggctttctccataagacaattttgagaaaatagcctgataaggaggatacttctccatggcaccacgaacctgaacggtaagcacatggaagattaggctaaaccataaggaaacaactttttggaatccgatagaagtatacagacaacatctaaactaaaaacaaaaacatgtttgacacgatgcaccgactacaatataagaaagcaaaggatgtccaagaattttataattggttgtgagattaacaagggaaatctgataatttactattagttaaaaatttgatacacttatcctaaaaccaaaaaagtccatataaagacagcctatgaaatagcaagagcatccttgaggttacatgaaactttcctttcaatctcatatgtagaactgacaaaacaatacctgatcaatgtcctcacagacagcaagttcctcatggccataaggatagctgcaaaacattatcaatccatcatcagagaagatattccaaatgaattggtaaaacaattatgttagagaacagagcttacagtaaaccaaaattggagtacaattttcttcgatcatcccgtgtaagctcagtaccgatgctgcacacaaatgggaaaaaattaaacttagaaatatgaaaactggtcaagaaaattcattcaatcatttagcaacaagagtacctgtttatggtgatattaacagctcttctgtcagcctcaaaagcaagtaggtcagacatgatctcagctgtggcaccaccaagtttctataaaaaaaataaatagagaaatgaataagaaaacaggttacacaaaagatatatacagatgaaatcagaattacaaactcacctgacaaaacctgtaaaaatcttcaaggtatgccttgtaaagagtgttcctcatgatttcaatgttcatgtcatccaagtccttcaaaacaagaccagaccaaatataccaggaatcagaataaaattataatcaaatgactcctatgcgtacaatatacattatatataaaagtttctataaaacagtcagtagttccctgtttgtcaaattagttcatttgcggtttgaaatcagacctcttttacacacacacacacacacaaccagtggcaatgactacaataatataaatttcaatacagtcaattgtgtacattagttcacagaaagaatgctacaactgttaactattattcctaaggacgagatattaactaatttatggttttatgatgaaaagaaactaacaaatctcttctaatctaagaagaatctctcttaatcattgcttttttctaaccttactattgcacaagtaatgtcatacaattacaagaaacaaagaacatctaataggaaaatgaagaagaaaataaaaaagaacagggaaaaagaggaaatgtgaatatgacccaagaaccagtagtatgtacctctgatgtaatgcactcagagaagtatggagcaagtggtgtgtcaacaagcactagcctgtacagctctcgcatattctgtgcaactgccagggtagcaatgctgaggataaaacaataaaaatttagcataataacacagagttaatatggaaaagacaaatattttcattgcaaatatacaaggcatccagatagcatattaaaatacctatcaaacatgcccagtgggtggcatttctccagtagctcctgaacatctctctcatgcaaagttccagtaacaatcaggacaacgttgtcaatcatgtgaccatatctggaaggagtcagaaacattatgaaatccgtgaactaaaagcagaacattctaagccttgtaacctcccagttctttcccataccaaaatcgagtatgtaatatgccttgtattgtactatataacttcaaattgtattcaaacattttcacagtccaggtggggtaaaccagtgtttcaagcctcaaagtgagcataaacttggtacaatccaacactgcctcggtggaaatatgtgtttaccagcacatatgtagaacagattcatattctaacaaagattaaacaaaaagtaccaatcagacaatggataacattacagggataaaggcacttacgtgatgtactctaagaaggttgaaagaggctcagtggcttggcattgcatgtgcttatactcatcaaccaatttaagagtgcacttctctacaatcgtagttgtatgcaatggggatggttctgaaagccattattaacacatataagatagatagcagcaggtttagtgatctcaagctcgagcacacagacactgaatcagtaaatactattcattcattaactcagttacggatctagtatcctgacaataatcctatgggaaaaagaaaaaaccacgatctattctaacactaccttcgtaattcaacagataaatcagcaaacaaagaatccaactcaatctaaatctagaaccaaatcaatatactcctcacactaaagttcagaaaatacattgagtgaaaaaaaaaaccttttttcatgttccgatttcacaattctatcagtgtactaaaaataaaggtgttcaattattcaaaaaacaaaaagaaaaaagaaaggtgttcaagaagaaagagaagtcaccattttggaggtagggtccgtactcggtggcagaaagatgcatcttgatgtcgtcaagggtctcgcactggcacaaattgttataatcagcagccgtgagcagtcctgcgcggtgtccgcgaacgatggcctccaaatatccgccatggatgttgaaggtcatagcttcgaatccgtacattttgaagggcttttggatctgaaaagggataaaaacaaaattgtggaaaatatatttttgggatcggatcggatcgagtcgaatcggatcgaaggacggaattgaagaaaaagggtttagttgacgtacctgagacagtcacgtggtcgccggagaattaccgggagctacagtcggcgacgacggatttgagaacaggggttttggcgtttggcggttggaagttcgataacggaagagatatatatttgcaccttcctctatattttcgttctcaaattattattatta

SEQ ID NO: 58081 - DNA, 1046 bp, Cannabis sativa
taccttgtccttacctaggagtttttttcactcattagttgtaagcccttctcactgatatgccctagccttctgtgccaagtcatggcattagaatcatcactgttattgtgagcagtatagttacatggaaccactggtgtgcctttcaaatagtacaagcctccttctttgtgtcctttcataatagttagggctcccctactaattttcatttgtccagcttcaatcttgctaacaattcctaggtcatctagaacacttagtgaaattaagttcctagccaagttaggaacatatcttacttcacttagtgttctgaccattgcatcatacatcttaaagttaatagatccagatccttgaatgtcacaggtttggttgtttccaagtataactcttccaccatttgatttcctgaaatcaaacataaaattcttgttgttagtcatgtggaaagtgcaaccagagtcaaggatccattcatctttgatggatgatccaacttggtacacttcaccactttcatatccatcactcaaatttgcatcatgcatatcaggtttatatagtgtttgagtttttagagtctccctgtccatgagatttgtgtctgttatttcttttcaagaaataacaatctcttttaaaaagcccaagttttccacagttgtaacaatcattagtttcatcaagatttctagtcttagaatttgatctgcctctttgttgtcctcctgttttgcttgaacctttgttctgatttctacctctgttgttccaaggctttcttggacctggtctgcccctactcaaatttacttcaccatttgagtttcctcctttctctgctctcatctctaaatctttagattttagggcagagatcacttcctctagggttattgatgtccttccatacttaatagcagtcttaacttccctataagattcaggcaaagaatttaggataattatagcctggttatcatcacttagagcctcattttccccagaatttgcaagttcaatatgcatccttaaga

SEQ ID NO: 58082 - DNA, 3000 bp, Cannabis sativa
  modified_base (2942)..(2943): a, c, t, g, unknown or other
tttgtagtcgctgtgcgacctgacttttgtattctgaatattttgtaaaaaatttatcaacgggatcccgacacttgtaaatatttttataaaatttataaaatttcatagttaacactaaaagttttaatttgacacgattttcaaggaaactccatgattagcaaagatagcacttcaatttaaaattactgtagcgtgccttaccattagggcgttacatgcacttcatggttagatgtagacccaaacactatatcatccaaataaatttgagcaatgataaagttagattttatgtgtttgatgaaaagagttttgtctacactgcctctttcatgatcaagagaaattaaaaattgagttaacctttaaaatcaggcacggggagcctgttttagacctgcaatttgatatcaagaacacaagcaatacacaatagcaaaagaatagattataatcttgctactggagcaaaggtttcatcaaaatcaataccttctacctgtgtatagccttgtgccaccaatcgagtcttgttcttcacaattgtaccgaatttatcacttttattttgaaagatccacttttttccaatcacattgataccttttggtcttcgaaccaaaattcaaaccttgttgcgaacaaactggttaagttcttcttgcattgtattgagccattcttcatatgtcatggcttctttcacatttttcagttcaaattgtgagataaaacaaagaaaacaaatcaaattaacataccctttttttttgttaccatgttttcttcaagacttccaagaatgagatcttttgaatgatccaattttactctggtgctgggttccttctgcatagaatcaataatgatgtttggatgaagcgagataggctgttctggttcatctgcttcacttgcatcagcagattcgacattcgcttcttcaaaattcaagtacatcagaatctacatttgctgcttctggtggagtatccagaaaactatctatcttggtttctgtggaaaattctaaaaatatttaaaatcatcaacaaccacattagttgattccataacagtttgagttctcatgttgtaaacctgataggctttattatttgtggaatatctaaataccacaccaacatcccttttagcatcaaattttccaatatgctcacgatctcttgaaacatagcaaacacatccaaagacatgaaaattacatttggacgcttacctttccagatttcataagatgttttggaagtacctggacgaataaacactcgatttattgtatagcaagctgtgtttatagcatctgcccacaatcgttttgtcagcttcctgctatttaacatcactcttgccatctcttgtaaagttcgattctttctctcaacaactccattttgttgaggagttttaggagctgagaattcatgacttataactgtagacttacaaaaatcatcatatacagagttctcatattccttaccatgatcactccgaattcgaacaattttaccaatgttacatttacgggagagtcctcctctataactgcttggagaggtccccaccagactctacatgcaaaaataaaactctcaaagagtatcaattttggacgatcagatcggcaacacataaggtcaatcgaaagaggaaacaaagtttcatttggaaccataaaaggtctcgaatagaaggaaagaattcagtcattcctattgctaataacgtagctattttcaatcaaaactcaaaaagggtagaattttacaatcacagaatctactcgtggttatagatacaatgtgcgaaatgctcttattctacaaggaagatagaatcagtccaaggcctaagttttgttcatcatcaacataaagcaatcatgggactatcaagcagaatactaaacctagacatttatcaagatttaagaaatgtacagaaggaagcttacttggtgaagaactaggtgatgatgaaaattttgaagaaaacaaaggccccgaagaatgaatccttgcgtcaaaagaaggtgtcaaagaaaactatgatatggatggtcaatcaagatgtgcgaccgtagtttgaagagcacaaacttgactaataagtttatctatctcagtatcgatatccaatattcttgatgacagtgaagaatcgccaattagaactgggggtggtgctcctggattctctcactcatgaatctgaagaagaagatgaatacaatgatcgatgtaatgcttcagtgttatcttgttcattgtcatcttctctttgcaggttcaacctcggtttgaaatttgggtgaaagtggtgaacgtacatgtttgcaccatatttatacaaaaaaaaaaaatggcaatccgcatatttctagattaatggccatgattacgctcaagaaaaaccaaaaaaatatcaacggattgggaaaaaattgatagttggacatttaatgaaatgttttgtatcaagaaaatttgaatgatgatgttctttttgagacttatgttgatgtaatcaactgccatctcaccaagattaaccacatgcatgccatcaataaaatttacctccacaaactgatgatacaattccgcacgtgttactctatttcaaaaaatggagagttgtcaaccacaaacaagatcagtatggaattcttaaaagttctgccttttagcctctacctgtcccgaggaagagtgcaagcttctacaacccttagagttacggaagctagtggtaaatattatccgtgtttctagatggggacacgtggaattccaacattgaatgcaatttagttatttgaagcccaacagcgggaccaatcagaataatggatcaagtccatgttgggttttgtgccctaaataaaatcctttacaatctgattagttatnnatataagaaatttgaagtgatttatgtttgcatgaattatacatgctaatggtttaa

SEQ ID NO: 58083 - DNA, 943 bp, Cannabis sativa
tgaatggtcaaatttttctttgtgaggaatcttggctgtacaagatctgggaggccaatcagttaattgtgcagtatatattaattgaatctatttgatgaatacacacatatattttgaaaacagatcagtttgctatatgtgttgttgaaacattagctatattccatgcgtttatatgggccatatattatatatagtgtacatatatgtaatttttcttgtctccactctaatgttttttcttttcatgagcttgtatctataagacattgtactcattaattattattgatgggatcatagaagttttaattgacggtacaattattgtatccacaatgtcaaatacaaaagatttatgtatttgttataaaaaattacaataaatttcatagttagctagatttcattttaacggtttctattttgaccttcaatatgttgttcggtaaaattaacacaagtatatacgtaattaaatcaaataatataataatagataaagtatcgtttatattcatttgagaattaattatcaattaccaattaattaattctttaattttatttaatgaataataattggtggataaaaagtaaattaaacatacaataattatttttttttaaaaaaataacaatgatgaaatcaaaaattattaagacaatttctaacacgaacagatacaaaaaatgtaaccagttttgtcataatatctttagatcagattattataaatttttattttgacgaaaaatccgtttagtgtcctattttaataattttagaaaatataagatctattttgtcatttaataaaatagatagtccaattgataacttttgcaaaactcatggtccaaaatagtatttacctattttatatatgaggcctgatatataatcaacagaacatagatatatatccaaatatgattt

SEQ ID NO: 58084 - DNA, 1916 bp, Cannabis sativa
gtggaagtactcttctgagggagaaatagacaatgagtaagtacttatgagaatgagagaatggggtttcatatatagttaccataattaagaggtagctgattcatttagcaaagtcaaatcagacaacacgtagatgtgagaaaaataataataaaaacatataacataaatcaatattaataaaataataaagatgaataatgaactggcttggtatgtaatataactataatatgaggattataaatttataattagtggcgtacaaatatatagtctaaaaagaagtacgtgggtccaacaatgaaatcaatcataatttataagtagatgaaaattaatcataatattctctccagttttttggccaaaaaaactaataataatagtatttgatgaattgaaacgcgttactttccctatacttaattaaatttcacttcaatcatacgaatgccggctcttctttttagtttttgctatagaaccgcgtttgtattaattccctattcacacatacatgtaaactaaatacctgcatggcagcacatatatatgatgtgatatattcctcatttcgtgtaatttatcttctgaaatttgggctctacataccttagtttccttacaaccaaacaagccttttatctaaacaaattaaaaacgaaccgtcattgaatcatcctcatttttgtatcaaactgacattcaacgaaccaattatgtgagcttaccaaacaaataaagtatttataaatttaagaatcaatattattacgaaatctattatactaatttccaattttaggtaaatgctttatattaattacacacaaattaagattatatttttttttatatatataaaataaccatgtacttttgtggccgaattaaattatttattaaaacaaaacaaattaagagaatatatgcatgtaatatcctagaaaattcttgtccatttttttttaatcatgtgtttaactttagtacatatcctataataaaatcctttttcactctctggttttagtattatatatacgtatgtgtaagaactttataatcacttattattctttatcaggactcaatataatttaaatgacaacataatgttacagatgatgtatacttttagaaaattcgcatctttaatcaacgctttttttccaacatatatgcatttttttttcaatgtgcacacatatatgttttatgccgaattctcgacaaagatcttaataaaattcaaataattgtatgtctattaattagtgttttgttctttgcaattatataattaggataatttataatgtacagtgcgttctaaacttctaataaatctggactaaattattggatacatcacatattcaaaagcccgaattttaaatttattgattattatgaaaactaactaataaaatatattttgaaatattaaataatttaaaaatccataaaaatggaaaaaaaaaagtaagaaaaaaaatcatattttctaaaaatatttcaataattcttaatgtaaaataaagaaaagttactccaaatatgatttctaattcattccatttctatttttaagagaaaaaaaaaatctgatgtttttgatattaagattttttttttaagaaaaatgaaatttccattaatagagtatacatttttcttttgaacaaattaatagagtatatattaagataataagattaggattaaaaaaatggaatagagtatacattaagataatttcattgtatattaaaaatagaatttccattaattaatagagcatatatcatgagtagtcttaatatattaacatatagagtataaatatatatatttttactaattttcattatttcaatattaaatttttagagtatatatcgatatat

SEQ ID NO: 58085 - DNA, 1170 bp, Cannabis sativa
agttaaaagataagaaacagagtaaaataaggcagaggaatagcagagcaagaaaatagcagcagtatgcgatatagtgtattgtatttgatttctcagtgattaattacatgaataatgggagtatatataatacagtaaaaggaatattttccttaacaagaaaatattctcttgatcaataattggctaatacacaaaagaatgccacaattttaggatatatcatgacagctcgcagaattcaatattgacagcacaccaaaatggggctgtgatctggtgcggcatacactattgtttaatttaacagtttctgactaataaggagaaacaaaatctcttgaagaagaacagcatagaagaaaagtaagttaatatttttactgtgatatctcagttgttattcgttcttggtctctagccatgatttttgtaaccattttaataagctaggaagtttgagtgaagtttcaaagagtgtgatagtaacctttatctcagagtcttagacttagttaacatgttaattaatctgattcctttgctaaagtcatatatcaagttcaagttaagatcacatgtttttagaaatttcactttggtttcaaatgattttgattctgcaccacaatttttgtagttctattttgaggtcgttccattccttgtttctgtggacttgttttgtttatatcttcatctttattttggtgatttttgtataggcaatttgaaagaggagagttattgttggatgatagttggctaagagcaggggcaatgggtgatcgtccatatgagtttgggagattggcccatccaaacttgctccctcagtggctttattactgtagaaaagaagagaagctcttggtttatgactttgtggagaatgggagcttggcctttcatcttcattgtaagatcattaattaaatactggctctatatgtgagtatcacattaccttacatattgttttacatatgttaatttaaaatagaatatgtaaatctaatactaaatcagactaactaattattaatcagtataaagtagtgttagacactataaatgtattgataactctatggtatagagttaatttttatgcttttaaactaaagtattgtgaggagagtaatgaaaatgtgtttattttgctta

SEQ ID NO: 58086 - DNA, 2505 bp, Cannabis sativa
ttaaattatatttatatatagttaattaatgcaaaagaaacaaggatgtgatgtgaacatttagacatgtggatagcctatttttttttggagacaactttatagcatagtacgtcatataccttacatgcatttatgatattgattatatatgtcctctttactttattgactatttttccaccaaaaacaacaaaggtgcttcaattctttgactaattaaattaattatctcaatattataattaatatgccatttttcgaatgtgtttcctaccaaattctacatccacttattatatatctttatattttattttatactacaatatatataacaattaatatgtagttatatataatcgacacttagccagactgctatataagatgaaatagttattaatgttaattaatataaatacttttcctttattaatttcagtgagttgtctacttcttttccagaattattctttcttcctttttctttttgataattatctgtatttatatgtacatattaattatatatacagtaccatcacgtacctaaaaagaagatataaaatcaagtatggctactgctcaagatctgcacattttattattaccttaactaataataataattatatatataagtcctatagctagaggaccttataattgtttttgcatgcatgaaacgggaaagaagattttcagtagtactttaactaataatgacaaccataaatatatatatatgagataatattaatattattattattattataatttgttcatcaacaattaaaattcatgatatatatgctaccccatacctctttaatgtttgaaaacgacccttgtattgtgttatagctcttaaatcttttctttctaaggtagtgaattaatgtacatgttactttgccatgttgtggtagacatgtattaattgccaaaaacatatgttggtgagaatgaatagtgtttgtattgtcttacttataaccacttgaagctagctcaagtggccataggggagtgtgtgtgtgttggaagttttgggttcgaatcctaaattatgcattgtaatatataaacgtttaattcaaaaaaaaaaagtattgtcttacttatttgtctgaccattcctatttctttttctttgagaagaaattctaaaacacctccctaaatagcacaagagctctaaggaaagagaaataaggggcaacatcatattattaattaataaataaccttagacataataatgttttaaatacgtataacgaaaaaatgtgagacttaatattaaattgtaacagtaacaatatatataacatattatattagtattgtgcaccaccgataccctttttaacatttttttatttgtctagctagaataatatatacaaaagaatagtattagtggtgctattaatgatatattatatctctattctctactagttagtaaataggtcccgcttcgtgtgtagttatttaaaaaaatttaaattatatatatataaatattaattgaaaagtaaaattatatcaaataattataaatatgcataattttttaataaatatttcttaaaaaataataaatctatatagagaactttaaagatttttaaaaaaattatcatcttatataaaaacgaaagcacgcaaagaaatatcttcaaaataattgtcatcattgtaactcgcttgtagtcactactacatttaaagttgatgtcatcaccgtatcttatttgtagtcattatcatatcaatttcgatagattttctctgtacataaaataaatcaaacaatgatcggtaagtacttacttttatacatacgtgtattattctgttgtaaattaattaagcgaaccattagttagaataaaattaattaattaattaatgatctttaattaaataaagtagaataaaagatgaaaataagaagagaatttaaagtagaataaaaaaattaaaaatgtgagaaaattaaagagagaataaataatatataatatatagatagatggatagatagattggtgcaattaaatattgagtgttatatattttcatttaataataattatagaatatttatgaccattcgtaaagtgttatttcataataatattaactattatttgtaatgaccgcatactagaatatggattagtaaaggcaattagcgttaattattgatattttttataattatgcatgagtttattatattgtgggtcccattattagaaatgggcattagagttatcatttctcaattctggagattttattaaattctaaatgtaatatttatgttatatgcaaaatttacagtttttatatttttgcccgacgacgatggaaaatgagacgtatggccaaattagtcacatgggttagttggaacctttttatttaggagagtattcataggtgatatttgaactatcgagtttaggcggggttatggtcttggac

SEQ ID NO: 58087 - DNA, 842 bp, Cannabis sativa
acttaaataaattagattaggttattatgttattttaaaattttattaatatttgtattggatcatattagtataaaagttgaattaattgaattagtacattaagcaaaaaatgaatttgaagaatttaaaaaaattacaagaccgcgcgaagcgcagcttagttctctagtaataaataaaatattgctaataatgtcataaaatccatcacattaatctcgatattaccctttggcaagtagcaaattactaacactgccattaattcagaactgctgaaaatcaaaatacatttaataataatatctaataattccaaaattaactaatatcttttaatttaaattatactaaaatttctttaaaaaaaccaaatattattgaattagaaaaaatcttaaattttttaagttataacactaattcctaaattttcttatatcattaagaaaattaagtctatttaacttgaaaaaaatatatcacaacatgaaaatatgaataaattgttgagttttattttgtttgaaaattttaatttctcacgaaaatatggaacaattaatcaaattaccctaaataattaaaggcaagctataaaaataggcgcaaaaaacataggcatcaaattaagctaacaaaattgtagcgcaacaaatcctcacaaagtataaatattaattcgctaactatttgactaataacaataataataataattacttacaataatgaaaataataatagaaataaatataaaaattatcaatatcaatatatcaatataaaggaatgcacaagagagtttaggtggttttttacttttttttcttcctatt

SEQ ID NO: 58088 - DNA, 1206 bp, Cannabis sativa
cttagcactgcagacggcttcattgtaatatttggagttaaatagctctcggaactcttcccaagtcataacagtgacgtcccgagtgagggttattaaatcccactacacgaattccaaccacccctataaaattcaactcccaaaaattcagaattcgctcaatcactgtgagccactgctcagccttcatcacatatggacctcccagaaacactggaggttcttgcttacagaatctttcatataactgctccatacggttgccagcaacaggttgttcttctagcaccgctggagctacagtggcctaagcttgatgtggaggcacggcaggaggaccctgctaccttaacctcagattttcttcttcttgttggcggattcgatcttgcatctccgcaaatctctgctcccaatccaaatgagcttgtggtggatttagaggacaaccaccctgagctctcccaaggccacggccgcgaccacggggattctagggaatttaatttccctgaccagcgccggtctcaaccatattaccctgacttcttgtattccgttgggcgtccattttataggacttagcctacaaacccataagccaggctggttagacaacgatcacaaaacataataccgctcttatggacttaaaggcaacacaattaaaaaataattgtaatctaatatgctccctatcatacattaataatcacatataatactaaacaagtatgggcttactgaaccgtgaaccgagatttctttgacgaagattgtacatgtcttgacaaccttcggtagacaaacatgccggctctgataccaaaattgtaatgccctaatgctaaggcacgctacagtactttttcattacagtgctatctttgctaatcaaacatttttctcaaaaaacgtgtcaaattaaaacttttatattagatattaaattttataattaacaaaattatttacaaatatcgggatcctattttcaaactttaaaacacaatattccaaaatacataatttacaggtcacacagcgactacaaaatataaccccagatgtcacgagaccaaacactccagcgcgggttgcctgaacatgtacaacctcatcccagctcaggctcactcctgttcagcttttgcatttccattacctacacatggaagcacaactgtgagtcgacagactcag

SEQ ID NO: 58089 - DNA, 1182 bp, Cannabis sativa
ttgtcgccattggttgccagattgcggttataaaataaaaatttaaaccttaatatacagtacatatttatgtattttgtgttttattgaatacgtatgtgtgtatacatattttgtagttgtattgtatttataaaagtatttgaattgtattgtatatattctaagtattgtatatgtattgtgaatgagaatgagattggagatttttaattagtttaaaaattaagtttttaaaattttgttagtgagagatataatttattatatatgaatatgcaaatttttttaaaaatagatgagaaaaaatagctcatttgtttattttttaatttacttattgaatttaattttttttcgtattcctatttatgtgtttttatattttttactaattagtaactagttatttttttttattcatattcatatatttactaactagttatatcatttattagtaactagttactcataaatgatataattagtaagtagttaaataattaaattttaattttgtggtatattaatatactgtagattgtgagctaattttcaaggttctaaataatttagtgttgattggattttagctagttataggtatattaactaacttttgttattaattaattatcaatgcttagtggagttttaatatcttaaatattaatccttagtgaattaggttttgagatatattatactacgatcggatgggtagaataatatgcatgttttgaatatcttaaatattcaacagtagtgaagtaggttatgtgaatacatatactgcagtcggatgggtggataattgttgtattgttaatgttatttggtttgttttgtattattttatttatcttgtttgttatttttggcatgttcaaaattttcgggaacgtcaaactatagtagttatgttgtctaaacttcggtagaattaggataaattttactaaaaataaatatatattaaaggaaaagtgttatgcataacacaaataattagttactagttgtaagaaactagttagttaattacaacttatataactagtaactatttacaattagttactagctatcatgccaatattttaaatgagtaacataataacataatctaaactaatacaagaattagagtagtatataaatattaaatagttgtgagaa

SEQ ID NO: 58090 - DNA, 1561 bp, Cannabis sativa
ccatgccgatggaggttgtttttgtcgggttcgtcggctgtatgggtacctctcgtaactcctcaaccgtgggtgactgttctttcgccgaggtcgaagagttaattaattgctataacttgtttttactcctcaaggatgaggtgtaacactcgcggcccctaattgatcccctcgaatctcccttacctcacccttgcaggggaatttgaacacttgatggtaggacgatgcaaccgccttcattgcatggatccacggtctgccaaggatggcattgtaggccgatgggcagtccacaactaaaaatttcactgacttgttaactccattcgcatagacgggcagttagacgaaactttgagcaacaacgctttccctcgagaaccctactagtgtgacctgggtgtcctgggcttttaggtcctcgatctccatttctttcagaactccagcaaataaaatgttggctgagctcccattatcgacgagcatgcatttcattcgtatgtgggctacatctaaagtgatgacaagagcgtcgtcgtgggggtgctccagctcggaggcttcccattggttgaacgataggagtacgtccgggccatcattgtcaattaccgccattgcccttaccaactgaatctgacgggtgtgggccattgaagctcgtattgagttcccgcttaggtctgaccctcctgagattacgttcacggtcttcttaatgtatggtggaagggattgatctcagcctttgtcacttccttgctgcatgtggagcgttgaatccgaggctaggcaatcctggaagaatccttccctcaccagccggttgacctcaatttttaacttcctgcattcacaagttgcatggccatgttctccgttaaaagcgcaataccgtcccttgtccctcttgccagggtcagtggccatcttagggggccactttgtctctattaatccccgcagccatctcatcatctcagtcaaagtaatggtcatctgaggtagtccctcctctccgcgttgagcgttcggctgccccatcgcccccatacttgccataactgctcctcaggtattcctttcgttaaccgagcggttgtcagttctattatgaggccgtgcagctggcgtccgattttttgactcgaagaggaaagtatctcctaacgtcgaggtttcacgcgacacctcctcactatgtcgtttctcttctacttccaaagccacgtatcctcttgccatagttaaggcccttgttagggacaggccaggttccactattatcgccttctttaattctgagccatgtaacaatccttgcattaatgctttcatcggcaccaaatcagtgcatttcgggatactgacgtactcttcactaaatctgttgataaatttttccagaggttcatcaaaccgctggcgtatcaacattaggtctgtatccacttttgcagtccgcacagttattgcaaagtttgtctggaaccttaagatgagatcttgatacgagttcactatggcggacggcaggttgtggaaccagcgt

SEQ ID NO: 58091 - DNA, 1735 bp, Cannabis sativa
  modified_base (343)..(344): a, c, t, g, unknown or other
gattgggaagtgacattgttgaggtcaccaacaatacaccaaggcagagaactcctatccttaagctcacgaatttggtcccaggtatgtcgtcgaaggctacagtttggctcaccgtatataccagttagccgccattgaatgccattttctccagcaatagaaacatcaataaaattcaccccataacccagcaactgaacatcactactctgcctccataacatagcaacacctccacttttccccctggcatcaaccgagaaaacaccttcaaaacccaatgatacccgaactcgttccaatgtaacagctcttgacaaagtctcacaaagaaacacanntttgggctgcttttggataactaaatccttaatgaattgaaaagcccatgggttcccaagcccatggcaattctaagacaatatgctcataatgtctggtgggcctgaacaccaaggcccacctgtaatccattttttgaattagcatccaacttgtctccaaatcccacgttatcatcatccagatcagtagactcattcaaagtttcctttcccatacgacgtcttttatttctacaatcagcattgagtcatcattttgaccttccaagtatatcttatcatcagctttctttccataatcatcacccatatcatcaccatgattctctccagaaatagcaccttgattgactcccaaacgtatccctgaattgactccatctgatcgcaccatcactggagaattaatgtccatagcctcggcctgattccgatgccgtccgccaccattagccactccttcatcatcatcacggttggaacgaagccattgagcccggatgaggtagtttttcttctttgtattggctttcatccattctctataaggtttaatgttcggatcgaaatgaggatcaaacctcctgggacaaaatctatcaccatgaccaatgaacccacaaataaaacagaaagtgggaacatattcatacttaaaggtggtccaaatccatgttccatcttgtttaatcaacttcatacgacacttcagaggcttgttaatgtcaactgtcacccgaactcgaaggtaatcacgccatataccaataaagttcttcgggtctgacttgatgaatgttcccacgtagtttccagtgtgtttaacaacccattccgacataaaaccatacttcaaatcatgtaactgaacccacatatctaattcatgcaacggaaccactctaggatcctcccctcttttcaatcgatgaatcacaagcagcattctattaaacgtccatggacttccatcgataaccgtttgtatatcaatttcatggtaaaactgaaaaagatacctattagtatctaattccttaacatagactcccttcctcggctgccaaagcgaggccaatgtatgccgcatagcatcaaaatcaaatgtcctatttgtgaggaatttactcaccaggcaccatctatcatcaaacgcttgagcctccccttcctgatcatcagtaatcagaactccttcttcttctccctcaatatccaagtgtgcatactgatccatccagccaccatcttgagaactactcgaagccatagagacgaaaccaaagaacaaaaaaactttcaaaacatgtcaccggacaagacctttgtcgtctcttatttgttattagtttctctaatacccatattagtacaacaattgttgtggt

SEQ ID NO: 58092 - DNA, 1191 bp, Cannabis sativa
tcctcgaaatcgaatctaaacatctttaactactgagttctctaattggacttcactttccaggtttcttccccacttggcttatattatgaaatctagtgtcctactctaaaaaaaactcattcatcatctgatgtatctaattgtaggtctgtagtactacattccctacataagtcattttatacctacccaacattaatacatgactaacaccatgtatttctgataatgctgggaataaatttagatagtatgctacctgtctatttaatctcaagtcttaccttgtctcttcttctgaaatatgtcatacctcaagttggtgagactcgtgaggtaacacctccaacctacactttggatccatataacttttctaactactagaaaagtatcctttcatttttattctcattataatatcattagctgttgaagtgattttggaaaaacaacactttatatcatatttttcacaaggagtcacccctataataatttactaatcatagttatagtagaaatccaattccataatcccttggaatttgtaacaccatttcataagtatcttccaaaatctgcgccacctctatggactggccatctattaaagacatagagttgtaccaaaatctgtctcatacttgtggttctttagagattctcttttaacttagaagtgaactcgtaatctgttcataacaatgaacctcatcatttcaagttgatcgactatcttttgaatttaaactcatatgcactgcttcgtcctgaacttaacttccactaaattggaaggacgttaactttatgagatgattcaccataacatgagtgaatctttgaactctgtggtcttccaataaaataccatgtatgcttctaatagattttcttgaagtattcaatcactacatttgtttacaacaactttacacataactcattcctgtcaaccattaactttgaagaaatcattaaatactgacttcccatgtcaaggcgtcaactataatactgacttccctaaaatgacaatacatcatataatcataatccttgattatctctaactaccctcttaatcttatattaaatacttcttgatgaagaattacttgagactcttgtagtaagtataaacttgctatttccctctgtcgtaatgaaactacgaaaccaact

SEQ ID NO: 58093 - DNA, 1359 bp, Cannabis sativa
aaataattttcataattaaatcttaattaactactaatttccaaatttaagctgcacggtctttacaggcttcataccaaggcttagaacaaggaattcataagcctcttatataatgcgctattgggtgagcagcatggatgtgagacatctttgtttttattgccttgtattttgcagaatttgtagtataaggattaaatggaatcgttgacaaggcagtcagttcttgcgaaattcactgtaacagtagaagaatatatcccttttttcctaaggtaatagaagatagtgttcatatgctgaaacaactcaataaagaaacataaaagataaagtgaacaaatattacaaaagctcaataacagtagctaaacttaaaaacaatgataaaacagctataaaataactataaaaaaatttaaaaggaaaaagaaatattaccgagtcattgataaacatgtcacaacaagacaaatgataaaacccggttttatcttcaacataatctacacctaatctgaacctcagagaaattttcttcgcaccatcctcataaacattgtaaggcctatataaaaaaacgacaaagaaacaatattgaattcaaaaaattggcaaaataaaatgaaataaaaaaataaaaatagaataaagaaaataatcaccttggatattttagcaaccctttgctaatccaagcatcaaacttagcctcgatttcaggaaagatgggatcggaaaatgaatccttaagagcgtaaagacccttcatataagtaaccatcttaaaatccctctcatctcttcgagattgagaacctgaggaaattacctccattagagtgctgctcacatcagccgacccaaaatcaacaaaaggcgatttcaatatcggggcacgctttctcttatccaatagaggagtataagtaacagtgtcatccgcttcttcatcagaagcaatggcatctgccttttcaacaacaacatttggagtgaaatctggaacttgaaatagaaaatttaaaaatcaaaaaaagtaaaagttgcaaaattaacataaaactatctaacaactaaaaaaaactgacatgctaacacaacctaacaaagaataaaatgtacacttagattgattttagcaacagcctttaaaccagccaacacaacttgctcatcatcaacttcaagctggcttaaaccattgaaaaaatcatctccggttacaccggactctttggccttaacattttcaacatccttggtcctctcttcaatgcctgcaacaacctcagtttgaatcacatcaacagcaggaacatcaccaacaaccttatcaactccagaagcatcacc

SEQ ID NO: 58094 - DNA, 1554 bp, Cannabis sativa
ttgttaattaatttttgaaattcctaaggactaagcaaaagagtttaaaatcctaattcaattgagaatgcttgaagaacaaatgcaattgcctaagaatatcaaaattgatgcccatgaggtagtttcaagcaaaacgggctcagttcacgtcattaagtcagcttcactcaagtgtaaagttaccggcgcgtcacacctaccatcaaaatcaatagcatctacctgaacctcgtgtaaattagtaggagccaaaataagcgataaacagtcatctttcaagccacgcttaataaccttttcaggattcttggactaaactttaagcactccatatatatcttgaaaagaaacttttttgaaattatttttgattgcctgtgaagaaatggatgtaaccccatgcatgacatgcatgagagtcacatgagaagaacccaaccatccatcaccacgtcagaccttaacctaatgacctccgaattagccacaacactcaccccgataacactgtcctccttccagcccctgaatcaacatatgccaatctagtttttaatgcacaatgagtgtcaaaatccccactgtcaagtaataaataattgttatcaatgggtctactcaaagtgtgaacattagcactatttttagaaatagaatcaacacctctcccattacaaggcaagtataaatctttggtttccaaagtagaagaagaattattgtcaataacaacaaccacacttgacacgggatgccatttaactgtatcaccaaccatgacacactttccttttttagaattcgacactggagattgtttgaatcccgacgcaccactgccagcaaccctacccctagtcgagagacaactgtcgggctagctcgacttccccacatgcaccacatcaccagacgaagacacccaaaaatcgcatccacgagactttttaaaaattgggccagttatcttgtcgagatacagaacccgaatccaatcgccatacctcaattgatctttgctaccgatagacttcgacttcaataggcagttcttgatcgggtggcctaagattccacaaaaataacataaatctaggagcctctcataccgaattgacttctgaatcaaaggcttatttggcgccaaataatttttaatcacacgtgctagaggtttccaaatatcaacactcacgcaaaccttcatgaacacaccatggcacattccattcggaccacataacacctccaacacctcaccaatcgtcttccccaactaaaaaccccacgacttattcatacaacacattgccaccttatgaatttagatccaaaatggagcataatcaaagaccatctcggccggatccaatacgtcatcatgttctttaagcgtaagtaggcaatgcttaaagacctaaggaccaccctcaagcacatgcttacgatctataatttgaatcaaattaaggaacatgatttgatacatgtcaaagttgagagattaaaaatcctaattaatttaaattttttacaaaaaatagtactatg

SEQ ID NO: 58095 - DNA, 980 bp, Cannabis sativa
ctgatccaatggctaaaaaaaacgtaaccatgatggttacaataaaaatgtaaccattagaacctcctccttatgtctatatatgcaaaacttagctttcatcacatataattataattgttatatgtttaaagcaaaagtccttttctttttcatttcatttgataatattgcatgatttaattgaccaccctaattaatattaatattaatatgtttattatttatgtatctttcaattagagcatgcaattaatatatggctatataactagctatagcactacgttttaatttccatttcacgtacatttcctataaatatagatatatcatattatatcttaattattaccataaaaatgaacaatgtttgtaagtttcgtgtcaaatatattgcactatttacaaacaaaaattcaaaacaaaatgagtcattcatatgtgtaaatgatatacgttataattatatatgtggcattgaatactttttattaattatttataatgtcaataaaaaaggaaattacatatatatatatatataattttttaatttttatttttacagtttgaattgctccgttgtttgtttcgatagttttaacgtgagttgctatgtgaatttggattgcgatttaatttactttgttgattgctatgtgaattttcgtacaaatacaaaaaaaaaaactactttaaagtgtaaaaaaaaaatctcataaaaaatttaattttaataatattttttttcgaaacagattttataatatttataatattaattaatgagtaaaataatttataatatttttctacaaaattttttcgactttattatgttttgtaaaaattattgattaaactctctattattaaatgataaattgaacattatattttttaaaatgatacaaaatagtacaataaatttaatttttatcaaaataaaatttaataattaatgtgacctaaaaaaa

SEQ ID NO: 58096 - DNA, 1451 bp, Cannabis sativa
  modified_base (848)..(849): a, c, t, g, unknown or other
tttaaagaaatttacataaagtaccaaaaattgcattttttttttttttttacattttttttagattttctttgttaacatttttacaaatttatgattttttaaaaggaagacaacattacgttgctgcaagattatatatatatatatatattatattttcacactgttttataattttttttttttttttaactcaaaaattataatttttttaaaacaagtaaaaacaatggtatgtaagaagaaaaaaaaagtcagtaaaattgtaaaaaaaaaaaatcaaaattccataaaacataaatttttttgttggtttgaaaagaattagcatatttggtaaattggtaataatgtaagtgacgtacctctaaacatgtctacaactcgtaagatgtgcaacaaactgcatacattaaatttagtggagaatttttatgtacttgaagtcagtgacctcaataatgaaacaaatactacacaaaaccataaaagtgcctcttcctttaattaaagggatcaattatttatatcttctcaacaaaaaaaataaaaaataataataatatgaggagtaatactgttaacctcttgttataacatcttagttaactttcatacctgaaaacatatatcgaaattatttttttcaattttttttacgagagtgttcgttatgcttataatattatatctctgtaaatttttaaatagtttacagtatcgaaaatacgtttgaagttttttgaacacgcgtggtaaactgaaatatcaagaactctatttttggtactgtaaactattctgaatttttaaaatatttacagggatgatactgtaactataannaataccgctatgaaaaaaattaaaaaaaaatattttggcatgtaatttcaaacgtgaaaattgaataagagattgtaatagtaagttgtaattagtatttttcttatttatttattattaaattaactttaaggtttcaagaaataaaaaaataaataaataaattttttaaattgtttttctagtaattttttttttcaagtcttatgaacctaatgttagaaaaaaaaagatcttaaaaggaaaaagaggttgagagaacttttgatgtcgggcaacgaaaaacggtcctgacaaatatatgatgtgtgctcaataaaatgtaaaagaatattactttgttaaaaaaaatagtatgacaaaaatattataattatgttttaaatttacgtacttaattgtttaattaatattgtattgaagatgagttaaataaaataaattaaaaatccaatcattgtgtacgtcatatatagttttgttccaatttgtgggaatagatagaacaccaattaaccgaaaccgaataggcaatctcccaaactcatctgatatattctgatcaacacactctttcataaactctacatattgtccttata

SEQ ID NO: 58097 - DNA, 937 bp, Cannabis sativa
ggaagagttccaggaattattcaatgcgcaaagtaatataatgaagtagttttcgtagcgcaaagagaaaagaatttacttagttgactcagaaagataatatgaccgtcactaagtatacatctcagtttgataggttggccaggttggcctcgagaattgtgccaactgactttagtaagaaagaaaatatctggatgggttgaaccctaaggttaaacacaaccttatgatcaccatcgatgataacacctcctatgatgatatggtgggaaaagcactgcgagttgagggggcagttgagtgcattcaggagtccggagggactcgggttgttggtggggccactactcctcctacctttggttatggtaggggtggtagtgactcgactgctgatcaaaacagaaaggcaccatccgcacctggtgggtcaaatcagaacaagagagtatgaggaacaagggtcgaggcaaccgttaggtggttccgaaacctgatatacttacccagaatgtcccaactataagaagcatcatctaggttagtgtaaagggcgaggatgtttcagtgtggtttgcctggacactacaagagagattgtgtgcaacttaagaaagaagagcagaagacagtagtaaagcctgctccattaagggtgtttgttctaactcaggctgatgtagaagctagcccctcagttgttacatgtcagctcttggtcaacaactcttatttctctgtattgtttgactctggggccactcattcatatgtggcggccaaaatttttgataaattgggtaaactatttgatagttatgataatggctttggaactctaatgcatagcagagaattagttatctccaaaaggaagattaggcctatgccgatcagaattgaggatagagagttgagtgctgatttagtagaa

SEQ ID NO: 58098 - DNA, 2954 bp, Cannabis sativa
gttttagtcacaagtaatattttgatgtgactaaaagtcacatttaatcacaacaaaattatgttgtgactaaaaaattgtcactaaaagtaacattttttgtgtgtattataacaaatttattagttatattaaacttatttattttatatatataattgaattgcattagattagatttaattttattattatattatttaaattaatgattatgtaataacaattctaataaaataaacatagatgttactaatacttagtttatatatatttttatatatacatatgataacaatttatttattatgtatcgaaaacatcaaaagaaaaagtatttatgagtaagaatcacccttatgtaatggtattaagtaaatattataagtagtaagaaacattgttaatatacatgtaacaatttttactaattcgttctcattattacatgcagtcaacaactctcaagtgtggcagtgtgattgtggtgaccctatttgaccatcgtataagtgacggctactcagctagcatgtttttagtatcatgggctgaatttgtccggtctaaacctctcacctataataatccgccctcatttcgccgatctttactaaaccctagccgcaactttggtagcattgacacctcggtttatgacaagtatgttaccgttgtcactactccagaaaacacctcgcggccaagaaataatgacaatcctattaatcgcctctactatattaaagctgaacatatcaacaacctccaaaccctagcttgcaaaaacaacaacaacaataacataaccaagattgagtcttttagtgtttttttatggaagttgattgccaaatcttctactagtactgatgttgaaaagcaatgtaaagtgggcattgttgttgatggtcggaagctattaggaagaggcgatggaaaagaggatcataacgcgatgagtaacttcttcggaaatgtgatatccattccaaactggggaaaaagaatttgtgatctcaataaagagccactcaatgaggttgctagagatgttcacaagtctttaaaaggagttgtgatgaaggagcatttttcgggtttgatagattgggtcgaggccattcgtccaaagtcaggaatgttcagattatcaagctacaaaatagatgatggaccatctattatggtctcatccgggctacgattttcaactggagttgttgattttgggtggggtagacccattttggggacatttcattttccaatgggaatgcgaaaccttaccaaaggttcctacgtatacccggcattgagtccaattggcaatggagattgggtggtgtatatgcacttatttaagtcacaattggagttcatagacaaagaagcttccaattttttcaagccattaacttttgattaccttaggtcaatcatggaccagctgccttacctgcaaaatgatgatataagcataaagattaaaatataacatcatataagtgatcatgcatatatataaatgtatatactaaattagtatttgtaacatataatgtatatttgcttaaaattgtattagaattgttattatctaattattaatttaaatatgatgataataattgtaagaactcggttttgaccgagtcaaaaaggaaaaaaaatatgtaatataattaaataaaataaaataaataaatatttataatataaataacttttttttccatcagcactctctctctttctttcttcctctttctctttttctttctttatcttcaaagcttcaaagaagccataaccaccatcactaccactttctggcgaccactctctggccaccacctgactccacgcgccggaccgaaccccctggtgccgacgacctcaacccccaagaagtgtcgcccttttcgccgacgttagcccgtaatcgcaattcaaagtttggaggtttaaagtttgaatggaatttttagtcacctctagtgtccgtttggcgagtcgtcttcaccactagactcagctcgttgaggagaacaacctacactaaaccatctgacaccacgcgtcagaccaaacccccaggtgccgacgacctcaacccccgcgcagtgtcaccccttttaccgtcgttagctcgtaatcgcaattcaaagtttggaggttcaaagtttgaacggatttttcgaccacctctggtgtccgtttagcgagtcgtcttcaccactagactcagctcatcgaagaaaacaacttacactaaaccattttcccagatcgctactttttccggtgatatttttgtagctctaccccttttcggtgactttttggccaaatcgtgtactgttttgaaaaacggtctgcatgggtgtgatctacttgtcgagatagtcattttgatatatactacccctatttttagcgatgtttccggtaaaccaatttttaccaccaccaatagttgatgtgcaccacttaggtaaggttttggaactccaaactttaatatagtcatattatatgtccttggactcgattttgaatgtagaatgcaatgattataattattagctagctatttgatggtataggtgaaattaatatctaagattgactaatgccttcgtaagtggaatgaacgatcaccacacacctaccggagtcaaatcagtctagggggtatatacactacaacatttttggtcattagcgacagattttttagcggccgaccctctccgccgctaataacaggggtattagcagcgaaccacaatgtccgccactaatagtggccgttttttttttaagaaaatattattagcggcgggctgtccgccgctaataaacgggcatgatttttcccgctcatacagtttgaatactattagcgggggcattagcagcgggccccgccgctaatagtaatttttttt

SEQ ID NO: 58099 - DNA, 876 bp, Cannabis sativa
gagtatgatgtacggttcaataaaactcaatgcctagtgtctctagctgggagtgaagtgttagttggaaatcgcacagctgatcattgttatgctctaggaagtcagatgacatgtcatcgaaccttcatggacaaactcgatttatggcattacaggctgggccacttaaacttcagggatcttaaaaggatcgtcaagctgaaagctgttcgtggaatccctgagcttgcaatgagtagagatcgaatgtgtggcccatgtcaacaaggaaaacaaactcgatcatcgcaccctcctatcaatggtctgttgacaactcgagtattagaattgctacatgtggacttaatggggccgatgcaaactgaaagcatagctggaaagagatacgtcatggtatgtgttgacgatttctcacgattttcttgggtcaactttctgaaagaaaaatctgacacgtttggtgcattctcatccctgtgtctaaaattgcaaaatgagcaaaactcaaccattggcaaagtgtttcgtatcaggagtgaccatgggaaggaattcgagaactcaatctttgctcaattttgtgataaactgggcattagtcatgagtttgctgctcctaaaacccctcagcagaatggtgtagtagaaaggaaaaatcgtactcttcaagaaatggctcgtgtcatgttatgtgctaagaatgttgctatccgattttgggctgaggcagtcaacactgcatgttacatctgcaaccgtgttcatctgcggtcaggaactactcaaacgccatatgaactgtggaaaggcaaaacaccaaggttaagtcacctacgtacatttggatgtacctgctatgtcttaaatgat

SEQ ID NO: 58100 - DNA, 826 bp, Cannabis sativa
gctccatatacttatgttatttagtgattagatatgatcaccacttttttatacacatcatactattattaattttttaaattatttttgcagaaatgactcttatttatttcttcaccatctttatggtactacttcctagtgttgtaccacaaagtcaagaagatgatagtactcaagaaaacttgagtcaaaaaactgaaattttggtcatgatgcttttaatcggagtatttttcgtaatttctatcattaaatgtatacatatattatatcacgataattttcacggtgatgaagaaaatccatccgtgcaattatctgtgcaaaatgcacctgaagataatgcaccgaccgtggatttacctacataaaatgcactggttgaagattcacctgcacaaaatgaacccgaagatattatacccgtacttactatagacgcttttcctgaagacaagtatacgtgtggagatcatacaacatctgaaggagaagaatgcccaatatgcttagaggaatacgaagagggagcgaccgtaagaaagtttccttgcggtcatgtatttcaccctgagtgtatgcaaaatatattaaataatagacttaagaagtgtcctaattgtagatttatgtttgcttagtacttattctatataagtttttaaaataaatataatttagttcaaattaataatatattagtgtatgttttataatttttcaaatagtgtcataaaatcatatagtttatcttttacagaactccattttatttatttatttattttgagtaaataattgatattattaataataataataa

SEQ ID NO: 58101 - DNA, 1906 bp, Cannabis sativa
tggctttgaacaaaaataagagactatcatcagcgaagagaaggtgtgagaccgatggagtagtacgcgtgatacatagccctttcaaatgcctttgagattcttcaaattgtagtagacgtgaaagaccctcagaacaaataagaaatagatatggggataatggatctccctgtcgtaaacctcgggaaggttggacatgaccaacaacttctccattgagtgagaaagagaaagaacttgtagtaataccgttcataatcaaagtcacccaccatggagcaaaacccattttaaacatgaccgcttcaaggtatttccattcaaccctgtcaaaggccttactcatatccaatttgagtgccgaatatccaattcttccttgagtcttatgcctaatgtgatggataagctcaaaagcaaccaaaatattatcagtaatgagtctgttggagaggaaagcagattgtgtttcagaaatcacaaatggaaggactttctggaatctatagtctttgagataagtttgtagatgacattacacaaacttataggacgatagtcatgcatatccgaagggttggccactttcggtatcaaggttatgatagacttattcaatttcgacatatcctaaccatcatttagaacaccaagcacaacttgtgtaacagagtttccaactatattccaataattttggtagaacatagcggacattccatcacttctaggacttttatcggggctcatagactgcaacgctgcaaaaacttcagcacttgaaaatggttccacaagtgactggttcattgttgaagtaattgttgaaggaattgcatttaacaattgttgtagagattctcaatgaattccctctgtagcaaataaacttgaataataggagcaaatcacatctgttaattcatccttattgctaacagtcataccaagatgattttttaacgatttgatggagttcttagccttccttgaagaggcatgggcatgaaaaaatttagtattctgatccccacattgcagccagtccacccgtgatctttgatgccaatattcttcctcctttgctaaaagttcatcaaggatagcctctaattgttgtagtcgattcacaccagcaagtgtgcggacagcagcatcatttaatgctgccactgatttctgcatctttgaaatgtctctcctcatcgtgccaaatttgtgagtgtgccattgctgaagtgcatcagtgcaggaggcaaggttgagttgaaattgattaatatcacttgaaggaatagctgaccaattatcacggataatgacagcagcttcctcttccttaagccacattttttcaaaacaaaaccttgtcttttttggcaattttctccttgtttgtattgatagccaagacgtcaacagctatagctcgatggtccgaagaaaagaaatccaattgtgtagttgttaaaggttgaaagttggtgttccaagaatcatttgtaaaacatcaatccaaacgttccttaattgtatccaccttgtgtcgacctttaatccaagtgaaagggtcaccagtaaaaggtaactcatgtaaatgacaatgatccaacacatgacgaaactcatccatttgttgttcacttcgcaaactccccccttgtttattatggttataaaggatttcattgaaatcccctatgaccatccaaggaagcaaaggagccatgtctttgagtcttttaagaagagtccaagtatgtacgcgattttgagtagcaggagccccataaaaagcagaaaagtgccaacttgaaccattagggaaacccatataacagtcaaaaacattggaattaaagttttgcaaagttacaacaacatcatctttccataacaacat

SEQ ID NO: 58102 - DNA, 1571 bp, Cannabis sativa
  modified_base (1518)..(1520): a, c, t, g, unknown or other
aggtccatgtttgggtctgggatcaggtcccgaatcccaatccaagttctgaggcccaagttctggtcctagtttgggggcccaattcttgggtttgggtcccccatctatattcaggtcctaggtcccggtccaggtccaagttcgtgttctggttccagttcgggtgtcgactcccggtctaagaccacgtcacgtcttgggttcgggtcacagttcgggtcccagtcctagtgtgggtccaagttttgggtcccaggtctgagcctggttcttaggtccttggtccggccctagcttttgggtctgggtccgggtcctggtctgggtccaggtccgatcttggtttaggtcccaagtcataggtcccggtgtgggtccaagtctcgacatgggttctggtgtgagtttggctctggatcctggtctgggttcaggtccgggtataggtacagatttgggtccgagtactggattcaaacactgactacgggttaggtcgaaaccttaagtccagattcggattttggtcttgttctagttggactcccgatagtaaggtccttggttttgggtctagggtcgggtcccgtatcttgattctggggtcgagttttgggtctcactgccggttttgggacctagttttaggtccaactcccccatctaggtctggatccttggtctaggtttgggtctaggttcaggttttggggccaacttccccatctaggtacagatcataggtcccggtctaggtccagattcaggttcgggtttggatactgagttttggttcgagtctaggttctagtacgggtttgagtttgagtttgggtccaggtcctggtctgagtccaggtccttattcaggtcgaggtcggggtctcgatctggatcccagtcaaggtctaggtcctaaaccaggtttttgtctaggtttgggtccgggtttatgtccttagtctgggtcaaggttcgagtctggatccggttctgggtctgggtcctaggttccgatctcagtgtgggtatgggtctgggcccgtgtcgaggttagggtttagggtttagggttttcagtttagtgtttagggatttagggattagggtttagggctttgggtttaggggtaagtgtaaagagtttaggatttagggtttaaggtttacggtttagggtagggtccgcttccagttccggttccaattttgtgtcacatggtacgatttaaggttcgggtgcgggtctgggtccgagtactggtttgggtctaggtctgtgtttgggttcaggtccaagtcctggtcccaaatccaaacgccaaccacatgtcgagtccagttcgaattctggtcagaaaaaaaaatatttttttattatttatttattttcgaaattattaaattaaattaaattaatttaaaattaaataaaccctatatccaactatccaacttgttgaagatgtataagttttatattgtttgattgtaaaacaagttttataaaacctnnnattgcttgatctaaattgccatagttaacttgttgacaaatttaatgatct

SEQ ID NO: 58103 - DNA, 1181 bp, Cannabis sativa
tcccatacctacacagtctctgaatcatcccacttgaccttccccaggcggtgtgagattgcacagcttacccggtatatccccttacggatcacgggactactgactgtcacaatacatattgagaaatactattcattgctttaaaagaaaatataaaataggtcacttgatgtatgccatttttaaccaatctcttctctattttagagaaaagctcattttgaagaagctattgtgagtgctctaagagctaaattatttagctaagaacactcacaagagcttctctattctattttttaaaatacgtcaccaaaattttaatttttttattttacctcacacatttacattataccatacatcaatttttttataattttctctaaaatatttaaataatatatttatagtacacacaaataataaaatattatatattacataatatttatttatttttacacttacaattaaataaatacattataaaaattataactaagtactaaaactaagataactcttagctacatttagctgaacactattcataaggtaatttttttagttattttagctcatctattggatgtgattttttgaccttttttttaactctcaactattttttttacctcaaacttttatattatatcatacatcagcttctctattttttctctatatcatttaaatattatattattaatatattttattcattttatattaataattcatatacttatacacatatattaaaaagttaaagaaaatattattataatatatttagctcaatgaatagttatctctacatttagctaagcactattcattgagctaaaaaatatgtaaaatagctaaggtttacatcacttgttggaagctcaattttgttattttttcctctataatttaaagattgagctattttagctcatctattgggagtactctacttgtgaatagtatttagctacatgtagagaaatactatttattataaatattactttaatttttcaaaaaaaatttgtaatatatgtgtgtgatattaatattattgtattcatttttttaaaaaaaatgaataaaataaaggagaattaccctatatactatttttttaactcttttttttcaaatttacagtttaggtttttaaagtggtt

SEQ ID NO: 58104 - DNA, 2274 bp, Cannabis sativa
  modified_base (26)..(30): a, c, t, g, unknown or other
  modified_base (860)..(868): a, c, t, g, unknown or other
tcctttccattccattccatttcatnnnnnccaaccaaacgccaccttagagttgaggaattccaatcttattgtcaacttgaatcttgtttaattctacttatattaacttgcatcactatctcttaaactaacacaacttttaaaatttctcaatcacttacagttaactaccgttataaggtgaattgatgtaacttgtacggtagaggcaacattgctcataccaggtacccatagctaaactagaaatacccatttcctaaattctcaactaataacaattaatcaaagttcattccttgatcctgaagtttctttttttgtgtttgggagaaatcttgataatcttttcaaacacatccagaaatgtacatacctcaagtctatatatattttttgttttattgacaaacccttggtacgaactaccgaactaacttatagtgaatctcccattgatgatgctgattcatcaacttctgagactctcgtgttctttttccatcattactactaaggtttcactccctggttcatacgctatcattgcttccttgcaatcatcactatcttcatacttggttaaccactctaaaatttattttacactaaattatataattttttgtttagtaaacaacctactttgtgatctaatattcaccaatcactcaaatacatgtccaataaattgcatctcaattcataaactttttcccattctgggtgagtgtgcctttctataattgcttaataaagtaatcttttcccaaaattttaatggtctccttacataccatattgactatctagtcaattatgaactactctctatcattaccgtatcaccttaagtnnnnnnnnnaatcttctttaccttagtgataccactactcttcctaacattcttttatacattacctcggtaacgtccccagttcaagcttccactaggcccttattctcatgaaatgatggctcttatacacgagtgcatcactccagctgcttcctagactgacgactggcccccacggacaaatcctagtgtttctaacgtgctttgctctaactcgcacgcttcatggggaaacttcctaaatgaaatcaccctaagttgaggacactcaaccatggagttccctcatggtgaggtaccaaaacaagataattcttgttaacataggtagttccacgcctacataatctcaaaattattacacaattgctgccttcaattcacctaggattccagacaatactcgtaaattgtcccactcttgctaattctagatcatacctaaacaaaatattttattatttgaatcaattatattgatgcctccattaactactcatgtcctatattccacttgggaatactagcaaatttaactcatattgttatttctctaatctgtctaccctgtcagatgaactaccactaaataacatacagacacaatccattaagagattttgatgttaccctaattgagagtacgatgtttaataccaatataaattgcccataaattctaacttaagtcgaccgaaggagcgatattcgcgtccccttgaatcataactgacacttgggcaggaccagtacacttttttttaacatccgtacttcttaactgtggataggttctttttagatgacccactaccccacaataacaagatttggctctacattagcccaaatggcacctttttgtattttgaacactcaagataaggtcgccattacttattctcaacttgactgctatttaggtcaccctagaatctttttgttctatccaataattggtggttcatttagtttttgcttcttgatctactagtaagttggcttcatatattccattacatctagtggtacaacaagaagtatcggtagtacaagaacagacacaagatgagcctattgttcttttaaatctcatatatgtttttccttgttgtctaaccatatattgcatagcagaatttacatgttcccaacattatgacaataaagaattctcttccttaccgttttccctgagcccaaatagctcgctaattagactatttgattgcccttactgcataattattacacatttgtccacatcttccaaccatttaaaactcagatggatagcaatattaatatgcatataccatacacatattcttatcaaaattatcactatgctacttttccaacatatttataatagcctaggcaagtaatttaatagcaaataatataaacac

SEQ ID NO: 58105 - DNA, 1316 bp, Cannabis sativa
  modified_base (969)..(969): a, c, t, g, unknown or other
atattgcaaaaatgggaaaaactagggttcccaaaactgccccaactggtagaccggttgcccaactggaattttggttctgtggggtttcttggggaccagctggtcgacggttcctacaggtccccctaaactggaatttcggttcagtgtaggaaccacacaaaattccactacaatctcaattcaaccccaaactctaccaaactttccagacctactatatataccataataaacatattccaagcaacaaaacaacaaaataagctcagaatcaaaatctaacattaaagagcaaagcttgagttcttaaactcaaagcttgctcaaatctcaccacagccctcaaaaccacttcaaagcaactcaactaacataaatcaaacttcagagaacatcaacaaacaccaacatcaattacaacatctaatttcatagagaaaccataggatacctaacttaaaccttaagaaatccaacaagagagagttagaacaataccttgggtttgaaatcactaagaacttgctagaaatccttgaattcagcaaataaaccaccaaccctagctggttttcttgaaggcgagagagagagtgtttttattttcttttgatttttctaacttagaataaaaggaatttttcataaagcttctaaataattgagaaataattagattattatgcttataaaatttactaaaggataaaactctaattagggcaaaataccattttgccctccacttaactgaaaagtcactaaactacctaggggtaatttggtcaattttaaaatctcgattattcttgacattctcaacgtctaactatattgaccggctatactaaaaatactaaaatgcgattctaatggccaaacgccgcgttccgatgttgctgggcacaaaacatgcaaaaatataaaattccatatgtggcatataaaatgcattctgaattnaaataaatctccataaaatgataatttataattattatttacttttcataaataaaccctaattatctgctaatttctaaattaaagttaagcggtctttacagtttaggatctcttttatacaccttgaattctattcatatcttaaggaaaaagtgtctttgttttgtaaagaagagcttgttcgactcttactttgtttatttgtgttttgtattgtcttgagtctgtattcaagtctacaaagaaaatgaacaacagtgctaccttcgggagaaggttttacaaagctttcgggagattgcttttcaagtcttgcatcgggatgaagcaagcactcttcaagg

SEQ ID NO: 58106 - DNA, 811 bp, Cannabis sativa
atacttgttagtaaatctagattttggtaaaataaatcccaacagagaccccatcttccacaagtgagcaggcttccgcagtaatactgttcaccgagtacaaatttgtccacctccaccttcgacactgatacatccttgaggcgagccattaatttctagacagttaatctcctaaacaagcatgaaggtttaatagccccaagtagagagcctaaaggcgcattagaggccagaaggtttcgatgggcgaaggagccaccgatgagagcactaggagtaacaccatcattcccgaccccaaaggctgtcacatgcttctcacgaaaggacgaaacaccaccctagagcttggaatcagcccgtgaaaagttaacatcaattttaattgacttccctttataagaatcaaacttcctcttcttcagaggtgctggaagtgtacaaactaggagagcttctttccttttcctagaaggatcgtgaatgataggttggcccacaataagctatttagattctcaagagtatttggctaatccatgttaatatcatgtaattatttcaaataggcctcgagtcaaaataatatattatattttttagaagctataaaatgtattcttaattataaataagtttttatgtaactcctaatataatataattatataaagtatatattgttataaaattaaaaaattgtagaggcaaaacgttcctagcatgttgttaaaaatcctattaatttaattttattactattttttaaaggagaataacctataaaaaaaccaattattatttcaaa

SEQ ID NO: 58107 - DNA, 1037 bp, Cannabis sativa
ctgattcagacgtcctgccttgtgctcaaagtataagtcgccgagaattcttgccatcaggcttgcttgggggttagttttggctgcgtgagaaaatgactaacactagtattatgcttcttcaccacaaacttcgacccacacaagtaatgccttcacgtccgtaaacaatgaataaccgctaggagcgctttctcctgtgttgtatactgcctttccgcttttgaaagcttatggatctcaaatgccatggggtgtccctcttgtatgagcacccctcccaaagcataatatgatgcgtccgtctgtacttcaaagggcttgcatacatttggtagggctaatgcaggatcttcaatcatgacttatttcaaacttcgaaatgcttctttgcacttatcagaccatggccacacacctttcttcaacaactttgtcaagggtgccactcttctcgaatagccctccacaaatcgtctgtagtaatcggctagaccaagaaaagagcataattatttcacattagttggggtcatccactcttggatcgcctgcaccttctccaaatccatgtggatcctcccacgttccacaacatggcccaggaacttgatactttcttgagcaatcgaacacttctcttgcttcacatacaattcttttttcctcaacttctggaacaccgctgccaagtgttcttgatgctcttctaaaggggcattgtagaccacaatataatccaagtacactaccacaaacataactaagtattcatgaaagacttcattcatgagtgtacagaatgtagctggcgcatttgtcaacctaaacagcatgacacaaaactcaaatgccctatgccgagaaacacaagttatctttggttcatccccttctacaatctgaacttgatagcagcttgatctcaaatccaactttgtgaagtatattcacttagctggtcaaacaaataaacgatcaaaggaatggggtatctgttacgcacagtcactttgttgagggcgcgatagtctatg

SEQ ID NO: 58108 - DNA, 654 bp, Cannabis sativa
ctgacaaagtggaagggcagagaggtgagacgattcgttaatggagacccaaacacctcttcaggaacagtctgcacgcttccctagacaacaaacgacgaagattcgtaggtggagtgtgctgtgatgaatggggaggaagagatgcaaacttataacaaatagctgctgggcccagctgaacaaatagttgaagaatgtttctgaattcgtacaaggcccactagcccaacaaaacaggcccacacaacattcaacccaacccacaacatacagatagagaaaaaaatgaaaccactaattgagacaaaacttgttgaaagaaaaacatgtattccacataagctcaacttaagagagagaaaaacaaaaaactatagatgcaatctcgaacacaaacttcaaaaaaaaacacaccagaccctcaattgatagacaaggaagtgtgaggactaatttaaaagacaattccttctgatgatctgaacacaacagatgtcatatgtgtgtgcaagtgtcctcatgtgagccctccaaggattagttggacaactcactctctctacttgaactgttaggacttcttctagacatttgatatatgaatatacttgtgagtgtatgatttttttttatttgaatacattcatgtta

SEQ ID NO: 58109 - DNA, 995 bp, Cannabis sativa
aggcttgctttggaccttcttttttttggtttgtttggttggagatcgcatctccaccaaagcttttatctttgcagggttggcttcgattcctcgctgattcaccatgaagtcaaggaattttcctaagcctactccaaagacacattttaggggtttgagttccattttataatgcagcaggattctaaacatgacttccaaacgagcgacatggtcttttgcatgttgagattttacgagcatatcgtcaacatacacctctattgtctctcctattagatatgagaacatcatgttaaccaacctttgatatgtagctcctgcgtttatcaaaccaaagggcattaccttataatagtacaaacctcaatctgcaatgaaagatgtatgctcctagtctggttcatacatcagaatttggttgcatcctgagtatgcattcatgaaactaaggagttcatgacctgtggtagcatcaacaagttggacaatgcttggtaaagggaagttgtccttaggacatgccttatttaaatttgtgaaatcaacgcatgtgcgccatgagccatttggctttagtacaagaacagggttcgctaacctgtttaggtagaatgactctcttatgaagccacatgccaagaggcaatctacctcttcattaattgcttggtacctcacggggtccattttgcggcgcttttgtcggactcctcgcacttttgggtcaatgttcaatcagtgacacatgacctgcggtgatattcccaccatgtctgaatgtttccatgtgaaaacatccagattctgcttgagaaaagtgacgagcttttctcgttgttgaaaggttagtttagaataaaatttttaaaactttactatgatcgaagggatcgattggtacctcaattgtttcttctgcagactgtgcaacatttgtatagtcgaggattctcgaatccaagtttggtttttcaacatgcagtatttcc

SEQ ID NO: 58110 - DNA, 1249 bp, Cannabis sativa
tactcttgttggtacttggtacccacttaacaactcttttaatggctcaaaaagaatgtcatgtgttaattcataaactttattaaaattatttaaataaatttaaaaatatgtatagttttttaagaaaaatttacaataacatatactttttttgtatctaatttacaaaaataacgttactattataaccgacgtgtcagctaaatttgatgtatctgacattttctattttttttattttcttgcattttgaaaagtaactttttggatactaatagtgttgataaaaaaccaattagtgaacttttcataaaaaaaattatttttatatcatataatttgagattgacctacatatcaattacctccaaaacttatttgtatacatcttagtaattaattaattatttttaagttatattatggtaacttataatttaaaatatatttgggtaaccttgaaaatttttttcgaaactaatgagtagcaatgtaatataataagctataagttttatatatcaattattttatatacatttttcttattttgaaaactaattagttattgtataatataatttaattaacaaaattctaaaataaatgtaaaccaaaatttaaggaaaaaaaaacagccattaatcactatattaataattaaatggtttcttattaggaaattaccaaagaacatatgcttcccactccttcaaatgtcacattaaagagtaaatcacaatactatttttttagggtcaaccgagtaatgacgtgaccagaacttatttttaaagttaacaaaatgagagagaaagatgagaaagagaagttatgtgttaaaaggaagaaaaaaaaagggttttacatggtatactgtatttgggtatttttttttacttttatactgtcatatagtagattttgcttttataatatacgatattataccgttttatagtgtgttttataagccgtatgaatcttcttattatttgtaatcgccattgatgttctcttctttttcttcattcattttttttagtttttgaaatttaaatctgtttgagagtggttggttttgagcagcttttttagttgtggggtgttgatcaattttcattttttgtttgaaacccaatttctctctaaatttttttcccttctaaccgttgtgcattttctcctataaatttctattttagttttctttttcatggctgtcacacactctaagtctacatcc

SEQ ID NO: 58111 - DNA, 1048 bp, Cannabis sativa
tctgtaatttttgcatcatttatctctaattgggatttgggttcagaaattcttggtttgtatgggatcgcaagttcagtgggacactctatctctaaatattttggacgataaacttctgaactaggttgggacattgctgcaaagagaaagcaatcccaattcttggatgaaatttatcaaaacagaagttggtaaattggagaaactcgaaaacctacgtactgcctaaactctaacatttacccagatataattcaaccctaaaattgctaaaaccagataaggagataaaggtgctaattaaggaactattgatcaaacccagaagtgcaaaattaaaagcatgtaagaaaatgaagagagaaatcacttactatttaaagctaggttttgggacaatgaatggtcctgcaatcgacggattgaatgcttgaggtcgaaaatcaaatcggacaaaactcccaagaagaatgtcaatgacaaagatggcatgcaaggttttgaaatattttgggtatggttttctgtagaaaagcttgaaaaattcccagaatttttgaaatggcaaaggtagtgaaaaggtgatccttttttcgttttatactcttgggttgatctccgttagattagggaaacaattgatccaacgggtagaatttttttaaaaaaaaagtggaaaagatggttattaaatactgatgtgcatcgaaaccaaaaaatcgccaaaatcagaggacatgcgtttcttcaaaatggattatgacaaatataccctctgtaatcatttaaaaagcacctttcattaaaaagaactttttaagggacaattattatacctacaatttggctgacacttcaaaggaggacacatgtcaatcttggagaatatgaatcaacgaatataatatcaattatgtaaaagggtattaaaatggaataactcataaaatgcggaattgataaagtatatctataactcgcttactgtatagttttacacgagataaggatgtacaaactattgactcatgcgttagcgagaagc

SEQ ID NO: 58112 - DNA, 1138 bp, Cannabis sativa
gatgttggatgtattggacttttagacactctatccaccatccgatccgatccaattggatatgtaaaaataacatcgaatccgtttcgattacaattggatatccaatatttggcggtcggttctcattggattgaatcgatttatgcacacccctaattattaatgtaaataatatatttttttttttaataaagtaaggaaatatatattacattttttttttaattctttctttatagtctatacaaacacttcaatagtactcaattgaaagtcatatatataagagagacgcctttatagtctatacaagcactttcaatattatctttttatagaaaaatcaaaagaaactctaataactactcttgttaattattattaatatttatttcttagtgaaactatttctgttatgtttgcatgcatttataagatcggctaactatataatgaattaatgatgcatggggagtaggaacatgacttaaattatggagacagtgacttctgatcaaactctatcaatatcctatttaagataatattttatattcatatatataaattctttttacacatatatacttaacctgtacgcaaatgagtaattatatatatatatatatatgtcgtcttgtacgtattaattatatgcactgtactatatattatactacatcgacatcctatctactgattttttaaagtccaaatcatatccaaaatgaatttgtcgcacatagataattacgtagaaatataggatggatgtgtggctatgtcattatcatgtgatcacaacaaatagtatatattgtttaacgtggcaatcatggtataaatggtatttcatgagtgagcaattaataggagaaacacacaagtctatatctatattaataatacactgactaatcactatgacatgcattaatgattttgataattaaatgaccgaacacagttacgaagatgagatcaggaagatgaagcttgttgttgggtccatagtaataaattagcagtatatagctacgtgtatagggttccgctcagtgcctctgagaatatatagggcgaattaaattatattgaaaatgattgattcgaaccatgacattatatatataac

SEQ ID NO: 58113 - DNA, 995 bp, Cannabis sativa
tttggaggggtgcattttgttaatggtagtaattttagttaattaatataatatttttaataaaaaataatataataataaagaatatttttttggtgtaatttttagtgttgtggttggagtgaaaataatttttaatatcaaatttagtaatagtgtgacacaaaatttaatgtgctccttgaagatactctaacaaaataatatttaacatgtaaagtgaaacatattataagcatatttatgtactatattgtatactgggcaattaaaatagaaattcgaaaacattttttttttgaaaacattttaatcctatttagtggtattattttggtactaatcatcaaaaaccatatacattaattaatagggaaacatatattcttataaaaatgccaaaattttaaaatacatcatttatcaatctcaaaacatatcactttagtgaaaatacatctcaccaaaaagaaacatttactttaatacccctcaaaaatatattttattagataaatatagaaaacccaattaaaaattattttcctgacatgtaaatttgtacaattaggttataaaaactagctatagggagaaggccacttttattatactaaaaaggtatttgtcttattagtggtgttacacacctcaaaatgaagtgagggacttcataatttcccttttttttttattattattattattatttttgaaatggtatctatagggatttttagaaaatcaaatttgttcattagaaaaaataaaataagtcccataaaagaattattatataaaaaatataaattcacactttatttataaaaatatatccataaaatgtagacaacgtttatactttttatgttcttttaattatcaaaatacttattacactatcatttacacaatcacacgatgtctgtattggaaatttattttaccaggatcttagatctactcaaaaatatgttgtttaaacaccctaaata

SEQ ID NO: 58114 - DNA, 1082 bp, Cannabis sativa
tgattttgttgtctggattgctagtgaaattcctggctacggcccaagatacgcatttgatgtccatatatatttgtatgctttgtttgaaaaattatattaacatttcaattcattagttaattaaataatatgttacataaattgtcattaaattattaccttttcaacattgcaataatttaattgttcgggaacttggtggtcacatatagggtctaaatggataactttcattggcgcaacgacctctagcattcaatgcgcactaaaaaattatattgggttataggtaagatagtataaaaataatttcaagttataatatagaaataaacaattagcactaaaaaattaaatagtgcttacccgatattccatggaataaagaacattttgtggttattattcatcaatgataactaagcagtcaatcatcttgctacattgtcaaaatactgactcttctcttcatcattgataccattctctacgagaagctctaggtcgtaaagcttgaaaaattttctcaaatcatttatgctctccctgatgtgcctggattaaattgttaagtattactgttttataataatttcactagaatttgatatataaggttaattagattaaggaagagtatacatgattcaaaatatcattccctagttgccgatgaagtcacataatgcaacctgctacaaatcctctctagataatgtgatctgggtacgcggtgttatgaatcacttaggcgaagaaattgtgattagatcacgtttatctttgagcttcaaaaattaagcaaccatctattttagcaatttagggatcaaatccatgacctttcgcgagaataattcatcttcttcatcatgaccgccttgtggagaaggcatgggacctttccccttcgacacatcacatattgaaggcggttgagcgagtggaccctacaaaaaaacacaccataatatatgaaatttgatccaaattctactaaaattttggcagcataacaactgtaattgaatgcccccaaaaattttaaacatgcacatataatgacaaataacacagat

SEQ ID NO: 58115 - DNA, 773 bp, Cannabis sativa
atttatttatattttttagattgtgttttcatagtagttgttttacagttgttatagagttttgattcggttttgaaacttttatttgtttcttgttatttttcttttcatcaggttccagattccattcctgctgaggtagttcaaaaatgagatgccaatatttctaatgaagaagaggatggcactgtcgcttgtacttctctttaggacaagagaaagggtgccccgaccttgaaatctccttttgttgattttgggtcggctgatttgaagagcagtctaatggaggtaatgtcctcaggttctcaatctgtaggatataagaggaattttaagattgttacgtatgtcaagggccattatgctcttgatgattctttctctgatttcatttctcttgaaattgaggctcagtttgatgaatggattagcaaaggattgttttttttttttatatatagggcctttaacatttatgaggattgtgcgaagaagttttccccagggttcaaattaggtgtaaactatgttgaagataaaacttagttttatcatttatcttgctatgacatgtttatcaatgactcggtaatatgtttaaattcatttctaatttttgtagtattaatatagttattttatcattattttttagtttttcttttgttattaggatattggaatgtgttttcacgttcttactgtgtttttttattgtgttgtttcagcacatgaatattattttctattaccttaggaaaaaaagaaag

SEQ ID NO: 58116 - DNA, 1640 bp, Cannabis sativa
ttaaatttgttctgtacaacatcgttgatgtttggagagaaagacatcacttttttcttagtgtttaagagttggccagaggcacaatgatacacatttagaactctgtttatcgattggcatgaggcttcattagcttggcaaaagagaaggctatcgtaggcaaataaaaggtgagtaactgaaggagcatttctagaaattgagagccccttaagatttccaggatcctcttgcttttgtaataacgctgaaagaccctccgaacaaatcaaaaagagataaggtgatagtggatcaccgtggcgaagacctctttgaggggtgaccgaaccatggattacacaattgatgttaaaagatagagttgaggaagagacacatcgcatgataagatcaacccatttcgcatcaaaacccatctttaacataaccttctttaagaaaatccattctacccgatcaaacgccttgaccatatccaactttaaagcagtataacccatacgacctctctttttattctttaaacagtgaaccaattcaaaagcaagaagaacattgtcggtaattaaccttcccgggagaaaagcacttgggttttgagatgtagctgctggcaaagccgtcttgaatctattcacaagggctttcgagaccaatttgtatagaaccgaacataaactaattggtctatactcacttagtcttataggttgctccacccttggtattaaagtgattaatgcagagttaatcgcttcaatatcatcaccatcatttaaaatctgcaacacacattttgaaacaagaggtccgactacgtcccaatgtcgctgataaaacaaaacagatatgccatcaattccaggggacttgtcaggtgccatggaatgtagagcatcgtccacatcagtacgggtaaactccttcaacataaatctattcatgtcgtcagtaattgtaggatttatagcttctaatgtagtggtaagagcttcatcatcagcctcagtagaagtaaacagtaaagagaaatggttcgaggcttctgttgcaaattctacatctgaatggagggttctttcgttgctgtcaagaagagttttaattttattgttgttgtatcttgacttcgctctagcatgaactttttttgtatcagaatcaccacttttcagccaatcaattttcgctctctgttgccaatataaatcctctttttcaagcaagtcatccaatattttctcagtatcaatcatatttgcaacatgggaaggagatgaatcactactgttatgcaaaccaactgactttttctgcgcttcatcaatgtttcgcttcatttgaccatacttgttattatgccaatgttgtagggcattagaataagctgagatattttgcagcaaaaacttcatggatatgtcttcatttgtcacaaaccagttattcacgattattttacattcggaatccctgagctaaaattgttcaaatcaaaatcgactatggcgatggaaaacacggttattttgagctggtagagataccgagtattcaattgctctatgatctaagctgaaaaaatcaagatgagtgagatgattctaagcaaaaatagattatatgtactacct

SEQ ID NO: 58117 - DNA, 1074 bp, Cannabis sativa
tttattaattacggaaattttatcgagttatgtaggtattatagataccattttcgaaataaaatattttcgggttcggtagccttggaaactcgacggagtggtcagaaatgtcacgacaattaagttgtgttgtattggaattataccagactagattaaaatctgttaattaggttaaatcgggaaagttagaaaatgaccaaaatacccctaggttattttgtagcttaagttttaatgggaggggtaaagtggtcattttaccctaatttgtcttttatggatttctagtaaatgttggctaaatattatttaagttaacttatatatggttataaatgttttcttttctagaaaattaaaaaggaaaaagaaaaaacctaactaacaaagtcacatagtgctctctatccttctccctctcgtggccatagaaatccagcaagaaccaaggtttttccttacaatttcaaccaattctaggctgagctacccaacttttgttgctatgcaaattgtgaggtaagttcttcttctttccttgtggatttcttgaggtttggattaacttttgcttagggtttagtttaattttggggctgtaggtttaattgaattcagaacgtgatttctaagtttgattcaaggttgtttaagtttgaattttatgattctagggttgttaggtcttgaattgagtgaattgagtttgagaactcaaattttactcaactatggtgaatttgttatcttgatgtcttactgtgttttgaagtcttgaatatgttgtttttatgttattggtatgttctgaaaggtttcattaggattggaggagatttggttcggttttggagtaaaaatcaagatttctcgtttctgcagcagggaaatcggtaaaccggtttcacaggcacagtgaaaccggttaaccgattttgctagtaggggaagccctaattttaggcttcgaaaccgatttttatggggtgtttcccagagcttagaataggatattttaatgatgtttgagttgttcgaaaccactggggagttagataaatccagttg

SEQ ID NO: 58118 - DNA, 1038 bp, Cannabis sativa
cctcgcactacacctactcctgacagtgtttggaacttcaaggataggtgtttgattgaactgactgcccctagtccaataagtgttgggcgacccatcaatatgtatgtattgatggtagatccacaagtacgacattttgcattaacgttgtagataatggtggcttgcctatagtcaatgggagttcaataattccttgactggcgacactatctctggtaaatccacataaattcaccatacaaggttttaattttgaattttgtagtcccattttctttaacgaatccttgtaaaggatttttaccgagcttctattatccaccaacactctttttaccctattgttggcgagttgtactgtaatcaccagaggatcgaggtgtggatacctcacgtgtttcgtatcttcctctgagaacacaattggaggttctttaattttgctttctttgatggttttggtgcaaacaccgattgattattttttccctttattgacatatcgcttctgggcaatactactttctccagcgagatgtggccctctcaagatgaccaatatgtcatccccttccacaggaggaggttgttatccttgatttcctgggttattaggtggattttgctagtttttctcattaccttattttcttacatactgccgaaaataatcgcgtgagataaggctctctatctcatctttcaactgacgacattcttccgttgcatgcccaatgtccttatgaaatcgataaaattttgttgaatctcttttgtgtctcgcatgtctcattgggtcaggcttgcggaatgcaaccctgtgctcatttgcgagaaagatgttttttcgaaattcattaagctcggtataaatagtgtaaattaacacatacttatcgtgctttttctgtttttttttatttttagatgattccctagagtcatcttttctcttggtgtttgaaccatctggattgtcagccttttttgagacggtgctttttttgtttcttatttgcgcacaaacatttg

SEQ ID NO: 58119 - DNA, 816 bp, Cannabis sativa
tgtatcatagtaagatttgatatagaagaagctatttccccagtcaacccacttgaggataagtctctaatacatatgtatgtatgaaatagtagagtattagttacaaaggaagtagatcgagttagttggagtagtagcatgtaaaacattattatatggtaacaattaataactagctagttaataaaactaacttaatagttgatttcgtagacttacaacgaaacgattctaattggatcttgaccagtaaagctgcaattaagaccatcccagatgtaagttttcggagcacatggatctccttgccagtttttctgaacatcgtacgtagacttgatattaaacattgcaccaactaccaaacaaaatcaaaaagttataatataattagcttcgttgttactattttctgaatgcaaaatatgttcgtactacatactgcattatacatatattcttaacaagttacaagccaactacgaacacagatttttatatatccatgattttataagagattatcataggttgattaattagagcatttaccaaaaatcttctaacataaacataattatggggatgtttttaccatttcattttattaccaactaggtagctagtctagttaaccaaaaaataaatgctaattagaatttttgtcctctaaatttaaacatgtataccaaatcatgttctttcaatatttttggctattaaaaagttttgttgaactattgagattgttagatataaagatttttgtctaatttcattcaattttactactatttcaataattatttatgt

SEQ ID NO: 58120 - DNA, 1411 bp, Cannabis sativa
atatatatatgagcacaaaaattggtcattaaggagaaaaaaagtacaagttgatgacttaatttagcattaaggtgaagtgggtccaatgaactaccattatatcactggtcaatcggctgccttgcaccatcccaacatcacttgtggggataatacaatatacagatatgttcatatattgaggtgtaatgatcagtgcatttaaaatatatatgattttctaaaagattttaatgtaaatgaatgtgattgaattaaaaatttgctgtaaatttttggtccatatattaagatcatatttaatgagattcaaaaattgttcttgacataaaatatacttttgtgatataaatctgtatccattttcagtattataaaatttaatatttaattaatgtttttattattaaaaaagagaaattatcgcatatactattttttaatttttttttttttaaatctactgtttgaatttctcctgtggtttctatgtgggttgtcatacgaattttgattgcgatttaggttgctccattaattgctatatgggtttttatatggaatttcgtaaaaatatatataaaaaaaaaactgttttgaagtataaaaataaaaaagcccattaaaaaaattacttttattaaaaatataaagaaataataataaatttattattaattttaggataaatagtgacataagtacccaaaattttacatttctaaacggtataaggctaataatttttttcagcagcataaatactcaatatttataaaattgtaattttcttcaaatttcatcagtacaaactatcttattatcttaaatagatacatataaagcctaattcaagattattgggtctagacagaaacatgtagtatcagttacttttaaatatcatcatttactaaattcaaaacagagtttgtactgataaaactagaaaaaaaattgcaatttacaaacattggatgtttatgccgctaaaaaaattattagatttatgtcacttataaactcaaaattttgagtacttatactactgtttacctttttattattattatttttttttaaataaaacaatgaaaaataaatgtaaaatgtataattcaatgcaaagttcaagaactaagtttaagaatgaaatattaaaaataatatataccttacagaaaattttatttttagttacagtaaaacttgtgactaaaagtaatatagttgcgactaattataaatcattattcatatgttgtgattaaaatgtctgtggctaaaaatattagtcacaaaaattacaatatgttgtgactaaatgtatttttagttacaatgagtattgtgactaaaactaaattagtgacaactagctttgtagtcacaagtaactttttgttgt

SEQ ID NO: 58121 - DNA, 1376 bp, Cannabis sativa
tacaatatattttttattttttatatataaatatataaaaattaaaaattaaattataatttttctaagtacctctaagtaccaaaaaaaaaaaaaaaaactgttttttacgccccatagctcatggattattagatttttaattgaagtagctatattaagattttctaaatctttttagtgtaaataatttggttaatttattttcgataattctgctcgatgaacactattattataaatgaactatgtctgatttacttattgatttattgatgaattaatattatatatttaccttttaaaagccctacataaaaatttgtctatatcacatgcatgcctagctagttactaaataatacaatattataaggggttaatattattttggactatgtgttttgtaaaagttattgacttgatcgattatctgttttgttaaataacaaattagactttatattttctaaactaatactaaatagtactttgaactgattttttgtcaaaataaaacttattaaataataataacatgataggtgttataacaaaattaattacattttttttaacatttatttgtgctaagaattaatttcaagttagttatattaaaaataaaattgtcaaaaattgagctcaaggtcttataccattttagaaaatacaaggtccatttgttatttaacaaaatagatggcctaatcgataatttttataaaatacagggtctaaaattgtattaattaatcctatttaagaatttttgagtttaatttattatgtaaaagagaaaaaaatatttgcttttactgttaaatatttggatatgctaaggaccaaattgattcaggtaggttaaaaaatcttttaacaaataaactagcaataaaaaagtattagttaattatttattatttttttaatataacaaacttaaagttgatatttattataaacaaatgtaaaataaaaatatatctcatttgatcattacactttcagatcaggtttatattattatattttattttgacaaaaattaaagtcagtatatatataattttgtactattttaaaaaatataaaatctaaattgtcattgatcaaaataaaaaatccattgatggcgaagttttggtgaaaatcccaatctaattcttctagcagaggtgtgagttgggttagttggaagaagctttctcaacataaacactttggtggtcttggttttcgtgatcttcgggactataatctctcttttttaggaaagcaagattggcgcctgcttactatggaggacactctagtggcgagaatttacaaggctcgatattacccacaaggttcgtttcttaacgctgaattgg

SEQ ID NO: 58122 - DNA, 1151 bp, Cannabis sativa
  modified_base (220)..(229): a, c, t, g, unknown or other
  modified_base (455)..(462): a, c, t, g, unknown or other
  modified_base (667)..(671): a, c, t, g, unknown or other
aacattggaggacattcaaataaatcttaccataaaaagagaaattatatgtaagtcgataatggtggtattttaatactcttagactacaccaaattagttttctagactcgcgttaatgctagaaagtatacttatgagatggtaattactctgggggtggatcagtaatttttggaaaagactaaaaatccgtctaaagtctctaactctaccagtnnnnnnnnnnttaaagtggcccagaaggctactagataattattcaacctatggaaagttctacatagtttttggtgttattccagtcatggattaattgctagttttacttcctgataacatagatttagttgccaaatagtaaagaatgcaataccctaagagtagtaaacatatagaacgaaatttcacaatatcaaagattttgtgactaaggagatgtaatggtggagaannnnnnnnttgaatacaacttgtcagatcctaatacaaagatagtactgcatactacacttgatctggacatcaagatggtgcgataattaaaatgcacttttaattttatattagtggaagtgggagtttgttgggattttatgccctgaataaaatctatttcaatataatcatatttgctaattaataaaagatcagaaatcattttatnnnnnatggttcacatgattactttcatgattatatgtttattgtataaaatttattaaatctaaaacatatagttattcatgattatagtgttgtcaacacagtggaaaataatcatgattacatctttcaaagtttagtcccatgatttgtcagcacactggatttacactgacatgataatcagcaataaagtttacttacaccttggataagtggtttgtcctttcgagggcattggcaatgtatgctagtatcggatgtgtggagatacatcaggcttgaccaatattgacatgggataagatatcataaacataccattgtatctttctaagtcaatatcacttagttggtcttagatgaatagatcttaatcttgagatggttatgttctgaattaactgtattattcatgttctttgacttgttcgttaaagttgaccaagtggatcttcccaatacttactgttgggattttatgc

SEQ ID NO: 58123 - DNA, 1509 bp, Cannabis sativa
aaaaataaaaaagtacctattttttatatgctttcaaaaataaataaataaataaatatgtaaatatttgttattatttttttttttaaaaaaaaaaaagagagtaactatgcctaataaaaataaatttgataaaaaatatgggttgtaagggcaattctaataagaaaacttaaatttagtgttaataaatcatcactaaaaggatactatttcaatactaattcttcttccaattccaatcacaacactaaaaaatattttttttattattatattttttttattaatacattatattattatttatttatttagaaaggattatttaattattaaaaagtataaataaaaatgcagtagtctaatgcccactattattagtgggacactgtaaactcccaccaaaataagaatacttttagagttgggtagtgaaaaaactacatcatatttgggtttttaaagtaccattggagatggcctaacaactttagtgtttaagtgtatcttttgcataaattttttaataatttgaaatttaattgtttatcaaatatttttattgcacaattttttttttcagtaatcaacttttagagcactcccatttggagttttataatagttaaaatataaattttttaaagaataatgctaaatattagtttcatcaaagaggtaaactcatctttattttaactcacaagattttaaactatttttctttagctaaatgaaaagtagtttttaatatttttttaatattattttaacttttctaatcacatcttacacacatcgtatagataatgtcttatttacatatatatatataatattttatttataaatattatttaaatgaaatagagaaaaaaaaataaaaatgttgcagtataatgtaatggaaaagtttaatgtaaaataaaaaataaaagtaaaattttgataatatattttaaaagataaagtagaaaagatgctgtgagttctggtttgaatttaatgttatatgtattaattattaggattattaatacataagaaattaatgatctgtattgatttatattgtaattattaggaacttggtgaagagtcaaggtcattgtgttgaatttgcttgttcgggtccagactcagaatattggtatggattagggtctaagtcttgggatagggtccaagttactggttaaggttcattgtcgaggttcaggtctagaatcttagatctaagtcaacctcctagtgttaataaaaaaacatttattattatgctaaatttgatataattttatattttgtgttaaatttaatattataagaacatctctaatagctaaaaaagtaatgtatttatattttagtatatttaaaaaaatactactttaatggcgttttaaaaaatgtgttaaatttggcacaggttaaaaattgtgttaaatttagtataagatatagcccacaataaattctactttttttattgggaaatttacaccc

SEQ ID NO: 58124 - DNA, 826 bp, Cannabis sativa
ttaagtgtgattattaatatgtatcatcgtaggtatttatatgaaaattgaaatgtctcattagtgcaattaataaaaagcttaaagtaagaaattattttaattgtagtagttatgattttaaaatttaattatatacatatatcatattggggtgggtatctattcccccaccccgccccaatctcgactcggatatgatcatttaaacccgtattcgccctcaaaattcgacccctacccctgccctattaaaggtgggtacctgcggtattcaaatccgcaaatataattgctatccctattgttattagaccttaatgccacaatttataaataattagaggctatatatgttttgttgttgtttatattgttaattatagatgctattacaaattatttctcatctttgtttttgaaaatatatgttgtaatattattcttatagaatttttaaaaatttagaatactttattgtgtcgaaaacgagtttgaaattttataagcatgcttagtaaattagaatattaggaactatatttttgaaaacaaatttaaaattttttaagcatgcttggtaaattatttagaaattttcaaaattactataactataattaacaaatattgtcatataatctttttgaaaaaacatatatttctatatgtattttcaaacacataaattgaaaaagatattgtaattaacattcctctattacttattaatttcaaagatcagatttaatatttatagattttcgatatgatacatactcttaaacatcactagtgttatttaatgatgttttctttctttttt

SEQ ID NO: 58125 - DNA, 1429 bp, Cannabis sativa
  modified_base (45)..(47): a, c, t, g, unknown or other
tagtattcaaataagaattttataaaaacacacacacacacacannnacacacacacacacacacatgtggcgtccctgtaggacagggcattatacttatgtactagcatggacgggtaaggggcacgaagattctagcaatgccatctctgagcaagagccagaaaattttacttggtgaacagtcccaagggcctgttcactagcactcatagtagttggcatgaccttctctagagactttgtagactcgacagtgagttgatttgaagattgctttttatttgcggtagttttggttctttttgaagtctccttggtagatcttgaggcttcatttgttgaagtcacttgcttcttggacttcttagttctgagagtgggattgttgagcatatcttcaagatcgaggtccatatctacaaaaaaaaaaagaaataagtcagtacttatccaaaataaacaataagaaggtgggaaataaactcacacttagagaaatttacaatagttatcagacgatgatgaagaaggactataataactactaaaatacctagaaccagtaattatgtacaaatcaaagggatttagtggaaacaagtcccagtctagatggcttgccctatccaaatttgtaccataatgctcggcaattctgaagtaagaactattgcaacttaattagacatgaaatttgaggtaccaactatcgaatctatgagttatgcgatctatacagaaattatctcaagtataaaaattatactggctatccttaaatttaactagcaaagtattatctcaagtataaaaattatactggctatccttaaatttaactagcaaagtatggtcggccctaagcacggtaggagaccatccacaattattacctcgggatgcttcttcttcaacttcttgaggggttgttttcttcaagaagttcatgggagccacatagtccctgtcttcctcatcagcagggacaggaacctactgcgacttagaatatttggggactttgaagtcacaagtggattgtttggtgccgagaatattttaggtcttcgaattaatcttgttcaatagagagtcggctgaacgcaacccaaagggaagacctaggacaatcttgtgttgtttcaccatcttaggagttggaatgggcctatcgagatcgttgtcagtacaataagcaaaaataagaaataccttcaatttataaattgaaaactcaaaatcaagtttttaagaaaaggtaatacttacatattcagcgaaatgtagttgttattgatgggggaacgactggatgcccagaagaaatcatccttgaactcaattttgttgggtagtctcatgataatcctttaatcattcgtgagggtcctgaggtaataaaaatcacatgatcctcgcttcctt

SEQ ID NO: 58126 - DNA, 841 bp, Cannabis sativa
tctggggcatcctgaaatgctccgataatggtgcatcaataattctcttcacagaaggctctgtatcctcttcctcagagtcagatacgacacctttttgtttcctagagatcttttcaatgatctttgtcaactcttcaactttacattcaaaatgttgagtcttatcatagaggattctcttccgcaaatgttgtcgttaatgtgattcttcaaattgtttccatggggtcttgcttttttggctttagctttttcattttaagcatccaattttctttggagatcatttgtagaaaggctttcaccactatcatccgatatcggatgcacttcttcaacctccttgtcatggttgctggaatcactaagaaggggtgctttctttcaagactcaggcttccgtgtcctagcattagctttgtctttttgtgtgactctgcctctagaattggtttggtctccatgccctgaagcgtggtatgctttccttttctattttggttggtcagctactttagacttcttgggctgcttcgtggaaggagtttcctttggctcttcgggagcgattcctttgcctttatccttgtgaatgcctgaagtttggtggtccttcagatctacccttttaggtgcatttattgttggaggggctcgtgcatcgggtgtcgtcttagttaatgtggtcattacaacctccattctggtcatcttacaaagtaatatctcattgaatggatcttgctgagataacctctttttggtcaattacagttgttatgccatgatgaccacggggtttgatttgtcacggtggctttttccccaacattattct

SEQ ID NO: 58127 - DNA, 1178 bp, Cannabis sativa
gtaggggagtgaaactgaagttgagaagcatcaaatgaatacaggccattccgatgtgtccccttcagtaaaattgagtggctctccttgtccttaaccaaacaaaaatcatcatgaaattcaaaatagactttgttatcttttgcaaacttagagacacttaataaattcttagtaatgtcaggtacatgcaaaagattattgagcaaaaagaatttagaggagtaaggtgtggaaaataaagattgaccaacatgttgtattgacaaacctgcatcattacctacaaacagtttctcggctccatcatattcagcaccatgtgtaagatgttgttgttcaggtgtacagtggttcgtggcacctgaatcagggtaccagttgctgtcttgagcagccatggtgctagcaacatgagcttgtgcagtgttgttggagttgagttggcttggtgatcctccagtaaaggttttatcaaacctgtagaaacagtcttgagcagtatgcccaatcttgaagcacaattgacactgcaatttgtttgtagagttcgaaactctaccaccacctctgccatagttggaggatgcaccacgatcataagctccaggatatggtccattgagtccacctccacgactatagccacctctgtaacctcctctattagccaaaaattgagatggatagttgaacctggaaggagtttgctgtctataattgccaaaattacgattgaaactagtgagattggcctctggatgatcaacttcgagagaggcaacttgtgcactgatttccacatctcgatctatcttctcaattctagatttagaggctagaaggagagattctatctcagcaacagagtatgtttccaatctggtgttagtggatatgacaaaagtgtcatattcacttggaagccctttgaatatagcagcaacatgatctttagcagtatagacttcaccaacagaggcaagcaaatcaatatgatgtttcaccttcaagagataatcagataatgacagagatcctttcttcaagttctgaagtttagtgcgaaactcaagcactttagcagaaacttgcagagtgaagaatttctcaagtgtggaccatatctgttgtgaagtttcgcatccaaccatgcgagtaagcaagctttcagacat

SEQ ID NO: 58128 - DNA, 1017 bp, Cannabis sativa
tcaagcaatagatcagccacgcaatttacattggggtagggacccccgattggtttcggacagaagcccttacgatgcggaatccagggatcgtcccaaatcttagtattctcaccattggtaaccaacttgcaggcaccttttctcaagatagcgttagctttgacaacacttttccaaaaccaagaatctgcatccttatatttgcagttaaggaaatctttcccttttaggtattttgctcttaaaactctacaacacagagattggcttccggtgaggatattccatccccatttggccaaaaaggccagattcatttctttggtttttcggaagcccagaccaccaagcgactttgggagacacagtttatcccaagctctgagatgaataccatgattacctttctcaaagccccaccaaaaatctctgaccatgccatcaattttgttaaccatacgagaagaaagtttggttgtttgcatagcatacattggcatagacaagcccacagattttatgagggttgcacgccctgctttggatagagttttagccttccaaccctgaagctttgacgttaggttgtccagaataaaattgaagtcagcatctttctgtctcgatcgaaacaggggcagccccaagtatttgatacagccttcaggggtatcaattcccaaagcttccttaatctcctcacgaagtctcaccggggtatttctactaaagaaaatggaagttttgagtttgttgacccgttggcccgaccaagagcagaaattctctaaacatccccagtatctgttcacctccactaaatttgctcggccgacaaggattagatcatccgcaaagaagatatgagatagagtcggcccacctcggcttagcttaataccctgaatagaaccctgatcaagcgccacatgaaaaagtctagataacacttctgctgcccagatgaacaaatagggtgagagagggtcaccttgccgaagcccacaggaaggg

SEQ ID NO: 58129 - DNA, 940 bp, Cannabis sativa
gtggagaaaataaattaatgaagatgagataaatatgtaaatgagatacaatgatgataataattttaaatgtagttgctattacgaataagatacggtaatgacaataattttaggaataattacataaggtacaattttttgtaaaaatattacaattttacgtttaaagaattttttttttacatttttactgttttccatagaaataacatgaaaacaacaagaaaactacataaaactaacaagaaaataacatccacataacatcagaacaacaacaaaaaataacatacagataacaaaaaatcaacaacaaattaacaagactacaacataaaagactggattttctataaataaaatcgtaaaaatgtttaaaattccgtacaaccgtatttttgtaattttttttgttgtttttatatattcgtaaaataattccataattttaaatatagtggtaactataagtgacatacgataatgattttgaatatagtggtgaaagtgaaatacggtaatgacaacgactttaattttttttgtttgtctttcaatttatataactaaaatatagtttttgcattaattatattttaattttattaatcacatagcataaattctgttatttgttatgatcaacacatttctaataaatagattttttgtttttgttagtttgaaatttttaaatgcaaatatcaactaattatatctaattaatttctatatactaaacgtagatttgaatttaaataaatgattcatcaatttttttttttttataaatacttatactatgacaaacaccgaattgaatactaatcttataccaaaaatatcataagttttctaataaagaaagcttctcatattattttgagaaaaaataattagaaattattatgattaaaattcaataaattttattact

SEQ ID NO: 58130 - DNA, 734 bp, Cannabis sativa
ttaccctaataccatttactcatttagaattttagtccgcctcttcttctcctttgtcccaaccatagtcgtacctattttgaaaccctaacagacagcatcaagcaaatcgcccacccagcccagtcgtcccaggtctcagccccaactcccaaccgtgcgtgcgtgttctttcctctgggcctctggctagtggtggctccgaccgattactccattgtttgttgtagcacaggtcgtcgacccctgttcatgtaagtttctacatttttttcttttttcttttatggaagtaaaaacttagaggaaataatatcaagatctcactttttttttgcttttcttctttttattttggcttgctggaaaaaactcagttcgtcttcactcttcagattctttgctcagttcttcgtcaccaccaccctcaagtgttaaagctcactgctcaggtgaaggtctacatctcaacatctcatttttttttctagtacaatctgatttgttgtttgtgataaaaaaaaaatatttactaaaagaaagcttttgttaaaactagatatgttgctttaaataataaggatagctactgtggaatattagattttaaactctgttaaacataattggagtttttataggatgctttgaaattaaatggggttttaggaggctgcaaaaccataaagaaaaaaagtggtcttaagtgaacaatgaagaactaattaattcag

SEQ ID NO: 58131 - DNA, 1082 bp, Cannabis sativa
attacttcattggtcctttgaactaactcaggacccaaagacttcctttctccagttttgtctcaatgtattagagaacgacacttcttaccgtacaacatttcatagggagccatccctattgtacgttgatagttgttgttgtatgaaaattctatcaaaggcaactatttactccatgaaccctcaaagtccatgacataggctcgcagtaagtcttctaatatctgaattgttctctctgattgcccaccagtctgagggagaaaagttgtactgaacttcagcttcgtacctacagctctttgaagacttacctagaattttgatgtaaactttggatccatgtgtgaaagaatagattttggaattccatggagacagactatctcctttacaaacaactctacatactgatccactatataggttgtttaccggcaaaaaatgtactaacttcgtgaaacgatccactatgacccatactgagttatacatccatgtggttttggataaactaaccacaaagtccattgtaatatcctcccactttcactctggaagtgctaatggttgcagtaatcctgccgacctctggtgttcagctttattttgctaacacattaaacatttaatcacgtaattcactacatctttttttttattccccaccaccaataatagggttgcacatcctgatacatttggtggttcccgaatgaaatgaatagggtgtagtgtgagcctcatcaaataattccttgttgagcttatcattatctggaatgcaaacctgagctttatgaagtaacattccattattcaatatcgagaactccttaggccgactggccgatgcctcatcctaaattttaactagttcaagaccttgtagcaatgtcttcctaatcctttccaacaaatctgacagaagtgtcagtttatgcaacttcccaaccacaaatttaatttcagccttaaccatttccgagactaattgaggagctaaaaacctgcccggtaccctttctgttcaaagcgtctgccactacattggctttcttgggatgatacagaatctc

SEQ ID NO: 58132 - DNA, 2190 bp, Cannabis sativa
cagagcaaaacggaaccaggatttaggtagtttagccgccaaaaattcggtttttgtggttaagtgttacaaaccgtaaagttcaggtggtttagccgccattatcccttttatttaattactttcttccaaatatatatactaatacttaaaagaattcaattcatttgtgcagttttatagcagccaatccaatccatgcataattctatattgtgttcatattatctatttgtgcaattctctccaaattatggattcaagtttcatgatcaactgctagagatgttgccaaacaactcaaggtataatgacaaaaatatcctcatcggttaaaattacgaaattacccttctaagaaagcgcgtactacaatagtgttataaaatgtgtgttttacatatcatttttttgttggctttaattgtaggaacaacaaatgataatgcctggacaccgcgaatcgaacttgcgaaaggagcttaaccgttacattcctaccgctgcagcattcgatggcatgtgcatcggtggtttgacagtgttagctaatttaatgggagctattggttctggaacgggaattttgctcgccgtgacaactatttaccaaaattttgagacattcaagaaggagagagctagtgagcttggcttctttggattctaaattcaagcaaaagctgtaaaaatcatgagatattttacttaacaccataggctatagttttgtaggatagtttaaattttttactttcaatgtttaaattcccaagttcattctttttagatgttaagtacatacactgtttgacaactttatacttttttaccaattaattttccaatattttacacagttaaaataaatttgactattttttttattatgttaatatataaaaataatatgaaataaataaaatcgatatgcagttttatttccaactgtgaaaacaactttttaggtaagataatagtttggagtagaaaaaaaatcataataggttctaacttctaactgatgaagaaggccaaaattagagtagaaattctatattaaatcggggtaaattaacacttatcaggaatgaaaaataaaataggaattgtagtactcgaacgctaaaatcaagtaaataaaaaaaccgaaagtaataaaaactttaactaagtaaagtcacacaaggttttaatgagatttattaccctttttgtggtgactattctacgagaagaactaccatttggccaagctttattaattttttaacagtggtaaagcacagaggtaattacaagaagttcacaaccaactcattttagatagatgtgatcaaatatacacaccctcttaacaacttcttactaaatgttcttctaagtactcccttagatcgtcatttaagaaggtaaaacacaaagccttatataggcatctaaatgagtgagtttaatctattttttttcatgatcgtatatattatagttatttaagattatctgaaatttttttaaagtaaaattcacatagtttataattcggaaaataaggtttgaatattttattacatgcacgactgctttttcttatacgcacagtaagtaactatttagaccttattttcggtactgtaaaatattcagaatttttaaaaatttataagtagttctaaatagctataacatatgattatgggaaaaaaattaaatttaaaattttttctaaataccaaaagaaatctacaaaaatatctcttaaactttttaaggaggtgttctacagaattccaaaaccatgtacacgattacttatataaatgaatcttagctatagctttggaatgatcagataaaaccatattcatgattacattcactataatatatgtatatgttttgtttgaattagtcttttccatttaaagtcaaagttttataaacgcatacactgttattatatcaaacaatatttctacatattaacatgtcataactgtatgttggtgtagaaagttttatattggctagaaatgaaaaagatcttgagtatacaagaatggacattatttctattcaaatgagaccttttagaaaagtgcccaaaaataaatacgtgagtgcttaggcttgttttactagattgtctggtatacctaattttaatttttaatatgaaaaatttggtag

SEQ ID NO: 58133 - DNA, 1247 bp, Cannabis sativa
catcaatccaagaatttgctgccgcagccaaagaaattgacagatgggcttgatgggaagaaatggttcaagcatcttgtaaggcttatcgtttttgctctattggtaatcataatgcaaacattaataagtagtgtttaagaatgcagacagtaaagttgagacttttaaacaagttacaacataagtctataataagttttcttcttgattattctgtgatgcactctttgacctcattgtttgactgtttttggtagatatatggtcctagtgacccagaaaccgaattagacttctttccgggtatagcagatgcaaattttagatcgactggaatgaatttgaggcaaaggcagtcactgattcagcatgagatatggagggtggctagagccattcaaagggctaccagtgccctcagaggagagctttcttgatgcattgtacactaacaaaattttagacctgttcttgtgagttagatattgggagagcgagagcttacattacctgattttgtacatatgagtggtatatctctcctttttgtgtgtagttttccatacttttttgtgtgtaaataattgttatcatgtctgagatcagttttgttttaactttaacattatttttatggacaaagtatacatgaaaaaaacacttgaaatgaaatcaatgaagtgcagtcgtgccatgacaaaataaggttacagtaaaatgcatttgccattgatcaagcacttttaagttggtcgaacaatttctttttcttcgaatcaattacccttatttttaattttaaatagtttcacatttccatttttcttttgttgtttctaattatccctaccaaacaagataataaatattcaattatacattttttttttctttctattttttaaaatattgtaccaaatgtaggtaggtctaagatccaaaccaagtttattggtaaatgaaattaatgccaaattatcagacatgacaaattcaaatgcataaaactagtctacaatacacaaagtagctaaaatgacgctttttctttttcaaatgcataaaactagtctacaatacatatgaaattgatttttaaaaagaaataaagactgctattaaatatgaaacaacatatataaccttagatgaagtcatttttactctaaaatcaatggatcttgaattgaagaatgacaaacttggtagttttaatagagaactaaatttgagcagaggaagac

SEQ ID NO: 58134 - DNA, 1576 bp, Cannabis sativa
tttaacgagtggtaaaaactgcctaaatttatcagtaaaatagtggtatgctaaattagctctaattgctcatgtaatgtcgggagcgacgacgggtggtgcctctggtggggctgtttgagactttgggtttgagtgatgttaatctgtttgtggatacagggattaatgaggagtaagggtgtgtgggacttggggcaatggtgattgcctgggaaggggcggttttgtgctcttcaagttcatcagcgatagatttcttttatcctcatgtggcggaggcagtaactctcttaaataggttattgttgtgttgtcgtttggggtacaatactatcactattttcttagatagctttcgtcttgttcaaactattaataggaatgataagcgtcaaactgagtttgacattattattcatgatattttacatgtttggcaatctttttgttctattttatctttctcattgtaaaagggctcaaaatattatgacttgggtataattagcgcttactgtcttgcctataatctttgctttttgaattaatcttttaattttttcgactcggtgccttttaatgaaattttctttagttcaaaaaatagtggtatgttactattcaatgtctaatgacatttatgtatttattacaatcataaaagcatgactaatttgatttctcctattttttttaaaaaaaatatatttataggtataattttattatacaaaaaaaatatatatctccattttatataaagacaccttatatatttatttcactttgttgaaaaatatgggattccatctcaaaattaattattgattagtggagtagcctatgttcttatatattgtgacagtcagtagtcccgtgatccgtacggagaaatacagagtaagctgtgcaatcctacactgcctggggaaggtcaagtgggatgattttgagactgtgtaggtatgggactacacagtcgaagaggcttaaataaattgattggtactatctataccaacaaggtgcatcttgtttttcagtagcccatcacgaaagaactcaaaggttaagcgtgcttgacgtgggataatttcagaatgagtgacctctagagatgtaaacagggtggagcgggtgccaggattgctcccccaccccatacatgcttcctcaatttaccccaatacccgtttaaatcaaagcaaggacgaggcggagattacccgacgggggaaggattcccatcgagtacccattacatatttatttttgaaaaaaaaatgatgtcttaaaaagaatttaaaaaaataacataaaaactcattaaaacaataaacatgagtgtaatagttggtatagtaaatagagttagtaaatacaaaattagtaatcgaaagtaaatagttaagtgtcatttttttaaagcagttaagtattattattaatatacatcaccgcaaacattttcatgagaactaaaatgtctcattactataatcaataaaaagcctaaatcatgcagttattttagttgtagttgttatgattttaaaacttaaatatatacata

SEQ ID NO: 58135 - DNA, 1419 bp, Cannabis sativa
catgcttcttccaaaaaagattatcaaagccgtagaaaccatttttagggctttcttttggaaagggcagtaattgatggaaggaccaggccaaatcgcttgggtaaatatttgtcaaactaaaggagcaggagttattggatttaagagagtagctgaatggagtaaggcaacgatgttcaaatatgtgtgggcaattacaactaaggaggacaatctatgggtcaaatgaactcatagtgtgtacatcatagaagttgattggtggagctactcagctccccaacaaggcagttggtattggaggaagatagccgcattgaaaggtaccattctagctttaactactccttcatctttcactcaaaacaaatatacaattgccgaaggatacaagctgctatgtcccaatgagaaccgagttaagtggagtaaggaagtttggggtagactcaatactcccaaacacagctttgtaacatggcttgcaatttaaaaaagattgaagacaaaagagaggctgtttcggttcaacatagcagcagatatgcaatgcttattgtgtgatataggtgtcgaatcaagtgaccacctattttaatgcccttttgccttggaatgccttcaacaaatggctgggatggaaggctactgcaaaccggttggacaccttggtgagaagcatcaggcgaaggaagatttctggcttccaaaagaaggttatggctgctgctattgcagccttggtgtacttcatttggaaagccaggaataggaaattttggcaaaaatagatgagactccgaacaacattgtatagcaaatgaaaaacacttgtaagagtagaatacacagtgtatggcccaacaaagtatcattagaagacttagcaaagtttaacacattataaatgtatagatcaatacttcaggcccttcaaaagggtgctgtttagtttgtaaactcaaaagtctattggagtaatgaggaacacttgctgatttctcaaaaaaaaaaaattgatatttgtgttgcaatattgtttccatataatttctcatttgacgctcaaagaattgatgtagcaatacttaaacactaaaaagcctacacaattcttagtgttatttataagtatttcatatagacaatctaacatagggctatcataataacaattcaaatatggtaagtttgtttatattttaacattggttgagttgaggttgatttaaagttgattcttcacaaaataacctcatcaattcaataacagttggttaattttttcttaaaaatatcaaaacacatggttcctacatagttgctaatacgctgtttacgcattgtccaatagttgtcttaaaaatatcttatagcaaaaaatttaaggatcagaatttgtaatgcatttttcat

SEQ ID NO: 58136 - DNA, 701 bp, Cannabis sativa
  modified_base (661)..(666): a, c, t, g, unknown or other
tcaatctttcatcagcataacttatttggtcaaaactaaaaattttttgtgggtttataaatccccttttgttgtcttttggaattttttgtatttgatttatgattgtatttgttttataaaattattgtaaatatgacatttgattgtgatttatttaacatatacctgcaaattatataattatttatgagtatgagagaaaattaatctatatatattctatataaaatgtagctatataacagaattcttggtttatgagaaactagtaaacaacccgcgcttcgcgacggatgtttaaaaaattttaaattatatatatgaaataaattatattttttatttaatgataactaaataataaattttatcaaattttatcttttaaaaattttattgtaaccatgcctctccgttattataataatagataaaaaaaaaatagtgcgatttataatttttattttttattattttgatttcttatattttaaaagtttgagaataaagattttgaaaacaaaataaaatgatgttgaaagaaatataaatttagatttagatgtaaggttttattttgattgattagtaatttgttatatatctattctatacaaaatgtggctatataactgaattcttagtttatgagaaattnnnnnntgacttttttttaaaaaataaaaaaaataacaaat

SEQ ID NO: 58137 - DNA, 1205 bp, Cannabis sativa
atataaaacattaaaaagaaatttgaatttaaaattcataaaaaataaaaacttaattaaattaccagaaaaaatattaaaatttccataatctaacaataattattatatatgactaatatagtttatgtaaataaaaataaacttttttttaaaaatttattacaatcattacaactttccttaaataaattaaaaaaaaaaactaaattttttataccattttattataaatttttccttttatatttcattgatacatattgattctttgagaaaaggaacaactttaatagttaacaaaaaagagagaaaataataattttttattaatcatagttttatttttattatattttattgaaatctaacattttttttttcattcaattattacattacatacaatttatattaattttaatttcttacatacattttttagcataatatacatataatatatatacatttagataccaattagtatgttacctccttaaaaaaatagtaggttagctaagcgtttaaatactaattagtggttattgttttaattttttttttttacacaaattattattttagtttagatactattaagtatagattaatattttttatataaaaattatacggtattatttttattttagttggataccaaaaagtagttgttttacaatatttatatgtaaatacaacatattgctaaataaatatgtccaataatatagtaattaaatgttaaatatggttatttaagttatttaatatgaaaaagtgggtatattaaactatgcataatatattagtacttatttataataaaaagtatttagatgtaaattttcctacaaaataataggcccttgccatcaccaataacttcctgccactttctttttttttttttgtacttaccgtttacatgtttttaatacataaaattataatatattataaaattagttttgttttattgatcaacagggctgaaaaataggtgagctaaggtattatattttggccctatcacaaaatacacaaaaattgctcttttttctcaataagagttcatacatatataatttgcattagatatttgggccctaagtttgggtggaccttaggcatgtgcctagcccgctttagctcagtgctgagcttgggtaccctagttttattactttttttttttaaaa

SEQ ID NO: 58138 - DNA, 1871 bp, Cannabis sativa
  modified_base (277)..(289): a, c, t, g, unknown or other
ggtaatacatacccatttatatatatatatattatattttggttttattttaaaacatataaagactggacataaacttttgtaaatcgctcaactcaaataattcactcaaatgaaactgagataacccgacgaaaaatacaaaccgaaaaatccgacgaaaatataacctacccaatctttatattgagttggttaaaaataataacaacccgtctaatcaaccggaactaacccaaacaatccgattaagaggatttttatatatttatatatnnnnnnnnnnnnntgactatttaaaaaatataaagttcaaattaatatgtttttttatggtggttgatttgaactatatttgactcattattacaattaactaaaatataataattgaatgtaaaaattaaaaaaaaataaaaaaaaatattaatggtcggtttggacgggttaatccgaccaaaccactaatttcattgggcgggttagtactattttcttttttcttaattggatgggttgcacatagatttttgtaagccgatctttacattgggttgaatgaaatataacatgaaccgatcaaaccaactaacgtacacccctatatatgaattattcaaaataataaaaataaaaattttgatttgagaagtaatacttttttcaaaaaataaaaaaataattaacataatggcaaattaattattgttggattatattattcaagaaaatatagaaaactatagcacgcagttttatgtaagccattttcatttaacttttttgttagtacaattatttttcatttagtcgaatgagaataaatttaatgaggtgaaagtatttattttttatttatttatttgatgtaaaagtgaaagtattaatagtggaaagtgattttggggaatagagatagataaagaaaatgacggagagtttaaaagttaacagatgagcgagagagcaaaaagttaacatctggtatttatttattggagggacagggatggaacaggaaaaattgggacagacgatttttttccaaccacgccaacgacgatctctacgacgacgttttggaatctgccgtcaagtcctaccagcaacaccaccacctcaaagttaccggaaccctagacccggaaaccgtgaaagaaatgaccaagcctcgatgtggacttcctgatatagtcaacaacaaaaaccacgaccatcaccaccataataaccgcaagctctaccgcttttttcaaggaaaccctcgttggcgaaaatccagactcacttataagtttcgatcaattgctaactcggcatctgccgagagcataaggtccatctgcgcccgagctttcgagaagtgggcgcaggtgagtcattttactttccaagaagttggggagagcagcacggctgatatagtgattgggttccatgttggggaccacggcgatccctatccgttcgacgggcctaggggggttttggctcatgcatttccaccttcaacagggcttctccattttgatggagctgagaattggagtatgaacccgggacagaacgaggtggatttggaatcggtagcattgcatgagattgggcatgtgttagggctgggtcacgacgacaccgttccggatgcaataatgtattcgacattcagctacggattgaccaagaggaatctacatcctgatgatattcaaggtgtacgtgccttgtatggtctgagttgagtaattgatccatcaatacgtacgcacgcgttactattatatatacagttcatatatataattaaataattttattcgatcagcaaataaattattccaaatgatgaattgtagttgctttaatatgta

SEQ ID NO: 58139 - DNA, 1153 bp, Cannabis sativa
aatgacatacattgatgattgatgtggatgtgtactgtgtacttagcccctctagttgatgatttgagtgaattgtggtatggggtgttcctgcatacgatgtcttttagaaagaagaattcaatcttaaagccatattacagtggaccattaatgattttttagctttcaaaaatctatagggatacagtgtgaaagggtacaaagcatgtcctatttgtgaggagaaaacatgttgtatgtatttaaaatactcaaagaaaatgtgttacatgggacactgaaagtttttgccaaaagagcatctgttttggacttggaaaaaagtatttgacggtaaacaagaatttgaattgtcaccgccacctttgcaaggggaacaagtgttagaaaagttaaataaagttcaatttcaccttggaaagcaaaaaagtgaatccaaagaaaagaaaaggtcaccgtgagaaaagtgacgttgttacaaatgaacctcaagggtcatggaagaagatatcaatatttttgagctcgagtattggaagcatttgttgttacgtcataatctggatgtgatgcacaatgagaaaaatgtgtcagacaccttgcttaataccttgttcaatattcctgggcagagcaaagattgaatcaaatctcgcctagatttgaaagagttaggattcgggccaatttacacccacaagttattggtcgacgaacgttcttaccaccagcttatcatgctataactaaagcagaaaaacaatatttgtgtaattctatctcctaagtgaaagtacctgaagggtactcctcaaatgtctctgattgggtagatatgaaaaaattaataattttgagtggtctaaaatctcacgatcaccatatattgattcaacatattctaccagtgagtattccttatgtgttgcctaagaatgttagatatgcaattacaatgttgtgtttattcttcaaatctctttgttgtaaagtggttgatatgactaagttacagaatttcaagttagaaattatagatgctttgtgttatttggaacaatttttcccgccttccttttttgacataatggttcacctaacagtgcatttggtgagagaggtgaatttatgtgtgttggaatttatttta

SEQ ID NO: 58140 - DNA, 1353 bp, Cannabis sativa
ttttggcatttataagattgaaattggaaaatatggtattattgaaagaagaataagtggttgaaataaaatggcaaaattgtaaccagagaatattccactaagtggtcggccttagtgcgtaattttgtccaatattttattcattttttaatccatataattcaaacttaagccctagttgaaatactatataaggaaaatgatgctcttatctcatccaactattcacttcaaccaaatcaaacctagttttcattatctgacaactagtagatgagagacaccttctatagtattttaaaacctccttcattgttcttcatcaaattcgtccatagtgatagagtgccatgcccacacatagcaagtcaagcactcaatcatagtgcggtaaacggtcgtaaccaacctgaaagagagaaagatatctaggcttagatcttgataatactctgcgacaaaaaggaacaagggttaaaggtctaagcggagggagttatattattctgctgcaaccaatgtaaggtaatctaaactcttatgtatttaattcatattagagatattcatatttaggaagttaatgaaacatgtttgtaagtaaatctagatcctagtaaaatattcccaacaacatgtcacactaatatttatttttaatttttttgaaaaaagaaaaataaagtatttttttttgaaaagaaaataaagtaattaagtcatctaatttttcttttgtatgtatattagtttttacttttttttttatatgtatataaaaaggagtatatttgtttgaaatttatatgcatataattttgggtgcttttacaatgcactcatgcaccatctacttattttgacatttagaagaattttttagttcatttttttttctcattttcgtgtaagttataattatttaagatatcttataaaatttttaaaaattcaaaataatttacaatataagaagcattgtttaaaaatagtcatgagtgcagtactttgtttgaaccctatttttggcgtgttaaattttttgaatttcttaaaatcttacaagatgtcttaaataattctaacgtacatgatcatgaaaaaaaattagctaaattttttttcggatatctaaaaaagataataattcatgggtgtatccatttttagaacgtgtattgtgaaatttcatatgatttttttgacgtgttgaacagagtcatacatgattaacaatgcagcaaatcagaactaccagtgaaacctcctcgaaccaggataactcatcgcctaaccgaagggcatgttttgccaaaccatgagctgtaaaattcttatcgcgagccccat

SEQ ID NO: 58141 - DNA, 787 bp, Cannabis sativa
ataaataaattgcttatattatcatatcaaaattttggttcacaagtcacaaccactgcgctagaaaaatcccctgtaaggtgtgctattatctcttataggaacatttataaatacacaaaagacaaactaattcatcaacctactgaataaatacaatgcccaatcattgtcgacaccttctaagagctaaaaacaagaaaaatgacaagggcttgatgaaataacagggctttcataaaagacggaacaggggatgagaaagaggttaagggcttcggagttgggctagagcttgaggattgttgatggtcggagcatggctagaagagggaaaaagatatcggagagtagcgccgcaccaaacaggggagagagagatagagatcgggaagagaggaattttagggtttctaatctaacatattccttttatacctcttttaagtttttgtttttaatttctttcaataaataaatttagagagaaaatagggtaatagatggtgtaaatggattttttaaaaaaataggctgattattcagctttttttcccttttttattcagcttgttttaatgtattttattatatttattttatattttattatttaattttctatattagttgataaatgttttaattgattggaaattgtaattgaataagagagaggcgtgaaaaactaggacttgtcattattaaatatcttttttatttttttattaatttattaatttattaattacaattgtacttgttttttataaaaaaattaagttat

SEQ ID NO: 58142 - DNA, 1613 bp, Cannabis sativa
aaaatgcctatgatacactagattaggattttcttgaggaaatgatgcaagctttgcaatttcctgagaaattcattagcttggttgtgacatgtgtaagaacaccaaggttttctcttatgttcaatggaaccatgcatggtttctttgaagttaagagaggactaagacagggtgatccgatgacccctttgctttttgttctgggtatggaatatttcagtagaataatgaagaaggttaggaagaaaaaagattttggttaccatgaatggtgtgctgacatggagttaaaccatttgagctttgcagatgatgtgttaatgttttgtaggggggacttcaaaagcatatatttgatgatgcaagctctaaaactgttttctacaacttcagggctgctacctaataactctaagtcagcaatgtactgtagtggaatgagtgaggatgaagtcagaagggtgttagatatgtcaggcttcacaagacaccatgatcctttcaagtacatggtagtgcccatatgtgccaggaagattgctgcatcagattgtagcagcttagtgcagaaaatgacatcaaatatcaagacatggagtgcaaggaatttgtactttgctggcaggttggtgctaataaaatgttttctgctgtcaattcatatttataggtgtcaaataatgttccttcccaagtagattatcaaagaacttgaagccatctgcaaaagttttttgtggacaggaaaaagcttaatgtgtggggcagggcctgtagcttaggagaagctatgctatccaaagaactcaggtggtttaggtctgatgtatattccaaattggaactctgctgccatggttaaacatgtgtgggcagttgaaaaaaagaaggataatttgtgggttaaatgggtgcactgtgtatatattaaacaacaagcatggtgggagtacaaagctcctatgaatgggagttggtattggaggaagatggtggagatcaaagacaaaattaggctcctagtacagcaagatgtctttgctgccaaagagtataaaattgtagatggttacatctattttgaacaggattgggggaaggtttcttggagcaatgaagtctggtcaagattgaatttaccaaaacatagcttcctactatggttagctatggtaaatagacttaaagctcaagatacgctattcaaacatggcctaattgatcacgatttctacacaatctgcaatactgctacagaatcagctgagcacttattttttagctgtagttttgctttagcttgcctaagccgattgaaggaatggatgagatggaatgccactgctacatcactacaaagcttgatgaaatgggtgagaaaagctaaaatttccaggtttaaaagaatatatttgtagctgggattgctgctcttgtttacatggtgtggaaggctaggaatgatcaactttggaaaatagggtgatgatttcagaagtagtgcaacaaacaaagtgggtagttaagaatctaataattcttgtgataccaaaaaagagtaaacaaagtgatagagattggttttgcttgttgaaattaatattgtatag

SEQ ID NO: 58143 - DNA, 1033 bp, Cannabis sativa
gggccaactctgccatcatcattaaattagatgtacaataatggattcaaatttccttttttaaaaaaatatattaaaaagtaaaaatgtttgtttttttaaaaaaatatatttaaaacggatcgggtcagatccgatccgtaaaaaaattaagcggggcggagcggagctgatccaagatccaataagtatccaaatgcttcgaatcagtaatgatctgtcggatcggatcactgacccgatctaaacaaatggatctttttgccatgactagtcaaaattaaatgagtttattaataatgtgttctttctcttttggcagaaattgttgaggtaggttatgactttccattaaaatagtttttgatataagtatgtgtaattaattgatgttcttatatatggcttaatatttttaattttaaattattagtctatgtgggacaatattctctaatatccccttaagatggtggctaattttactcaccaatcttaaatcaccttatcacaagttatgctatttgctagcttatttttgttcggattttaagcgtctttgcaccatctgaatctcgtgcggttggctaatcatatggataggtgtggattgaaaatccgttagcttgctctgataccatgttaggatttcatctcaaaactaattggtgatgagagtgtatgccatgttgttatatattgttgagtacttttactttttacatttaatctatgtaaaataatatattccaatatatcacatttctaaatagtttctaagaatataaatattaattctgatatttacatcacctaattaattaataatgattatatataatgggtttgcagatagtgagtgagttgttatccctgccagatacaaacgtaaacgccttaacaagagagcacaaaactgccttcgacatagccgaaggccttacactatgcgaagaaacatcactagtaaaggaaactctagctcgatatggcggcgtaaaagccaacgagctcaaccaaccgcgagacgagc

SEQ ID NO: 58144 - DNA, 1374 bp, Cannabis sativa
aacacacttgtctattgactttaaaacaaatctgctgagtgcggctatccgaccagttaagctttggacttccttagtttttattggcgatttcatatctagaggggcttgtattttttctcgattggcttcgatactccaagcattaacaataaaactaagaaacttacccaagctgactccaaaggagcactttaagggattgagtttcatgttgtattttttgagcattttgaagcattcatccaagtcctttatatgccccccagcctttctggctttgatgagcatgccatccacgtatacttccatatttcgttcgatctgatcattaaaaattttgttcaccagcctctagtaggtagcacaagcatttttttagaaaaaacgacataactttataatagtacatacccatatctgttcgaaaacttgtatattcttggtctggtagatgcattctgatttgattataccccgaataggtgtccgtgaagcttaggacctcgtgctcggctgtttgcatccacgagctgatttattcttggaagtgtaaaacagtcctagggcacaccttgttcagatcggtaaaatcaatgcataattgccattttttattgggcttgggtaccagtacggggttagctacccaggctgggtagaaagcctcaatgatgaacttgttattacgtagcttttctacctattcttttaatgcttgtgcccgttccttgtccaatagtcttcttttttgttgaacggggcagaaatttgggtcaatgtttagggcgtgagatattacaaaagggtcaataacaaccatatcctcgtgtgaccaggaaaaaatttctaggtttgctcctagaaattttattaaagctgattttacttcgagcaataaacctttgccaattttgagtttcctggtcgggatatttaggtcgatttctacctcttctagctcttccaccggccctacatttgtatttggttccccaagttgggatccacgtcctcgtccccaccttgggtgacctcctattgcgcaatacttttccccttgcttgagctctggccggaggtattttcctttttgaccttagtcagtgcaagattatagcattcttgtgctattctttgattccatttgaggcaccctaccccattctttgttgggaacttgacgcacaaatgaaaaactgatgtgatagctttcgagtcatatagggtcgattggcctaacatgacgttgaaggctgatggaacatcaattatcaggaattgtcccatcacagttatgctccctgaagcttgtccaacagtgaggggtagatggattcgccttaaaggtgcaacactttggctagagaaacc

SEQ ID NO: 58145 - DNA, 691 bp, Cannabis sativa
  modified_base (380)..(380): a, c, t, g, unknown or other
tattattaaattttatatttaattttgtattattattattttaaattttttaataaattattaagtgaacattaaataatatattaaatcttctatcacgatttacaattatatatttaagcattttaataaaagttaatataaaaatattacaaaactattttttttttttataaaatatagcttaatttttatatcccccaatagaaatggtctaataaataccatacattacccacatataaataatgtgagacaaacatacaaattttatttttttttaattaaactacaccaaatataatatttatttcataactaaaattttattacgagattttgatttattagttattaaggataatatatatatatatatntatatatatttatatatatacccacacattactcacatgggaacagtgttgatattattaactaataaggaggtatttggaatgggttaatgctaacaagggaatggtaatgtgaaacattaccttgtttgttttgagtctttagccttagaatgttattcccttagtattaatgttgatactttaataaagggtaagattgaatcattaacttctattatattaatttgaatagaatttttgaattaataaataaatttaaatactaataatattatcatttatattaaataaaatattacggtatatat

SEQ ID NO: 58146 - DNA, 987 bp, Cannabis sativa
tttgaatatatgttgaattccaccaaatttcacataacaaagaaaaatgacgataaattaatttttatatgttaaaatttaaactatatataaattgaaaattaatgtaatacaaggtattaaaaatatatttgcttctagatgggaactatatttttttataatttcataactaataaaggttattttaaaaaattatgtttttgaagggtgccccaaatcatgactacaaatgatgattccattttcatgcatcctcatataactaaactaatcaattaatatattttatgcattaatttatcaaaatttagaattttaaaattttaaaaatcacatagacattctatctaaaagcttccttgcagtgcaatattagtactactaactttccaataattttttatatgtataaataattatacattttcaattttaggtatgtataaataattatatatttctccaataatgcgtcatgctagttagctataatccaaggaggaagaagaaaaaggctaccaataatgtgaatctatagaccaaatgtataagattttgtttaaaaagtaggcaagacataatatttctatttgaattgagattctctaccatataaaaccataaaagagcaacaaattgttgcgatttagattctgaaaaaaagaaaaaagaaaaaagagaattagaattgagattgtgtgaatcatattagagaccttttgtaataaggtggaccatcacctttccatggtgggtctgtttggtcttgccgtcttggacggtggtggctgccacctctttcgtcacttattaattaataaaatttatttattttattgaaaaaaaataatttaattactacttatcaaatgtcacaatatcttattacactttcattattattattactcaacatcttaatacacttgctacataatctatattaaactctcaaacactttgaaaccacttgaggctagctca

SEQ ID NO: 58147 - DNA, 2381 bp, Cannabis sativa
atgtttaaaaatcacgtaatacacctatgctagttagggtgttacaaacaatcttcattaaccacaaacaattacaaagctatacaaaccaaaaagctaggcaacaaacaagaattacataaaacttctctctatgtatctcttctcatggtctttcatatttctttttttagctacatgtaatctataatacattgtttctttgatatcctgtgtaatctttgtactcaaaaatttgttaaaaagacagttgttcctattgctccaaatgcagtaaatcatggctgccaatattgacacatggatccgatgtttcttgtccctgctgttcaaaattagccattgtttccagctttggaaaccagtcgatcatctctttatccccaaccaactgcacacctgctccataacctgttaagaaaaccaataatataaaaacaagagggagttgctttctattgcagcttcatagaccgggcaatggaggctgtcaagagtgatatgaaattgctcaaacttgtctcgagttaaaagctgagagttgattgcttgccaaaagatgaacccgtgcttcggcatgttaagggagcacccaatatacttgcttaactcaaaatgagtttgagatatgctgtgttatataacaaagcagctttgaatcgggttgtaccagtcccagctttagcaatgtcttcgcgagtgaacttgtcccttagatgacacaatttcctccaataccaactagtgtcactcttgagctcataatcccaccaattcttgctctttagataaatattattgatctatttcacccataggatggccttttttgaagaaatggcccaaacatatttagcaagaatggcttgattccacttgataccatctttgaagccaaggccaccaaaagccttaggaagacacactttttctcaagaagccacatggagtttacttttactcccattccatccccaaaggaatccacgacaaagtttttcaacctcctttgtgacactatgcggtaaaataaaaatgctcatccaatagttccttagcccaagtaagactgagtgaatgagttgagcgccctaccggcaaatgagagatgcctagtagcccaagtatggagtctttgcttgattttcttgattattacaccacaatctttcgctttccactttgttggtctcaagggatgcccaagtaattgaggggataagatccttcttggagagccaattctgtcatcatagcttgcttaacatcctctttcacacccccaaagtagagatgggatttattgatgttaatagcaagaccagatgttgcactgaactcatcctgaatctccttaacaacctgaatacagcctagattccctttgcagaatatcatcaagtcatccgcaaaactcaaataaacaatccttagattcttgcacaacagatgatatctgaaattaggttgattggctgctagaagtaatctcctggtcaagtactccattattaagataaataagagaggtgataaaggatcaccttgtcccagccccttcttgccttggaaactcacttacactcttcccttcatcaagaccgagtaagaagtcgcttttaaacatgtcataatccacgagaggaatctacctaaaagtttgaattcattcaaaagcgtctctaagaattctcaattaactgtgtcatacgctttactaatgtccaccttgattatgcatctaggtcatatgtttttccttttgtaattcttcaagaggtcttgaagaatcatgacattatgagctattgatctcccttgcacaaaagctccttggttatgattaatcaatcccggaagcacttgagaaagtctcaaacaaagcaacttagagatgcatttgtatactgttgagcagcaggctattggtctaaactccactgccttggtagggttttctgtcttagggatgagagtgatcatagtggcatgaagctcccgaggcattatacttgtcatgaaaaaaattctccactgctttagtgaattcagctccaatttcagcccacattgtcttgaaaaatccagctccgtaactgtgtggactaggagatttagagtctggaatactgaataaagccttcattatttccttgcttgtaaaaggtttgatcagattcagttgctgctccctattaagcttgttccccatcaacatgaaatcctttcttaagtcttgagtaggacttgagctagttcccatataaccctagaaatgctttatgaagtgccttactacttcactaaaatcgtttatgatctctccttggtcattggtgtaagtaacaatgctattttccatgcttttttttttttttttt

SEQ ID NO: 58148 - DNA, 675 bp, Cannabis sativa
atactattttgaatcttgtatatttataaaagttattaatttgatcttttattttgttaaataataaaatagaccctatattttctaaaatggtattaatatgactctaataataattcgatataaatgtgttatgacaaaactatttacattttctgtatttattcgtgttagaaattgtcttcaaattggttatatttaaaaaaattgtcgaaaattaagctcaaaatcttatttttaccattttaaaaaatacaaaatttattttatcattcaacaaaatagaatgtccaatcaaacaaagtccaaataattttttttttttaaaaaaaacatagtatgcaaacaataatatacttaattagtggaggtaaaatttaagaaattgacctaagaatattagtccacaaaaaataatatatatgtattatattagaatatacttttttaaaaaaaaaagattaaataattgctatatatctcttgtagtataataataataattgttatcccaattttttcaggtcttattatatatttctcaaaagttcatttaacatgcatactttatattagacaataaataacttatttgaataaaagaaattcatctaagtttttgtacattaatttcaatttctatcctatatatgattcaatatatatatatatata

SEQ ID NO: 58149 - DNA, 1354 bp, Cannabis sativa
  modified_base (60)..(64): a, c, t, g, unknown or other
cgaacagatttagaaaatataaacagttttgtcattcggattattattaaattttatttnnnnnaaaaatcagttcaggatcctatttgtactattttagaaaatatgggaccaaaaagaacgagggtgaatgaagagggtggttcatcatcaaatccttctcgggccacttcaaagccatcttttgataagacccgatttgtaagtgaagcgacgcaagagaggttcctcaatttgaaggatatgctttacattgaagaccggtggattgattacaccaataccccattgagatgccaaccaaggtttgaggtgatccgaagtcaaattgaaagcataaactggaccacctttgtggatgccaaagaccgagctaatgtcaccatggcttgcaaattcttagctaattggcccgaaaggaaacatggaatggttaaggttcgcaataaagaagtcctggtcacatctgatgctatcaacatgctctacgaattaccagatcatactagagatgaacaacgattgagagtgactgaagaggatgaacatcttaattatgtggacatagcagatgctgttaggttccaaggattaaggtttcatgaactggatgggtcgccgaatctgttgcataggtgtgaaataaatctcgtgacaaaaatatggctttactttgtgagtgcccgattggtgactagcaagcacttctctgatgtgcaaattgatcgtttaaagtatgtgcacgccatcataaaagggtacaagattaatgtgtgccaggttgttcggggcagttttgacttaatagttcaaggtgccgcgggaggtggagttgggttggctggaataattactgatctctgtcaagcatatgaagtaaaagaattgccatatgacaacaaagtaatgccgcaaagaaagatggatgtgagcatggtgaataggctcaaggagccccatccctatgggcagccaccacctgaggcccaaccacaaggtagaaggtgccctgttgaataagatgcataggaggaggaaaatgtgccttaacaattgtctggtccaattgatccagtgatgcaatacacacatgcccagctcaactacatcattcaacaaaacaatcatatgcagaattacaggttcagaggagcatctatgatgagagtcaagtaactcaaatcaactctcttataatcccgcatgaacattgggatcgaggaccccaactatcttgcgtcacctcctcaatttcacccatatgatcagttgccaccattgaaccctttctaatcggggtctcaggtaagtctctttccctttagttttatttgcacattagggacaatgtgaa

SEQ ID NO: 58150 - DNA, 802 bp, Cannabis sativa
cttcaaaaaaccagcagcaggtgatgtccaattagtgctgaggatgctggtgttgttgatgacagcaggaagaggagagaatctgttggaagaagctgtcttccactggttcagcacagttctggccgtgtttattacttcaactgttgtagtaacatttttattccaaagcaactcattccttgctttccaaatagcccatgacaccataagagcctcttcaaacaccacggcctgaccactgttcaaaatttgctcaacccaggtaccaaaatcagtcgccacaataacaccagtaggcacactagacaagttccaaaccgatagagcaaatgtgcaggaaaccaacacatgataaatcgattcttcctcgttgttgcagcagacacaatcaagttgcacaggtacatgtttggtatagagttgagttagagtggggatacaaccagttattgctttccaagcaaagtgaataaccttaggcggtactttggttttccataaagatcgccaaagattcgattccatatctgcagaccatctccctttcgaaacttccagccattggtagcagctcttgacagagtaaaagccagaattctcatgttgccaaaaccatacatcatttacttcattaacatttaaagggatattcatgatgagatcacgatcccgttgctgaaatagatcatcaagtatttccacatcccattgatccctctcgacagtcatgagttgattaaccgaagcccccacaagaccaggatgtgtacttaatacacacggattagtctgatcaggt

SEQ ID NO: 58151 - DNA, 799 bp, Cannabis sativa
  modified_base (746)..(761): a, c, t, g, unknown or other
tacgagcaataatttcataactctaataacttaataacttatgttatatattaaacaaataaaaatcattatgttaataacttaataacttaataacttatgttaataactctaataattattttttatttaattttattcattatgtcatataaccggttctattttaataaaaatcgatttgaattgttttgtattatttatttttattcattataacactgttatagacccgattctattttaattataactagtttgagttattttgtgttattttttattcattatgttatagaactggttctatttaaactataacaaatttaaattattctgtgttatttatttttattcattatttcatagaaccagttttattttaatttatatatgagacatttaagttcggtgacttttttgcgacgatgacaactttgctgatttttctagcaaatttttcggtatcagtaacttttccggtgacttttctgacaccgatgactttttcaatgacttttctaacgacttttttagcgatagttaattataaattttaccatctttatttatgttcttttgtttaattttccatattttaattattatttgttttttatttccatatcgtttttgtattatttattcctaccatataaagtccattattttccccatatttattaaaaaaaaaaccctataaatacttcagctggccaaataaataaatatacaacccaaataannnnnnnnnnnnnnnnaccacttacacacaccttcaactcaggatccatgcttc

SEQ ID NO: 58152 - DNA, 1179 bp, Cannabis sativa
  modified_base (36)..(43): a, c, t, g, unknown or other
agaagttcatatgtaggttgttaaatcaacatactnnnnnnnngatctaagttcctggtaaaataacctccaacaagaagtgcatgaaggcttctgcggcaatcatgccaggaggcaaagcttctctaaaaagatactccaacaagggcacttttggccaacgatgatcgaagactcgatggactaggttagaaaatgtgagaagtgctagagatttttaaagataccaagagctccacccaatgagcttacgatgatgtaggctccttggcccttcacagtgtgggggatggacctaattggtcaactactaaagggaaaaagtggggtacattttgctatcgttgcaatagactacttcaccaaatggacagaagctgaacccctggcgacaatcacctcgaagaaggtccttgactttgttgtcaagaacatcatatgccgattcggccttccccagaagattgtatcggacaacggaaaatagtttgacagtgacatgttcactaatttctgcagcaaacatggcatcatcaagagcttctttgtcgtggcccatcctcaagcaaatggacatgtagaagctgtcaacaaaatcctcaaggataccctaaagaagcgccttaaggaagtaaaaggcaaatggactgaactgctcccagagttcctatggtcgcataggaccaccaagaaaatggccactgggcaaactccacttgctagcttatggctacgaggcaatgttgtctgtatagttagtgccaccgtctcacagaagaataacctatgaccaacaaacaaatagcaccttgctggcggagtcccttgacgaagtagaagaaagaagagaacgagccaacctaaagttgcaggcctaccagcaaaaggtagcaaggcactttaacaaatacgtaaagagaagaaaattctttataggagacatggtgctctgaagagtgttcctaaacactaaagactcatcagcaggagtgtttggacctaactgggaaggcccttatcaagttacagaaagaactagtaagggagcctacaaggtggtaagatacaacgagaacatggagctcgttctcctaccaagatactaaaaaaactctacaccaaagtagcggttatatctgctcaaaattaaagtaaaaaaagcgctagcacccacagccc

SEQ ID NO: 58153 - DNA, 951 bp, Cannabis sativa
ctcttatcaacccagtcaaagaaattaaccttcccaccctcatactttctgttaccaaaaggtgtgaagaacattccaccatgatgtattgcagtgtcaaatactttagagtatcaaatgtttaattatgaatcaaagaaaaaagatcacaaataagtaacaaattagtaactcttaaaaatttcatccagaaaatcattttgcaactaatttagtcagcaatggaccccactatttttttttgtaagaatatataagattgtgttactgaatggaacacattacaaaaagaatgataggcagccaagcaagaactttgaggcatgaacctttcagccatacaattaattggtcaatattgtgaatgacaacatatatagaccttataacatgagctagtagccaataatgagcctaattaaacttttccaaaaaaatataatttttagaccatttaaacatggggagaaggcatgctttctaaggataaagtaactagaaacagaaaataaataaataaaaattatattctgaattatcacaaagaaaaaaaatccataaacaaattaatctcagatgttttattgatacattacaattacaattacatatactaaacattcgccatggatttattattatgaacaaaataaatattagttaagaggtagaggagtaaaaatgagagaaaaatacagctatagggacagatagtgggataaaagtaatataaaacaacaacagcaaaaagagaaattccaagcatatgtcccctcattcattcccacaatgtcaagttatgttttataaactatatatattattctaagcagaaaaaagactgtatctctaaaaaaacagtatgtatatacaaagtggaacaaaataaaaacttttgtggagaaaataaagaccagattccaaggagaaaatgatgatcatatgtataaa

SEQ ID NO: 58154 - DNA, 2347 bp, Cannabis sativa
actattttaatataagtcaactttcaccataaacaagctagatcttgtctagaattcagaatctaagagcgtgtttggttgtgtttttagtttttaaagttttgttttcaaaagtgagaatagaaaacagtttttgttattttaaaaatttaatggtgtttaacacaaattttttaaaactatttttagattatttttttattaaaaaaattaatattttaacaccatactatgacatgaatccactcggattcgagttcgggtttgttttgggtttagaatccgagtatgtaaacaaaaatgtaaaatataatatgttagacaaaaaaaaaaaatatatttttaaaaattgaaaacattttgatgtatgttttctagttttttaaacattaaaattttttgccaaactacttttattagtttttaaaaactatttttagttttaaaaaacagtttttgagttataaagctaaataacctctaactctctaagagcatgtttggtattgttttttgttttttgttttcaaaaaattatttttaaaaataagaacaaaaaatagtttttgaagtttttaaaacacaagtcatgcttagttagtatattttaaaaacaatattaaccaaaagtgaattggtttttaaaacagaaaacaacattttgttgttttttaaattcttgttttttgtaactttattttctgaaaactgtttttaaaaaaacaaagacaaataattttctgttttaaaaacacaaaaaaaaattttagttatgatgccaaacatgcaatttttttttatgataaagtatgaaaatttcagaaaataattaaaaatatcattttttttttctttcttctgacttacaatctgcagaagtttaaccaaagtttgttttatttgattttggttacaggttttattattcagctttgttctcacaactttgacttacttattaacctcatgtgtaagttatgttatgtatggagatagtgttgagtcacaaatcacactcaacttaccaaccaaattgatcagttcacaagttgcaatttacacaactctgttaattccagtgactagatatgctttgatgttaaccccagttgccaatgccattgaaggagggctttcaatagattacaagaactctagaaaagttcagttacttgttaggtttgtgttacttgtaagtaccacaatgatagcctatgtattcccatattttgagaatcttatggccattgttggttctatttttgtagcacttggttcatttgtgcttccttgtctttgttacttaaaaatttcatcttcatatgaaagatggaactttgagttggttgggaatgtggtaataattttgtttgcaactctagctgggattttagggagttattcatctatagctgagcttgtacacaattattgaaccactttttcaaaagttgggtttatggaatgaattaatgtgtatatttgtcaaatagtatatatttcttttatacaataattataaaatagttactagaaaacaagttgtttcattaactttatctttttgaaaatgagagtgacgtttttcttttaacattttgttcatgtttctttaaaaaagttagaaaagaaataacattatatatataataagacactttagttgaaccttaaatatgtgtcgtcataacacttgagtaaataagattaaatgcatgaagtcatgccatgccatgatacttggcattgtataagttttcaaggtaagcacaacaactagagtcgtttattcattattagtctagaaaaatgtttttggggccaagatagatacattattatataatatggcaatatgcaacatccatggcatttaaattgaatgtatattatataaatataaatacaagacacgtaagcaatgatggtgatgatgaatattatgactcattaaattgtcaaataatgaatccaaaacatatgagatatgatctagctggtgataccactgcccaggatacatctatctatgcattgagcaatctcagtgaaccacactcaatcacaaatatgggtgtgtaaaaagtcttccaatttaataataaccgaattttttaagttatttaataaaatcatatatcaatcataattagatgggatcggatataaactttaagaatctaattagatcggatcgaatcaaataagtaactgaatcgaaccgatccaattatcatccaattatattaatattttttaaaatagattgataattttatatatttaatatatctttgaaaaaaatatattaattgatttaatttatatttaacacatgagattaaaa

SEQ ID NO: 58155 - DNA, 1260 bp, Cannabis sativa
gagtcaaggtagcctcaagtatgatagagatgttattaccttggaagatgttcttgccgaacttaagtcaaaagatttcaagttacagtcagagaagaaattcaagaaagaagaagtgtatttggcaagaggaagaccatccaagaaagtaagtttgaagaataaacaccatcactctcaattgagatcaaagtccagagagaaggaaataaggaagtattacttctgtggaaggtctagacacttgcaaatattttgcaagaagtacaatgaacaacaaggcttcaacaaatctcacaatggagataggaaagactttcgacaccatcatcacatgaaagattttgcgacaatcgttaaagatagtgatgactgctctacggacgaagaactgttctccatctcggagtcatctatgaacaaggagtggattcttaactctgaatgtacttatcatatgtgtctgagtcgagagtcattttttttattactagtcagttgatggaggtaaagttctaatgggaaatgatcattcttgcagggtcattagaactaggaaggtggtcatcaaatagtatgatgacagaatcaaggtgttgacgaacataaggcacatcccagaccttagaggaaacctcatatccatgggtgtgcttgaggatgaaggatacatatacaagtccatgcatggaagtttgaggatcaccaaaggttctttagtagtgatgaaaggtgaaaagatcaatggtctatatgttctccaaggagaaactgtcccagctggtgaagaaaagggctagaatcagatatgaatgtgtgtcatcacagacttggacatatcagtgagcaaggcctcaaagaactatacaaacaaggtataattgaaaatttaaattcttgtgccttaccattttgttaagcttgtattttagggaaataacataagctgaagttcactcagacaaggcatacaaccaaaaagatattggaatgtgtgcacgctaacctttgggaaccatacaagattcctactcactctagtatgcaatatttcctttccataattgattattacagtcggtatgtttggacctacttgttaaccactaatgatgagtgcctggaacaatttagaaatttggaaactcaagtggaaaacaaaaccgatcttaaaattaagaaccttagaactgataatgggttggagtttgttaactctgaatttgacaagatgtatcaagagtttgggatcactaggca

SEQ ID NO: 58156 - DNA, 1048 bp, Cannabis sativa
catataatatgttgtttgccaagtaataaaatgtttactttagtgtagtaataatgtcttaaatgttctgtctaaaaagaaacacagtatattttttaatttgtgcatatacatatatatataaatatatatatttttatcaaaacgaaatagatatacttttaatgaaacgtaatgtaaaagttacgtaggttgatgttacgtgcaatacacgtataattggttttttataattaagttcaattaggtgatgttaagtgcaatacatgtatgtttaatttttttttttgaatttggtgatgtatttttttttatttttaaataatggggtttgagattttgaaaaaaaaaaaaatagctattgctacataggagtttcatttggatattattatatatacatatttttaaaatttttaaaatttttttaattaggtgacgtatctgataatgcatatattgtaatttactatatttttaaccaaaactcacgtaatcaaatttgagtgtgtatatataaactggatttgtaaatttaatataaaggttattattcccaaactttacgaaaaatatagtgtgtgaatcggtttaccataactaaaatagaaatcaatcaagtcgttggtacaaccatttcaatttaaaatataaaataaataataataaagttaaaaatatatatatagttaaaaatatttataatattttaaatttaaatttctttatataaaattgttatactcgaaattcggttggaggacacgtgtcaagataaagagaatgtgaatcggttacatatctttttatggaataattcattaattgcataagtagtagagtatatttgcagcccgctgactgtaaagtcttaggcgaggaatcaatgtacgaactagtacttagagtattaacgagaaaccatatgtggctaaaagagaatagccaggcattagacgagcatctcgctacgaggaaacttcttatagtttcatccaactaacggaagcgagactcataaccatggcaagtcagtagatttccttat

SEQ ID NO: 58157 - DNA, 1498 bp, Cannabis sativa
tccagacaaagtgttttatttttgagggaactttagaattccaactcttacttcagaatattttagaatcattaaaagatgaagaagaggggatatcttgtttagagagagccaaatgataggcagacttaacactaaaaagactagaactctcccaagacgaaataagatcatcttttccatggtgtccagtaacaggtacctcaaggatatcattaacaatagcatcatcaaaatgtctcttaagtttaggcagatcccaagatccagaatcatccatgaaataagaaagcatacatgaatcaggagaaccattgtccttatagagcaaaaatttattattaggtatccaataatcttcaaaagtcctaatctattcccaatcctcaatcttccaaattataccagaagccatcagatctcttcaccaaagaatacttttccaggagtaggaagggttatgattagaagtagcctaaaaaatagagcaattgggaaagtagctagctttaagaaccagaccgagcaaagagttagggctttagcaagcatggcttgtttaaattgaattaaagtcagaaaaccaagtcctcccaaaaatttggactgacaaaaaaatttctaagatttttaatgattttttttggaatacccaaaagaaccccaccataatctagccatcgcagcctcaattcctctgcacagcttgacaggcaacctaaaacaagccatcacatatgcaggtatagcctgtatgacagccttgagaagaatcttcttaccagccttggaaaatcacttagcagaccacttcgtgagagcagagagaactttatctttaagaaaagaaaaggagtgatatttagatctagaaaaacattgagggagacctaagtatttactaattaaaggtctgtcttcaaagcatgtacttgattattatacttttttctttctaataaacagaatatctgctttttgatccaactatgacgacaaccttcagtaattttattaataaatatgtttgatcacctttactttgtagaggtcctcattatacatggtgtgttattacttattaatagcaaatggcatgtgtaatatcccgaaaaatatagtgatattttaattggacatattttattaaatatgtgattaagtggatattagagtaggattataatcctacttaaactacatacgagtcgattagggaaataaaaataaataaagcgtaatttattaattacggggattataatagaatatgtagatatcgtagacactataatttgaataaaataattttgagcttagcaattgtggaacttgacggggaggtctgaaatgtcacgaaaataaagataaattgaatctgattcttataccaagattagttttgagttctaggttgtcgatttggtggattagctagaattacttaaaagcccctaaatttgtaaatggaataagtttagttaagaagggtaaaatg

SEQ ID NO: 58158 - DNA, 897 bp, Cannabis sativa
taaaataactaaaaagtaaacagacaaataataatttaaattagaaagtaaagacataaaacattgatttccctatttcaaattatgaatctcaattcaccaattatccaatttattatataatttgtagtttcaagaatcctaatataatctattaacctccctcgagtgatgatagaattaacataattaactaacaagatatctctattcaatattaataaattaagcaatatgattctctttaaatgaaactcattgaattagtaaaatctctcaatcttaaacttttcctatggcatgcaattctatgtccaattttagattacttgtctcaagtgtaaagcctaaaatttttatactaattaataatgatcaagcattaacaagatgataattaacacataattacataaacaaaaaaataagaacaaatatataaataatctaaaaactttaattcataatcgaaaatagttccatcaacactctagaaaaagtgtttagttcatattcacaaacataataactacaataatcatgttcataattaaataactaaacaaaagaataaagaagaagaagaaaatgactttaatgatgatagtagatgatgactgcttcaaatattttccctcttgctcttcaatgtatttctaatctcaagattgcttgtttgtatctatcctatcgtctaaaaagtagaattacttcattctttatataggccccaaaaagatagaaataatccatttagaattaggattcaaattcaaaaatacacgtacgacggtatagcgctaaagatacggcgctatagcgccatacatgacttctcgatatcacccatgtgctaaaattatcttttttctccgttttatctcttttttttactac

SEQ ID NO: 58159 - DNA, 2188 bp, Cannabis sativa
gatgggaaataagcagggatggggcgggaatggagattaaaatccttaacaggaatggggacggggagagcactccccactaatgccccgccccgtgtgcatccctagtgctaatggtataggtaattatagtgtttgtattggtttgttcactaataggatttattattagtaattaattaaaatgcacagatgcattggtggagtggtccaaatagtgaaaagataggatatttttttttttcaaatttgatttttgttaatatctaattaacttttctgatacattaactaaatattagttcatattttgagatcacgtaccaatctattatcctctactctctagaccctcctctgaagcctcatatccttgctctcaactatcatagttgctttttcttatttcttgatacctaagaaaaatttcaataaaataaaaggttaaaagtaatgcagcaattgaggttttgagggactcaagtttgttgattggaagcctttttcacagtattcgatttctattgtattaaacttttccttgtgtaattttgtcaagtataatttttttttttcgttttcagagaaatagtgtttcgtaaaacaatcgtatctctctcctcgtatgttaatttttagtgatctaagtaccttttcaaagataatttaatgatctacatttttcgtgaagagccttttccctaattttgattatttcagtgtcaaaaattcatgttttcatgctagttgtcgagttacagtttttttagatttccttccaatattgcctcaataaaagtgtgatatctctctcgatatctattcttttccagcaattctgacactgttagaaagataattcgataatccatattttctttgaggaaacctttccctaatttggggttcttacttgtaaaaaattggtatctttacttggttaggatatctcgttttaagttttgtttcagaaaaagtatccttagtaaaaactcaatatctctctcaattttgatccattttaaaagatctttatctcgttttaaagcttaagaaatgagctacattttttatgaaggaagtgttgtctggattggggcgtaactatttttaaaattattattttgggaatgtattcaaaaatcggcatgatccaggattttaaaaaactgttttaataaaatatccataactcctacgttataactctgattttgatgatctctataccgtttaaaaggtctttcgattatctaaaaactttgtgagcagtaggacttctaattcaaacattttataagtcaaattctaagctaaatttgctttatagtaagaattataaatatattgagtttatcggtggtctaagggtttgctaattgttgatagggcgtaaaagatatcgtaagagttaattatagcaaatttgaggtatagaaaaatagttatactttatacttagtactgtttatatggtttgagtacttagtgagactggttgaataaattgtattgaaactgtagaatatgatagtttctgtgaaatagtgttttgtcgacggattgtatatggctgtttaatcacgttccaagtacttgggtgtggttggaaaccacacatgtatggtgatgtggtaagtggggcagtgtacgtaagggtgcactggctattggtactgcgttcaggttaagaacgtaagatactccatacttgtaaggagctggagtgtgagtatgtgatatttctgtattagtgtggctgcctctatttaaaaacatgatggacttgttgtatggttgatgtatatgattgtgctatgatgtgtgagtgcttgtacatggtatttttttctttttacttactgggctttgcagctcaccccttatttactccccatgtgcgaacaagtaagcctgtaaacttttggtggcaagttgagtctagatagcatggggtgtatctcgtgagatcatgtagctgtgtatggtcttggccatctttcgctgaaagtgacttttaaatttataaaacatgacgaaattgcccttgcctaaataatttaaaatgaccaaattgcccttaccttaaagcttaaattataaaatggcgtagggataaaatggtcccaagccataatcccactcaaacccggtacttataatatctcaaatatttatcccactaaga

SEQ ID NO: 58160 - DNA, 1021 bp, Cannabis sativa
aatcttctcctgaagatagtgatgcttattttctccagatgtaagacttgtagaaatattctcccgaagataactgtgcttgcctcctcttaaagcaagacttacatgaatcttgtcttgaaagttgttcttcacgttcttcactttgtagtttaattcacacaaaagtaatctcaaaggcacaaaaactcaccaaggaataacataccaactatcatttacaaaagaaaaaactctcttctaaaaatataagaaattaagaagtggaagagtttaaccttttgttgctggtttaggtgaaatttatagggataaatagcacctaaaattgagctccaaaggcttggatacagagagaaaacagtaattagtttccttacaaaaactcattaatgacaaaattttatatgaacagatatgaaaagtgtgcacatgaaatcttgatatatctagttagcattgtgaataaggctccatcaaagccaagtttatcccacgaattttccttagacatcactcatcctagctggagagattaatgaagatcatatcagaaaaggaataaaataaattaattataaagaaaaataccatatataaatttagtatttattacataataaactattttatttttacttgagtaagaatatattctcaattaaaacatcacaggtcctgctttacaagtaagaaaacaattaggaaataaatgaaaactattctcaaaaagaaaagtcagaatttgttcaaacattcactgcaccaagataatttttcagcaaagtttccttaaataattaaggaaacaaatatacataacgatacaagttgtacaagatttcttgaaaaacaaatcaaattaattaaaataaatattaatacttttcttaaacataaaaagtcaatataagatattctaaataagaaaattgcgtatttatttgacaaatatatataacacaattcaattttaaagaaaaaaaatgcataccaaatcaaaatctcaaccttattttga

SEQ ID NO: 58161 - DNA, 1643 bp, Cannabis sativa
  modified_base (442)..(446): a, c, t, g, unknown or other
cggtataaaaaaaattttgatctaattttttttgtaatattttgtatttattttaaaaaataattgaatattttaaaataaatatcgaattatttaatgtgaatgggcacattttccatgccctcatattaaaaaataataaataaaaatgttaccccacaacagcaaagttttcccaaaaatttaagttaaaactatgaaacttcactttctattagaaaagcttcagaaaaaatgtgttaatcattttatttttactaaagggaatgttgttttcaatttctacacctgtaaaattgtaatgatgctaataagaagattcttcacatatttcttagttgattgagattgacattgaaatgtgggttataaagattttaattttaatttatggtataaatatttaagtttaatttccaattataaataaatatttaagttnnnnntttgacggtaataatacttaagttatatttttggaactctgtaggtacctcaccattaaatattaagtcattatccacgtttaattttttttattggtatatttaaattaattattttaaaaaataaaaatttaatggtttggaccaattagaaattgaatttacttaatacttaatagcaaggtacctataaaagttttagaattataacttatgtattattaccgtcaaaaattaaacttaggtatttatttataactgggagataaacttaggtacttatgccgcaaagtattttttttcaatatatatcttcaagtaaatagtattacaagtatttcaaatttaagtttataagtagcataaatttaataatttatcagtgttttctttttcaaatttaaggcatctttttttaatttttttattattattgtatgcatgatttactcttttcaatttttagaagaaaaaaaatcaataataattgatgaaaaataaaatcaatattctattaaaaattattgatgaaaaacatttgatttttccaagcaaaatacataaatattaatataaaaaacaaaattaatatcatttttccctattttattttgtttttatgctagtggccccatatagtttgtgaataaggagaattgtgttgaggcattaattgctccaatatatgattttcgaaatatataacaacaaattgatagcatgacatatatacaatacaacatacatatataattctttctttaaaacatataattctattagtctattatatatcctattgatatgattggtatatactatgataaatatatgtcaaatatttaggaactatagattaggtttgctattaaatattctaagaaaataatatactttggttttgacctttttttcaatgataaatggagtcacttttataaaattcgaagtctcatatatttatttttcagtaaaatcattgaaatatacagttttgaatcttcatatatgtatttacaaattgaattttagattcgctaattagtaatttttttccttaaattttgatatgtacaaaatcgtacccttcaaacttttttggccgttaaaaatttcccccgaactattgaagttattaaatttaaagactttgtctaattttattcaattttactgtttcagtgattgtttatgtac

SEQ ID NO: 58162 - DNA, 1088 bp, Cannabis sativa
tgaattacaatgtgtatattatagatttatatacacaattatgacagtcttaacaagtttactttcataaaacatattgtttataaaataatttataattagttaccgatttattaacaaaaaccactagaacttaaataaaacaaatatttacgtggctcaccacgtaactttcatctagtatatatatatacagattaataaatttatatttgttaaaataaaataaaaaaaacactggaattttttctgttgttgtaaactatttatgattcataatagcagttgaattctcaaaaaaacaaaataaaattctttaaacatattaattattcatattgtaaattaattaattaatatataaaaggataaaagatagttgctatagatatttataactatacaggttttcaaaagaaaaaaaatatttatactcatccacgttttctacaaaaatatttatatatactcatccttcccaactactagatctacattaaatatataatactaaattttaataaaaaaaaaattttctaatcaaaattttaattatatgctaaatttaagaaaaaaccactatatctacattaaagtaaaataaataaataatttaaaattatagcataagtatagatatattaagttttccacattgttctacacttttttttttaaaaaaaaaaaaatacaaaaaattatttcttcttcctaaaataaataaatactttagaaaaaaaaaataacaaataattttttaagaaaatcacaaatcatacgtgtatatataacaatgatatatgattttttttcacattattctacatttttaaaaataaatatataatatatatatgtattttataaaataatatctacaactaccattactttgtttctcaatatctttatataaagttcaatattattctattcgagaagaaaaaatacaaaaatatagctcccttcatattatttcttttcaattcttttcaaatatttgtattttctaattttgatcatcttattctaatttattcattcatattactttactagcaaaaaattacgtgcgaggcacgtatact

SEQ ID NO: 58163 - DNA, 1940 bp, Cannabis sativa
aaccttcatagtcagcataaccgtttaaggataaaaataaaagagcggttgagtggtttatcccatgtgcataaaattgaaacatggggaatgtccatatttcatgagcacttgtaaatgattagatcccaaacaaaataactaccactctatacacctataaatagtggcagagtttaaagtaaacgggatgacatatttgagagaaaagactatcttttacatttattgagagaattataatctatatttagattattatccttaataatatggactcgtggagtatgtagattttcactacaaaattacgtaaaaaatatctggtgttcattattgttgtcatcaattatgtattatatttattacataaaatatttatatatttagttaacaaaaatctgtgttaacagtttggtactttcattgagagccctagtaataaaaactcaaaaaataccctctttataaacacaattacaaacctatatttatggcagataatacccctcatgaaggaagctatccagaggagactactcatcgccatggataagaacctcagggatcacaaagaactaaccaactgaaacccctcgttttgggaggaacgatggaaatttcaattcagcttgagaacagatcctagagaggcaaagtgaagatgcctatgatcccaccaaatacgtcccattggtggaattagaaaataggcaacttcgacaacgcctggccgaatcaaatataagaaatactaagttggaataagaggctgcgatagccaggctacacagggaactactcctcaaactcaacctgatccatatgtaaggaggccacgaggaagaccttaaggttttaagactaggaggaaagaaaataatcccacaaatgctcaggtagaacaacctagaaatacgaaggatatcccaatgcatagagaaaatcaacccaatacgggcaatacaagaaatgagaagcattgatgtgatgttccaggaactttcgatgaattgcaaacgagggaaatgaacaacctgaaataccaaatcatctcgcatgaatgcagatgcaagatagtcatgatcgggaaactaaaaaattcctcgtaatgttgggaggaatcatggaaatcattcttggtcaggtcgtcccccgaggcatcctcaaagaccttcttgcacagacagagagaatacacacacatacttgagtaggggacatatgtctaatctctttcagagaagaaggccaatgcgagatgagtcacgtgaagctagttcaagtacaagggagtcgcgatctcacatgcacagtaggtcaactgggacaaatagacaaatgcaagacgggaataataatgacattattttacagattaagaaagtatgagtaactcacgtagttacaaacctaaaagtcactccaggactagatccatgagtaattacgattagagacgtcgtgaacctaacctccgtgaacgattaaatctaaggcagctagacctatctgaacatttaaatcaaaatgcaccaatctacataaaaaactttattaaaaagtagatcaacaacctgtggatcccattcagttacgagtaatacaatttaaagattaatttaggaaattccaagatagagagtacgaaaaactaccaggtatgatttagatgaagagactaaaccattccatcctaatatcctaaactcaaaattttctcaaggatttaaaaatccacatctcttgcaatatgatagttacactaatcctatcacccactaaaacaacttgaatacaataatgcgagcaagtaacgtttcaaacaacttgcgatgcatattgttcctgacatcattaacaagggcagaaagtagttggtttgacaaattcatcaaccattccatgactttgttggagcaattgttaaaaggttttaa

SEQ ID NO: 58164 - DNA, 1353 bp, Cannabis sativa
gtatttactattactgtggataattcatcatcaaacaatgcttctgttcaatatgccaagaatactgtgaatcagtggggtggtgcaattttgagaggtgcttctcatattctgaacttgattgttcaagatggagttgaggaatatgaccaaagtataaacaagattagagatgttgtgagatatgtgagatcttcatcttctagaatgcaaaaactaaaagagtgtgtagagcaagctaaaatctcaagcaagaactcagtttctttagatgttgcaactcgttggaattctacttatttgatgttagaggctgctgaaaaagtatcaaaaggcttttgaaaggatggagtttcatgatgtaggatatgtcaaagagttttgcagctttgtaacaaaaacgtgtcccgatgagaatgatcggcagaatgctagaatgtttacgaagttcttgaagatcttctatgataccaccttaaggttctctgggtcaaattatgtgacatcaaaccaatttttagatcaagtctcttttattcatagtcggttagaattttgggttgggaatatgaataattgtaggctaagagcaatggctgaatcaatgaaggaaaaatatgacaagtattgggggaaaattgagggcttaaaccttcttctacttgtggctgttttgcttgatccacgtcataaggagccatttttaaatgtatgttttgagatgatgtgtggtgattcaaaagaagcttcaagatattctacaaatgtaagaaagactttggatcatatgtacaaagagtattgcaaatcaatgtcaatggtggtatgcataattcctctagtactcacattgcagaagataatgtgggtaatgatgaggatgatgatgatgattatgctttgtatagtcaacaatgcgatgcaaagttaaaggccgttgatttctcaaacaacaaaacagaagttgacaagtacttcatagaagcatgtgagaatgacaaccaatctgattttgatattctaaagtggtggaaaaagaatgctggtagatttaagattctttctatgattgcacaagatgtcttcgccatgcctgtatctactgttgcctcggagtctgctttctctaccggcgcatgtgtcattgatcgatataggagttgtttaactcctaaagctgtacaagcacttatatgtactcaaaattggattcaacaaatagcaaaaattgatgttgatgatctgaaaattgaagaagtggaagcattagaagctggtaatatgcatctatattttaactttattttataatcttttcaatggaatatagtaattttgtttttgttttgtttt

SEQ ID NO: 58165 - DNA, 1696 bp, Cannabis sativa
atcaagttctcaaaaaagtgttccggaaagttttttcgtcatcaaaaataatgaagattcaagtaaacttggggagaaaaccacaaggttgagtccttggaaatagggcacaatgcccaggttgacctagggctgggcctagcgctcaggttgacaatcaacctggaatactgcctttaattactcaaatgccaaatccaatgaacctattgaatctagcatggtcaaaaactggctaggagaccccatccttaatttcaaaagccttggaagtatcaaaagtagaatcccacgagctcagttaaaaaggcccagtgcccaagtcaacaaatggcctgatgcactaggttctacttattcgacactgatgtcattttgaccgtcggtctagttttttacgaatccaagatctacaaagttagaagaatcaaattcccaactttgtatttctcatttccagcacacctagtaatgaagagttttgagtctcacatttctgcaaaatagcaacatctgtaagaatcggtgaccagcttcaccagaacatattagtggactaagtgaggtcaaactataatttaggcatcttaaaggacatccttttgacgtttttatacttacccatcatccaggtttacgttagacttcaggctaggcgtggaatgtcaacctgggcgctggatgtcaactggttgtgggacttgatcttcctttagtaaaacagccatagctcacttaatttttatctgattgatgtgattcaacttgagtatttaatttttttcaatgatctatcaagtcacgtctcacactccagatgtaattctaaatctatcatcattaaatttcatcccttaggaagttacgaaaaataagctctggttactcgaagcgggacccgctgggctcaaaaaatttgccatcaccacgagaagctaattttcaccattatatcatcgtcaactgtggaaaacaacttatttttattttttttcctttttttgttggtctccttcacctataaaaggagagttcccgtagctaatttttcgaaaactacctagaaggttagagcttctctctttagactttctctctctctagagtttggagattctaatacttagtctaatactgtaattaccatcttgtgagaaataaaaactcgaaatagacatagtcccattactatcaccatatagggagtgagctactataaattttatgtgtctctctaaattatttacttaaattattaatcatctcaccaatcaacgagctgatgttggtaactttttagcgtcaacagttatgatatctataaaatatctagattaattttaaattttattagtatttaattaacattttagataattatcataaaatattttactaaaaaaatatgttgttgaccttaaaaaatgatcaactgacagatgggtggtatagatctgatgcttgccacgtgctacacaaacagaatgaaaaaacaataaacacaaagatttgttatagaggtttggctcccttgtaatagcgggtaatgacctactccccttttggttgtatttatactgagggaaatactatccagattactataggtgggatctgctatagcgcccttaggattacaaagtgtgaatcagtaggtagatctcaagtattatataacgtaaggtactagacagcc

SEQ ID NO: 58166 - DNA, 1937 bp, Cannabis sativa
  modified_base (471)..(485): a, c, t, g, unknown or other
tactatttcatactaattcattattatctaggcctaacacttttctagcaatttcatgtgctattttattggtattcctttttacataaaaaagaaaatattaggaaaataagataaagaattttagatactaccaataacatttgacaagagagagtagtttgagaaagaagagcaaacttttctctagacttcctgcgaaccaattactacaaaaaaaacatttatttttagtgacaaattttaagtcacagtataatttttttgtgattaaatgtgacttttaggcacaacaaaaagctacttatgaccaaaacataatatttagatacaagttgttactataatatatcacaacaagtattgtgactaaaagaatatatagtcacaacaaattgtgatttttgtgactaatacctttaattacggaccatttagtcacaacataagaatgttaatttataattagtnnnnnnnnnnnnnnnttttagtcacaaattttgttataactaaaagtaaaaaattttgtagtgaatttcaacctgagatatattggaaacatgatagcctcacaccattgtagagcttttagcaaagctataacttcaaccatagttgagttgtaggtatacctagatagcttgtagcaaactctacaacaatggatccattattatcttaaatcacagctcctacacttaagatcattctatccttattcatcgttgtatcaacatttaacttgtatgttcctagagatggaggatcccattgtttatccactaaatgatctttaactgaccttttattagaactattagcctgcattgctttatattctctaatttaataaacaacccaaggaataaaaacgtcttcttcttgtagatataatttgatccaaacattttagagttcatgtctttcaaactcatccataaaagtcctaaaaagattataatcaaaatcaaacttcaaaagcatttaacatatattctttaatattcaagtgcttattataattaaaaagatctttaaagggtgaatatttaagggaaattacatcatatactaatttttaactttttttaaaaaaaaatttacagattggatttctctggtagtttccatgtgcgttgttatacggattttagttgcaatttagattgttccattagttgttatagagatttccttgtgggattctgtaaaaatacaaaaaaaaaatatatattttgaagtgtaaaaaatgaaaaaactccttcaaatttttctacttttggaacaaccaagtaaggaatgggtcacagtcttagcttgattggcacaagaagaaaaaattagggaagatataatttttttattgtacaaatttaaagttgtctgcaacaaatgcttatatactctccatataaaatatttaattttaggaggtaattgagcatgtcaaaggtcgtgattgctagaaatattatttttaatgagttagagtatcctcacttgacctccgggaaagggattgtgcctccatgtgatgcaagaaaaatagaaaacaaagacactgcaagtgtggaaatggagtatggaacgaagctcttggaagaaggttcacatacggaagttaagtgtggaactggaagacaatgcgcaaacaaaagctgttgcagaaccgaaagataacgaagaccgaatagaggtgttgaaaggctcgtgatagaacccggagagagattcacccttcaacaaggtttgcggaagcagacttgattgtattttcactggcggcagttcaacagactaaagttgaagagcccagaagctatgaagaggtaagtagaaagaagtctaaatggcttcaggtcatggattaggagatggattcactccgaaagaacaagacttgagtagttgtgccgaagctagagaacaagaagatt

SEQ ID NO: 58167 - DNA, 1008 bp, Cannabis sativa
  modified_base (165)..(186): a, c, t, g, unknown or other
tcgaggatactaaaggaaactggccggaggaacttcctgaatttctatggtcgtatcagacaaccgagaaaatggcaaccagatagactccatttaccatggcatatggatatgaagcaatgctgcccgtagaactcgagcctttattaataagtaaatctgatnnnnnnnnnnnnnnnnnnnnnnagggcacaaaacccaacagagagtgggaggaagctcaggcttatctcctctggccaagaagcctaggggtggtgagacaacaccgtccagagagaaggcactgactgaggcagttattgatctttccgaggagccaaccgttatggatccttccgccctaaaaacaaccaagtttaaagactctcgaggaggaagctcggacaggttcgagcagtcaaagggcagatccgagctggtcaagagcggacctgagcagatccaggctcctaccccatctccagcactacatccagagactaagagtggcaaaaatatgctcacccactacatgacttggtcagtctctgaagtgaatgagtagctggccggagctgataatgagctttccctagggctggtgattggaggaatcctgaagaagtttacgagggtgagtctttcttgatagtttccttttatccttctttacttagctcagattctaatgttttttctctgcgcagaccggtctgaagatggcttatgcttattcccgggctaagtcgactgcctctaaaaatgctgccatgtccaacaccatgagggcggaaatggacttggccaagaaggatgctaatgaagccagggctcaacttggagccgtccgaatggaactgggtgaagtcaacaaaaaacttcttgctgccgagaagaaagtggctgagctgaccaaagatttagaggattctgatcaacttgaagctgccaagacctccctgtccaaagaagtgaacaacctcaaagaagaaagggaggttcttcgaactgtcttccgcaggttgg

SEQ ID NO: 58168 - DNA, 934 bp, Cannabis sativa
ctattcaatagtcaaatataattttaccttgattataagcatgccctttctacatgtacgtgaccattattatttaattccacacatgatatatagatttcatgcactttgattgtgtgtggtatttcatcttcttgtttctaatttcttctagaaatatttgagtagtaaattattttattgattatttaaaattatttcattcactttggggaatgacattgaacaaattgtaccttattataaatttcttaaaaacttgttaattcatctataaaaatgtaagaaattattcagcaatttctttcacaatatttcaaagaatatatgaatatagttttttcataatcttcaagatgtatacaaaatttgatctttgatatatgttacatgcaataatttctaatataaactttataagtaataacaatgtataataacataactaatataaaatatatgaacactctttaaaattaaataaattcaatttctgtcattctctgcagggaataatgaacaagaattacattttaaataatattagatagtcatgttcattgttattcttatactttgatgtttcaatgcaattttcttaatattctcttttggtattcaaaacctactattaaattgcatcaataataatcatttcaatgattctttagttgtattcatataaattcgattttttttgacaaatctaaaacatttacttcaagaaatgtctactcaaatctataacgatattagattatattttattgtcatcaaagaatataagaacatacatatatatatattgtaaagtcatttttggcaagttagttgacaaaataatttttcccttttatggtaagattattgtacattcatatttgatttcttgccttataaattcagattgtagttgctcttttccttgtttgga

SEQ ID NO: 58169 - DNA, 1196 bp, Cannabis sativa
gcactaaaatgaccataactctctactcgattatccattttcagaaattctaattttgttctcttagttaaatgatatgtgatttaaaaagtcaattttttttcgaaatattgggtgagaaaacttgtcgcataaggtagtgagtatgctaaaatttgaacttataaactctagtgtactatgtaaatcactttaacaagactaaagtaaacttataccatttaattgtatgtagtcttgatgtagatgaagtttttagcttgatttacatattttgatccaaagatgattttcccgagagttgactttgtctttgacttttaggttgacttttgactttgagcttttgaagtcttcttttgaataggatcttgaattcttgatcccttgatgaatcttttgctcatatcaagtatgaagtagttgatatacttgttgaatccagttccgatcacttttgagaattttggtaaatttacccttggagttaattttgccttaaaaaaaaaaaatttattttaccttttaattgtgctacaaaatcgaaaactattagtacaaataatagttaaataattgttaatcatcaaaacaagaagacctaaaagtttgagttaacatcacatacccaaaatacttgtaataaaaccaatacaacaattcaagaacatccacagtttaaattttatataaagataaagtccaaaaattttgaatatggtttttcacaaaaccaaccgtgagttttgaaaaatgtataggtaagaaaatataaaagttaaattaataatttgagctttaaaattagataaccaagctttgatactaattgttaaaaaataattgaacatcaaacaaatcaaacattaacaataacattattttatttaaggcatcaaatgcaatatatatatataataaagattttaccttgtaataatcacaatgattatcaaacttctcttgtgctcatcccactcaaaaacaaatgtgcaaggagtttctatgaacacgactcttctacactcttcacctatcttagccacacacattctacacttattatcaccaaataaaagggtacatctattttaatgaggaattatgggtcaatgggccgacatgcccaatgtgaaagtattaattttcttggtccaatgggctgaccaagcacattttagagtgtgttcatgggc

SEQ ID NO: 58170 - DNA, 1347 bp, Cannabis sativa
tctaaggagtggccttggagacaaattttgtttaccatgtgggctatctccatgcaatggtgcatgagtggcatgagtgtgtcaggcacgtactccaatgacaaattggtattgccaagagaatcattggcttggtttgcttggttatgggtacctccatggttggcccaagcgccatggccgtctccatgcaatggttatgtgcatgtctggcatgtactctaatgtttggtgaagtttgtggtcccctatgcttggtggattgggaggattttggtccacatgcctctgcgcttgctcttagaattctttgttgtggcgtaagctttctgccaactggacacgtagggctttattttcttgaagcgcatcatgcacagtcatggatctgattggtgggagctctctagattgtgatgaagaactttcacattcttggacctgtccctcaatttctggcataggtggcataagacgcttctatcggcccgtagatgttcccggtccatgtggttgtgttgggacaaaggttccttcgccaaggcattgattaacttccctcattggaacttcaacatcttcttcaaaattgttcctcctcgtacccatcaccattgttgtgaaaaaggtaaattaatgaattttccaaagggaaaataatcaaatcttcaccgtggcactctcaaggaaagcaccaaactattgacgcagttttttgtcaattaatctaagaagattgtaaagtaaaagaggaccacggtgaattaatctcactaataaaaccacaataaattaaatggacagtagggatttatagtagttcactcccaggtcgcgatggtaatggggctatgtctaactgtagttttattgattggatttgacacgccagagtgtgtggataaaagtacggtaaatgatttctagatgaaaccttaatgagatttataaatataaggctcatgggagacttgatattcataaatctgatataaattaaaggttgtaaagttcttcggaacaataaaccaatcatttgtggaaaaaaggtatgaatcaatgctgttttgagttctggcattgcttgggtatggtggactcaatgaacaagatgaaggaatcaatgtggtgttcttggttgcctttaagtaattttctaggagtagaaaatccaaaagagagagaggaaaaggtctcaaaaagaagaagccaaaaagaagatccttttcttagcctcctacttgatgtatatataggctcgatggtttgttagtgatccctcatacatcgggatatctcattaacaaaatcatgtataccactcttttttatgaataaaatattaca

SEQ ID NO: 58171 - DNA, 730 bp, Cannabis sativa
attcttctgagaagataaaaccttatagattagatttggaaatacaagtttaaaggttggctttttacctcttcggaaggagacaatctggttcagatagatccaaaaaaggactttacagtattaaaactccaaaaaatttcttgctacttaatggttcaatacatgaatttttttgaatctaagagaggacttaggcaatgaaatcctgtatcgttcttcctatttgtgctaggcataaaatatctatctcaaattttgataaaagtttggaaattggacaggattcaagtatcatgatagatgctccatgctaaagttaaatcatctatgcttctgggatgacctcttattgttctatcatggagattatgtctctgttttacttaagctctgggtctaaagttgttctcagccacatttgggttgctgtcgaatgaagcaaatatagaaattttttgtagtggcatggcttaatcagaagttaatcgggtgttagaggtatctgtcctttctcgaagtcatttgtctttcaggtaccttggaattcttatatgcgcaaaaaaaaattcttctactgattgtaatagcattttggaaaaaatgattaagggtgggtttggaaaggcacactgtaattggatttgtgtgtaattagaggtaattacacaatttgacatgttgtctgaccatgtaattatactgtaactgtgtaattggaagtaattga

SEQ ID NO: 58172 - DNA, 846 bp, Cannabis sativa
aatctccatatttgcgagacatcatgtaagaaagtagttagcacgtagagatatgcgcaatgacgcttatatgcaatatgatatatatgaaagactagaaactaggtttagagttattactctaaagtgagcgatttcttggcttagggttattaccctaataaacagtcattatgtaattgaaatgccacgatgtatatagatgtatattgaaattcacggttatgtgttccaggtataatcaggttggactcggtaactagaaccgagatgaaccgttctaagctcttattgtaattcgacgtgtgagcgtaacacgtaggtctatgcaacatagacataattaggtgtgtgagcgtaacacgcgggtctctgtcatacagacaaatatgagatgacattattatttaggtgatgagttatatatgattatcgatatattctactgtgttgctgggctgggctcacgggtgatctactgtccaggaaagggtaaatttgtttctaatcagccatgagtaggggagttgggcgatgtatgtacatgttcaggccacacaagaccaagcaggttggggtctaccagtgatgatttttttttgtaactctgttttgccgcttaggtcagctattggaaatagacttgtaatattttgtaaattgttttagggatcacgagacatgtaacttttgtttgtttgtaaagttaaaattattacaagtttattttcattccatttgcatttaaagtttaaatttcccgagcttttctatttagtaatcccatttacgggattagggtttcttagttatctttggtaacgtgcctaatagtgagggcgttac

SEQ ID NO: 58173 - DNA, 841 bp, Cannabis sativa
cctaagcggtgcacattaacaatcggtggcggtaaaagtcggtgtaccagaaacatcaccgaaaatagggatagtgtatatcaaaacgaccacctcgacgagtagatcacacccatgccaaccgtttgtcaaaacggtgcatgatgtcaccggaatgtcgctggaaaggggcaaagctaaaaaaaagtgtcaccagaaaagtagcgagctctgtgaaatggtttggtgtaggttgttctcctcgacgagatgagtttagtggtgaagatagctcgtcaaacggacactggaggtgaccgaaaaatccgttcaaagtttgaactcccaaactttaacttgcgatcccgagctaacggcggcgaaagaagcggcgccgcttggggggtgaggtcgccggcacctgggatttcgagtagtccggtgcgtggggctggtcggtgggtcgtcgaagtgtggtggtgatggtggtttgtgggttttcttttttgtgttttgaagagagagaaaaagagagataggtagagagagagggggacgaacgggggtcggttgtttgggtattaatttttttttttgtatatatattattaaatttatttatttattatatctatagggtttgactcggtcaaaccaagtcttcacatccactatcatcaaaaccaagtacaaatcttcagtttcttcaagatttcatgccaatgagtaatttggcaaataatcttctctgtattttctctcttttacacttgaatttaatttctttcttttactaactctctttcttttctcttctcaaaacaatggagaaaattctctctctcacacatatacacacaca

SEQ ID NO: 58174 - DNA, 806 bp, Cannabis sativa
gttcaatatataaaaataaacaaaacataatatgaaatacaaagatttttttaataaaaatgtaaataagtgatacaaagctaaaatatagtttacttaagaaaaatgtactccaaaagataagtgatgtaaaactaaaatacagttcagttaagaaaaatgtactccaagaatgtatcaaaaggtgatttaaatttcgcacatagagaatattgtgccaaatttggcacaatatttgttagagcattttcaatgagaatgcaaagaagtggtggaaagctaaaatatagaccatttacaaaaagtgtgctccaatagtgtgccaaaaaattatgtaaatttgacacatatcaaatcttgtgtcaaatttgatacaacatttactatgatgtaaaatttaaatcataataaatgcactacttttttttatttatatttatatcatttgtattattttattagtatattgaactataacattaaattataaagtatttatattatttttttatgttacatattaaaacaataataaaaaattgataacaaagttattagttattatttttgaataaaaatattaattaaatattaaattttacatcgtgccttggaccacaatactaaattttgatataaatctaccacaaaacaattcttacatatcccattagaaatggtcttacgataaaaaattttgcatcaccataaatgcacaattttattatcaacttttatgtcattttttattattttattagtatatttagctatagcattgatgataaaatatttctatttttttt

SEQ ID NO: 58175 - DNA, 1228 bp, Cannabis sativa
atttagatatacatactgaagttttgcacaatatgttttgtggaataagcttatattggctttgaatttacaatttctttgctttgataatttattacatatgggctaggctgtttgttttctaatctctgctcttaaataatagtcattggcattaaaaattctgattataataattgctttaaactaagaatgttaggatcaacctgttcgttgaggttgtcactgatcaattttatctaattagcgtgcaatgtattaagagttagtcccgcattactaatgtgtggaaataaattgtgatatataagatgaataggctactcctcccattaccaattggttttgacatggaacctcattcatcttatccccaaattctaacacaatgatgatgtatgaatgctcacgagggtccaacaaagtttttatgtactaaattctagtgtcaagctgtgactgttgatagcttaggagtatgaggctgcagaagagaccctaaggccaactctctttttgtatgtattgcagaataccaaaatttagtttcttgtcttaatgtaatttatttgcaattgctaattgtcatttgaaaagtttctaatgacttcagtactggttttgaatgattttcaatagcttattctggtccaataaacttaaacttgagcacttactccattctagttcattaagattctagttgacctcttctattatggttttgtatatatactttttgtccactattcgtagattcatgatgaatgcgaattcgtttcttcaatgtgtattggccaactcaatgtgttataaattttgccttattttgttttaaacttatttttaaatcagttctacttagtttgactcacattttaaaatagagatgacccttttatataaactaattacaaaacttatcagaaagatatgagattgctccaataaatattgtagatcgtattaagacttgagagtatatatattaacataggctatctatctctgtatggccattaaaattgtagagaaaaaaaagagaaaaatagaaaagaaaagagtattttcttatgatcattaagggaaaaaaattgtgatgaaaatgatttccttatagaaatacttttattgtttgacaaaatttgaagaaatatttttattgtttggtttttcatctatcttatataaagaaatgcaaaacagagttaatactcgaagccagacc

SEQ ID NO: 58176 - DNA, 798 bp, Cannabis sativa
ggtttggtttcaataaactgtgggtaaagtgggaatgaatgggatgagttgggtgcctcaaaacaaaaaaactatggtatattaaactttccaaggcagtatactgccaaaaaaattaaaatgcaaaaatagtataaaagtaaacttgagcgtgtaacagtataaacgaaaaaaattgggaaaaaacagtaatgggtgtaaaattaatctttatcaaaatttgctgagaaatgctataaggcactagtggtatttagcatcttattatatgctaatatcgttattcgtttaataaagtatcgagtctcatatagtttgatgtaataacttttaaagaatatcataatcaatcataaaacgacatgtttagaggtgttgaacgtactactggtgcccaataacaatactcataaaacatagaatacttcacacaaactatttaaaattgaactgtttttacattttaatttttatagattttttacttttttcttttaaaaaaaatattattttcatgttattttttcgtaacaacaatgtaaaaataacattgctttataaacaacataaaaataaccatccaaatttttattaaagtttaaatctataaaaatacataaaattaaacttttgaacgactccatttaaattcaaaattaaacttttgatttatagaacatgtttttcataatgtatatacgctttatattgtttaaagactattgttattgagcactagtgatatccaacactttttattagtaacgcccaatgattaattaacgatattccttaaaa

SEQ ID NO: 58177 - DNA, 2089 bp, Cannabis sativa
tcaagttggtaagattaagccctcctgtggattgtgccaaggcgacccgctatctccttacttatatatttgggctgttgatattctttcgagattattgaacgaagccttggggaagggagttattaaaggaattagactgagccaaaagggcccgtttctctctttgcggatgacatcatcttggttggtagggctaacctagaagaagctagaggaatctaggactgcctggaagagttctgctcttggtcaggccagcaggttaacaagcttaaaacatctatttttttagtaagaataccctagatcaggttaaaaatgaaattaaagctattctgggtattggagatgtggttgcaaacactaagtacctgggactccctcttattaggtccagactaaaggatgcagactacaacttcattttggaaaacctgacagccaagctgcagggctggaaagctaaaactctctcaaaagctgttcgagcgaatcttattaagtcggtgggtgtatccttgcccagttatgccatgcaaactactcaactatcgaatggacttatgcataagattgatggcatggttcgaaacttctggtggggttttgagaaagacaatcacgggatgcatcttaaggcatgggataaattatgcctccaatcccgtggaggtctgggttatcaaaaaatgaagaaaatgaacctacctggctttctttcctggccaaatgggggtggaacctgttaactggaaatcagtctctctgttgccgaatctttgaagcaaagtacatgaaaggaaaagatttcctctcctacaagttcaataattcagattcgtggttttggaagaatgtggttaaggccaaggcaattttgagaaaatgggcttgcaaactagtaggggatggtaaggatacgagaatttggaggatccctggttacctcatggacgagatttctaccctaaggcaagaaatgttggagagacggttggcttggtttgtgatctcctttcggaagatggagattgggatatgcagaaattaaattctctatttgagaaagagtccgtctcgaccatcctaagagggggaaaccctctagtcagggttcagataagtgaatctggactaaagagagtaatggccgattctcgtataaatgtgcttatcgtatccaagcctttgatagggcgccccacatcaatgttgctccttcgctgtggaacaagatgtggaatagtaacattttggaacgacataagatgatgtggtggagcattctctcaaaagctctatctgttcgtgctattatttccaaaagattctatattgaggatgcatcctgccccttgtgtggggctaaagaggaaacattagaacacttatttctcaattgtaattgggccttgcacttgtggaaagcgtccccgtgggggatttttccaatatctggttctggtgttcatctgtggtactgggttaagttcatctgagggcttagaaaatagggcattaatacagatgaagttttcctttatgcttcgattgtggtcgacaccatttggcagacgcaaaatgataaggtacacaatagaagtctatccaatcttgttcagtgcattgactatatttatagctcttatgcagattacagtgcttctcttttacccacacctctgccgattttagatgtttgttggagccctcctccttttgggtgggtaaaactaaactgtgatgttaagttggaatgtatagcatgtgtttagctgttgtggcgagaaaccatatgggatttgtgatgggggttcactcgtctagggtggagttctctgatgcgccttgtggtgaagtggttgcttgctgtgctgcgctggaatttgccaaagaggaaggctggaagtttattattattgagagcgattctagagtggttatcaactccatcaacaatcgaaacttttgctgaaatattgagaactactctaaattttgtttaaaactctctcggattttttacagttgtaattttcaatttgttagtagaaattgtaactttatggcacataatgtggccaag

SEQ ID NO: 58178 - DNA, 605 bp, Cannabis sativa
ctcacacacttgactgtatccccatcgtggttactaatgatcacaatgcctctctccttgctcctttcaccatggatgaggttgaatgtgcccttaaaactatgagtgcggacaagagtctgggaattgatggaatgtcagttatgttctatcaacaacattggtctattgttagcgaacttgtctctcgtattgtcctaagcatcctaaacaatggcgctgatccttcaagcattaaccacaccttaataaccctcattccaaagataaagaagtcgcaccatatgaaagactttcggcctattagcctttgcaacgtcatctcaaaattggtcactaaaatgattgttgcaaggttcaaagaagtacttccgctggtaatttctgaaacgcggagtgctttcttggctaatagattgatcacagacaacatcttagtggcttttgagttggttcatactataaaaaacaaaacatctggacgccatggcattgcttctctcaagcttgacatgagcaaagcttttgatagggttgagtggaaattcattgaagaggtactgaaaaaaaaaatgggtttcgcaagtggttgggttggacttatt

SEQ ID NO: 58179 - DNA, 1997 bp, Cannabis sativa
ttcgaattgtccatactgaaagtgtgcttttcaagatgacgtgtattattattgttggtaataaagaggatcatttaaggcagtgtaaatgtgcctaatttaggagataattttggcaacaaggcaactctatatatagctgaaaatatttgtaacccctatgtgagaatcaaaccaaattttcttgagtaaaaatcatgatagtgtaaagttgagagagagtctaaactagagagagaaacttcttctcgtaatctctgagaagtttgtgaagattcttgtaatcttgtatacactaatatcaatcaagatatggttgttgttgttccaaccgagatgtagagcattgcacatggctcgaactcgttaaacttggtgttgttcttttatatttaattgtgttgtaattaagacacaagcaaactgttagtttgccacatcagcaactaacttacctaaccaactgaattcaattggtctcgagtcagctgcaacctactcctataaaagggactctggtctattgttttaggtacagttttgatgcattgtgagttgtctagagagagagaaaacaaagagagaaaacacatacagtgagagaattgattgagggatgttaaagggattgtccattcatgaaatggcttccctcatgtgaggattgaatgtaactcgtttctggttgtgtaatagattgtttttctggtttatgtctctctctcattgattgtaatcaaagataattcagcaataaagattcttcttcacattcaaaactttgcctcattaattcttgatgaattcgattcaattcattctcatttcagttcatagttaattgattgatttgatctcttgtttttgttctgttattacttgaattgtgttgtttctagctgtgttcttgcacaacaaattgcttaattcattatcttgaattcttgagatttcttggtatattgtttttttgatcgtgttgcatgtttgttggtactataaactgaatcataagtcattgattgttccatttcacacaataaacttgtattagagctttgtttttaatcatggctgccgcgaaatacgatgtcaaaagtttattggtacgaatgactttggattatagagaatgaagatgaagacactgttggttcatcaaggattgtatgaggctctgctaggagagaagactcttccagaactgatatcttaaaaagacaagaaagagactcttgcaaaggctcatagtgcgatcattttgaacattagagataatgcttagagaaaggttgcaaaagaaaatacagtcgcatgtgtgtggttgaaacttgaaagtctgtatatgactaaatcatttgtgaatagattatatctaaaataggccttgtattcattcaagatgatggaagacaaatctgttggagagcaggttgattctcgatcttgaaaatatttgtgtcaccattgaagtcaaagatcaagctttgttgtttctaagttccttacaaaagttatttgtgcactttaaagatacaatgttgtatggaagagagtcgatcacactcgatgatgtacaattaaccttgaatttgaaagagctgaatcaaaggattgagttgaagaattttggaagtggtgatgaattgtatacaaggggaaaaagtgagaaaagagaaagtcacaaagattcaaaagaaaaatcaagatctaaatcacagtttgataaccagaagaatcttagatgttggatttgcaagaaaatattacatcttagaagggcatgtccagagaggcataagacgggtgattcaagatctaaaggagatgcagcagtgagtagtgacggttatgactcagctggtgctttgctgtcttgaattatgggtgttcattccatatgacaccgaataaatcttggttcaaaaaatttacatcttgaacttatggggctgtgtatcttgggggataacaagtcttgtaagatggtaggaatt

SEQ ID NO: 58180 - DNA, 1235 bp, Cannabis sativa
ccaaattttcttaaatccttgtcgatcagttgatattctttaagaggagtgtacatatcagatcgtgttctaactaaagttatttctcaaacatattttgagttattataaggttggaaactgactttagaaatatccatatacagttagagtataattgtcaaaggatagaactggatccaaataccataaataaacattttatcataaatgctataaagtctaaaggttacatattttattatccatctcacaacaatagaattgtggaatcaagaataaacttgatcaatgagagtgatcgatctaggaacctagtttttaaaaaaattcatttattttttcaaacttctaccacgagtattaaattaattatgatttagaacattccttaagtttaatagttattgagaatcttaattaataatccacaagtcattgatgaaattttaataagtcgtgttatttagtaattacttacaatttctaaagaacatacatttttaaccattcgctctttaagagagtttgttggttcatccttaagatgatttattagaacaataagatcaatatttctagtgattacattatatacaataagagttcaactacaatattaattttagacacaaattaaattgtagaatgcaaataattaaaattgttgtacaatatgccatgaatgaagaaataaatatcctaaagagtaatgaaactatctttagtaaagttgcctaatgggttggagaacatcaattaagcataattttttcatcaataaatactcattaggcaacatggagaaacgccaagattcatggcttagaaattcattttgaattaagaatcaataacaaatgagatttacattttacaatagcttcaattataataaccttgatatttgttgcttatttcaattcattaatcaattccaaacagtgaactagagcagaaggtatacagaaaactataaaaaatttcctctaatagtagtgatcatatgcaagcttatgaagtctacctatatataaattaaaacaaacatcacaaatagtactttaattatgtcatcttttcttttaggtttgaaaagagcactataaaatcaattatatataccagaaggtcagtgggagtaatatttgtttcacatatagagaatatttcacttgcaaataatgaaaaaaaaaatttctatataaggtgaaataattcatatctcaaattat

SEQ ID NO: 58181 - DNA, 2679 bp, Cannabis sativa
actaaaagtagtaattttttgtagtgagtatcactacactaaatatatcacaattattagtggtatagtgtaaaatcatataaacaaaatctttttgttgttttatgaaaaagattattgattaattaaaagggaatgaaacatttgtacttggtcaatttgatatcattttcactaacattaccatatatatatatgtaactttttctttgtcttcctttttcaaatatatcattttcataagttacttacactaatactcttctttgaattgaaatagaatctctttagaaagaaaataatttatcatattttgtatcttttacataattttcattattgagttagtcgtgttaaaattctaaaacacttgtataacatgcaattatgttaatattcaataccatacgcaagagcactatctcgaaagaggcctaataatgtaaaaaattatttattgtaaaatttgaaatgaaaaattaatcaaaaaaaattaaataatgcatatgtttgaacatgaaaccttatgttagttttttgaggtcgatgattttcaaagaatacaagactgagtattttacttcattttcatttatgatcgggaagaagagaaaatatatgatatttaatgtatagtttattagttttcaatgtttctaatagctcatcaataaattttaaaaaaaatagttttaggtatttacacattaaattaatctaaaataatttatatatttttttggatcgattaaggttttttttttgtattttttggatttttattgtttgaaatattattttatgactaacataataaaatacaagaacctatttggtaatattgtatttaattaataaaataggggtgtcttatttatgttacaaggtgatgatattttacatgtgtataaaataaaaaatatatatttactataaattatttaaattttatttttgacacgttaaattatattataatttctaaaaaatttacaaaatatcttaaataattataatatactataatattaaaactatgtggatctcaaaaatttttagagaggaatcctaaggcaaatacaattacaaatatatacaaccatatatattatggagatcttcatcagagctctagaggaaccctattgtgtgaatgttgagacttgagtattgagtgagtaaatttgtttctgcccttgtcctctccgacttcaagagactaagcttgacaaagatggaaaaaaattagaatagagagagacagtggtgtggggagtttgaacggtagccaagtcgacgaatgtagctggttgtggttgtggttgtggttgttggtacgctagagtgagagggagaaagaaatgtagagagagagagaagtgttttaagtttgttttttaggtttagcttagggattgatttattttagaattaaaaataaaaatatatatttttttagtttttttccagtccttcgagtttttgggtgtacactcaattcagttttgtgttgatgtgagaaccgaaacttgaacctgaaaccacacccaacctcattagttttgacttgaatacttattattttttcatttcagcatcatgtcagtgcgagtggtcagattttcaggtcaaaaagttcagccctactaaaaagataaagggaatgtatgtacactaaattttaggaggtgtgccataaaataagtatccggatatcaaaaatacgaaaaggatacctaaatagggatgtaaacggggcggcggggattgctcccctacccccatacctgcttcctatatttaccctcatacccgtcccactacccgtttaaattaaagcgaggacagggcagggattacccaacaatgaaagaattcctattgggtacgtacccattacatatatatcttttaaaacaaaataatgcctcaaagagaatttttttaaaaaaaaaaatcatcataaaaactcattaaaacaaatataagtggaatagtgtatataaaatggagttagtaaatataaaattggtattaaaaaataagtggttaagtgtcattttttataaagcaattaaatgtgattattaccataagcatttatatgaaaattgaaatgtctctgttagaattttaaaaaatctgcaatctcattaatataatcaataaaaagcttaaagcatgaaattattttaattataatagttatgattttaaaatttaaaatatatatcatatcggggtaggtatctattcccctaccccaaacctgattcgaatgtaaatattcaaacctatatcactcttgcccccgaaattcgacctccaccctcatctcattaaaggcgagttcccaaacctacgagtataattgctatccctatacctaagtacacaaggaatacactcaaaagcactcattaattaatgacaattggttcaaaaactaagaagaaaaaaacaaaagaagttggtctggtctgaacatataaaaagaataaaaataaaaaaggtaacaaaaacaagaatgatacacacacgagtttaattaatattgaaaagatgtgtcagaaaattgactttttttttatctttactttatattaaaaaaagaaaaaaaaagaaaaacacatatagtgcaaattgatgtgcacatataattcttttttttattattat

SEQ ID NO: 58182 - DNA, 810 bp, Cannabis sativa
aaaaaaaaaaaaaaaagtccaagtacagaaagggggaaatagagaagagcataggaaaggttgcaattacagagaaggaagagagaagaaagaagtctttgcattttgctttctctcatatcattgagaagatgaacggcggtccatctggtttcagtcagtacaatttctctttcactttcttcaaaatccatctgatttttgttgttatttcttcttttctgatttacttttgggaacttttcattaactttgatccaatggcttcacagacaatgctccagtcacgaggacattcgttatcgcctctgctctcttcaccatcttttttgggatgcagggtcgctcaaataacctcggtttgtcgtatctggtacttctttgttattttttgagcgtttgattttgcaattcatgttaattgaggtgtaatcggaaacgggatttgtaccaacggagtccaaatgcattaaaaaaatatactttttctgttctctaatgtctaattgtctataatgtttgattatgagttctgaccgtgaagagattcaatttgctctttggattttgtagtgggtaattcgtaatatttttggagtattttcttttatgattgtcatttaattttcacagctataaaaaaacatatacttttgtaatatttattttttggatgtctattactttgctcggatgaaaccaggatccctgtgctttttctatgggataccttaacttgtcgtccatgttaaatgggccaaacgattgtgtctcttgatagtgcttttaggtcttgttttctcaatatta

SEQ ID NO: 58183 - DNA, 1577 bp, Cannabis sativa
aatttattttatcatttaaaataaataaaagtgtacttttaaccactaatcacatttaattaatcatttaattaaataatcaaactgggaatattaaattacgaaatttcatcttagataactcaatactgtccctattgccttccaatgattcacacttggattactaggaaacctactaagtttactcatcataaatgatgaatcataccttgtacattgtacatcatacataaagctccttgtagcactggcatactccaattgagccaccgctctaacactatttttaatagcagtttactatggtcgaatggtatgttggcctctttaatctttagatggctaaacttatccaacactttctcaatatagtatgcttgcactaaagcaaaaccccccactatgccttgttactttgatacccaaaatagtatcaacttttccaaggtcattcattttaaaggtttaagaaagaaacctcttagtttcttttattctcttcatgttatcactaaggattaacatgtcatccactataggcaaaaagttatcacataattcttacaagttttttatacaaatacttttctccattgtcatccctaaaatcatttgaaagaatagcattgtcaaacttgacatgccattattttgggacttgttttaatccacataaggatttttttcaatctacacactttatgttcattatttggtaggacaaacccttcgggttattccatatagacctcctcatcaaggtcaccatttaagaatgtcatcttgacatgcatttgataaacatacaaattgtgtattgaagccaaagcaaacaatacccttatggtagttgttctagcaacaggagcatatgtatcaaaattatcaataccttctttttgcctaaaatctttagctactatctagctttaaaggtttgtatagagccatcagtgtgatatttctttctaaatatccacatacacccaattaccttagatccttgtggaagatccataatatcataggtgtcattggagagaactgagtccatcttatcatcaactgctttctccaaaatgtactatctctcgattacatagcttctagaaaagtctttagatcattctcaataagaagtatttaaggaattttccttattacttattctctacttccttctactatttaaaaggaaattctttgagaatatatctcatccttatttagacttttctcttttctcaccctttgacctctcctaagtttaatgggttgctctacaaccttaggagtgttctcctattgagatccctttttagatgtagaatcttgagaattattttcattgaaaatattctcacctagaggtgtagagctttgaaagttgtcctcatacaacttattctcaaaaaattctacttctctagattcaatcacattattggattccacatctaacatcatatattccttactattgttggcataaccaacaaatacacattttatggctcttaaacctaacttagttctatttggttcggtcttcttacaataagcaagacacccta

SEQ ID NO: 58184 - DNA, 917 bp, Cannabis sativa
tatgtgtcacagtctagcactgggaccatgtcacaactacttttaaacaaccccgtaattgaaaactttgaacaaatcaaatgtttaattatgctatttattatcagaaatgctaaagggcactagtggtgcctaacaccctcctatatgtcaatattgctattggtccaattaagtatcaggtccatataatttaatataatagcttttatggagtatcggtagacaattgcaacgcaacatgtcgcaaagttttatatatagattcctataacccatgttggaccaattaggacatattcaaagtcgtttcactcataaaattataaaatgatataaagacaaataatggaaagcaacaaaaaaaaaaagttatgtgagggcaatgataccatggtgacatattcaaaggctagcttggtggtgagggagggatgagaaaaagggagaggtcatgggttcgaacccaggacctttaagctattaagctaatatatgattgtaaaaactattacgctacactaaaaagaaaacaaaaaaaaacaaaaaaaaaagtttctataatttatatataaaactaccttaatacgcaagcagaaatgattttatgtgagtgcaaatgtaagaagcttcagctgtagatgtagtcagaaaatgttgaaaaacatgtgtagttaaaaatatatgaggggcacactaaaaaacaaaaaatactttcgtcacactataatttttttttactaaatttaacttatattcataatataatatttaaatataaattatcattaatttaatttaattacaataatttacctttagtcaccacggtataaaaataataatttaaattagttacacattttttatttttaatcacaaactttattgacatatgacaattgtagagaggcagg

SEQ ID NO: 58185 - DNA, 998 bp, Cannabis sativa
ttggttaacttgtccctcatcatgaatactcctttgcaccatataattctgcatgtgattattttgttgaatgatgtaactcaactgtgcatgagtatactgcatccccagatcaataggcctaagcagttgtgggggctcgtcctcctcttccttgacactaggctctcttcgccgcctttggccttgttgttgttcatcagcgggtgcttgtccataaagattaggctccttgagcctgttgaccgtaccgatatccatcttcctttgctgtaccacagtattctcatattccaattgaggcacgtcatatgtcccgcaaagattagtgataacgcctgccaaaccaagaccaccactcgtggctccttgaacaatctgttcaatgcttcctcggataacttgtccaatgttgatattgtaccccttcatgatggcgtacacatatttaagtctatccatctggacatcaaacaaatgtttgctcggcaccatccgagcactcacaaagtatagccaatttttcgccaccgggttgatttcacatcagtgcagaatgttgggcgactcgtcttgcccatcattatcgtggaacctcagtcccgggaaccccacagtttcttccacatctatgtcaaactgttcttcctcctcaataattcaaaggcactgatcttctctggaatagtccgagacagcgtacatggcattgatggcgtcggttgtagagggaaccttcttaccccacaccttaacatccccatttcttcgctcgggccaattcccaagaaattcacatgccatggtgacattagcccagcccctagcatcaacaaaattgccccatttcactctttcaatttgggctcgaattgtctcaaactgcggttgatgcctcagaggtttgtcaggaaattcaatgccccagtcttcaatgtatggcctagccttaagcctaatgaaccggttttgtgcagcctcactaacaaaccgggttc

SEQ ID NO: 58186 - DNA, 1078 bp, Cannabis sativa
aagaaagttattaattatatatatatgatatattcctaataactctaaaaaagatttaaaaataataataataataataataataataacggcaaaaaaagaaaaagttattctaataaaaagcagtattatagatatcattttcgagagatttaagtgtcagaatttttatcaaaaataaaaaaataaaaagacttggtgacaaactttgtttgtttggtgacttctattgatgaagttaaaatgttttctttttcattagattattaacgattgaagtttagaaggaacacaattttataataaattatccttgtcagacacaagtttcagcgagaagataaactatctcattacaagctgtaaggtaatatctattaatgtaattgtggattgtaatttatctttatttttttatttattattaaaaaatttatttagagttttttatagttgaattttgcaacatggctattatacaattggctaagtggtaagtgctaattgcttattattattctctattacttttttatttttattatgtataataaaacaatttggttgatttttgtagtaatactaaaatgtcacatatgtgagtttgtcttcaaaatttaaatcaaattttatttagctgtaataaaatagttgcatacctcatttatattgttcatttagcatatatatatttgttattgataaaatgatgtattttttggaattcatcaaagaaaccaaaataagaattttcttcaaattatttatcatcttgtataggattgaaggaattttattcatttatttgtttgagatttttagtttactagatgctgtaattttatttggtttaatagttgtaattttatatttatggtttatctttaaataatcctatttgttgttttcttatattgttcagtaaaatatttatgtgtgttttatccttagttcttagtttgtgctttttttttgagtgaaccttctcaaattttacgagctcctagaagaagtttttgatgtaggcattactgtggaagaaataaaaggacatttatctttttttgatgggaagttg

SEQ ID NO: 58187 - DNA, 1360 bp, Cannabis sativa
acataaatactttatatcacatatattattcaacaactattgtaaaaaaatttatagttatttgtaaggtgttaggtaacatggcagttttcggtgccattggtacctaatagtacatcaaacaacctaaattgcataaattaaaaccattctcatcacatcgcaccatattaaattttttcacaaaatatatgagaagtaaagtgagtgacatgcattgagtttcacatgagataaaaatatttccttaaaagtgaatataaagtgtaactatgagatttggattcgggtcttaagggttacccgattttgtacgcatgatttgattgtgatgtcacaaaaaaaaaattatttaattaaataaatattatttattatttattttttattttttaaatacgttttacaaaagtagtaaatataccaatgatctaaataacattcttcttacagtttttatttgatcgacttaacatctatttaatttgtatcctaacaacggcataacacatctcttcaacacaaaaattctatcctattcaaaacctttacaatttctcatgtaaatatttttggggtgttacacaacgatatcgttcgttgcagaactattcgtatacagagactattttacacaggagatgtcgtggttgatagactgtcgtgcacacttcgagcagaactgtaaaacaacttaaagagatcgacataggctgcgactcaaccataactatcaatcggtaaattcattcatgttttaattttctactatggcgttatgttctactatggctgctaccgatgaattttttggttctgcttctaacgatattaacaagcctttttgttttgagagattgcactttaagcgatagatacaaaatatgttgtgctacctgaaaatgaagaaagttactttcattctcactgttctaaagcatgttgcctccgaaccttccactaataaggaaaaagaggctggatgcaagaagtaacagaaggatttagattcatgggttaaaaatgactttttctgtatgaatttcattcttaatgatttatctaatgctttttttttttttaattattataactcaaataaattagccagtgaaatttaggatgcgttacaaaagaaatatgacactgataagacgataactaaaagatatgttgttagtcgcttcctgaagtatcaaatggtggatgacaaatccgtagaaatctaatctcacgagcgttagaaaatcaaacataagattatttcaaaaggtgtgaatttagatgaacaattttaagttcatctaaattcatttattagttaattattttttaaatacattttatagaagcagtaaac

SEQ ID NO: 58188 - DNA, 644 bp, Cannabis sativa
tggaggcttgaagcggggacgttacattttgataacttttgtactattaacattatttttttttcatagaatttattgttataactttcgttctcttttcctattgagttagtgatggttaaaagacaactataaattgaaaaacaattaaaacacaacataaaaataacaaaataaatgcacatatatacaacgaaaattattatcttaaataatatacacgataaaaatacacataaactaaacaacgactgtacaaaaaatactttaaaaaaactatagaatatatcaacaacaacataaaaacaaccataaaataataaaaagacaactataaatcaagagaaaaataataagaaattagtcttattaaaaatacaaatcattcataaattaattctgaagatataaactacaaaacgtgaaacaaaatatactatttttattaatcatataaaaggtagaaatatataagagcgcttttaattttttttaagagaaaaatagagtgtcaaaaaatgagatataaaatgtatacttattatacagatataaatatttatatatacaaagataaaaataattagtttgagaaaaaataagagagagagagagatggaaaaaaaataaaaaagagaagtaga

SEQ ID NO: 58189 - DNA, 1319 bp, Cannabis sativa
tgtatttcttgctttcattctttccttaataaatttcagtttccatcacacccttcattaacctcttgcaattcctcatcggttttgttcacataaacttaaggaattcccatcttattatcagcttaaatcttgttcatctccacttattttaacttgtatcaatttcccttgaattgacagaacatttaaatttcccaatcattaaatattagccaacgttataaagtaaattgattaaacctatacggtagaggcaacactgcacataccaggtacccataactaaacttgaaatacccatctcccgaattcttaactaataactattaatcaaagatcattcctcgatcctgaagtttcttttctgtgtttggtagaaatcttgataatcatttccaacacatctagaattatacctacctcaagtgcattctttattttcttgataaccccttggtacgaactaccatatcaattatagtgagtctcccattgatgatactgattcatcaacatctgagactcttgtgttctttttccatcattaccactaaggtttcactccttagtttatacgctatcattgcttccttgcaatcatcactatcttcatgcttggctaaccactttaaaacttattttacactccattatatagctcgttgtttaataaacaacctactttgtgatccaacattcaccaatcactgaattacatgtccattaaatggcatctcaattcataagcttttccccatttcgggtaagtacgccttttcatattgcttaataaagtaatattttcacagaatttcaatggtccccttagataccacattgactatccagtcaattataaagtactctccatcattatcgtatcaccaagtaattcaggtaatctactttaccttagtgataccactattcttcctgatgttcttttatacgttaccatggtaacgccccagctttaagcctccattagacccttactcacacggaatgatggctcttatacacgagtgcatcactctagctgcttcctggactgacgactggccccacagaccaaagcaagtgtttctaacgtgctttgctttgaatcacacgcttcatggggaaatttcctaaatgaaaccaccccaagtcaaggacactcaaccatggagttccttcatggtgggctattaaaacaagatccttcttgctaacataggtagtcccacacctacataatctcaaaattactacacaatcgccaccttcaattcacctaggattccagacattactcataaattatcccacctttg

SEQ ID NO: 58190 - DNA, 1134 bp, Cannabis sativa
gttggaaagaaaatgaaattagaaggggttccaccatgatgatattccttgggttcttggaataactccacttgttaacaatccggattggattacttggagtatgaccccaatggaatttactcggttgctagtgggtacaaaatccgattcaaaaatcctgatatagccgaatgctcaaatctgtccaaagtcaaatcatggtggaaactaatttggggatctcatcttactccaaaaatgaagaacttcgtttggcgggtctacaacaaatggattccaacaaaagtggagcttcataaaagaggtatggcacttgacacttgctgtgatttgtgcaaatttcaggatgaagatatttgccatgcactttggcagtgtccgaaggttaaaaacatatggaagcaacttggtttcacaaagaccataccccaacaaatctctcaggcagatgatgttctttggtggctccatgatcaccttccaaaagaggactttttcaaattcataggcctctcttggttggtgtggcaaagaagaaattcgtttgttttccaaaataaatccatagatgactaaacttggatttattgggctcttgacttgcttgcaactcacttggggacacaccagaatctgctcacggttcctgccaccaaacagatcacggcgtggcaacctcctcccaatggtgtctacatgatcaatactgatgcttctttaatttttggtagtccagggtgtggtattagtgctgtcataagagattctaaaggaactttggtggttgctgctacttcttttctccctggttgtatgtcagtcctcttagccgaagctacagcaatactacacggcattaacttggctaggagatggtccatgttaaacgtgcaggtgggttctgatagtcaaacaattgttaaagctctctctactgaagctacaaatcacacagattgggggaaattggtgcatgaaatcaagcttttgaagagttcctttcaatctttaaattttttattttttcatagagattgtaataaagttgctaatagtttagctagttggagtcgtttgactcataagtccgaattgtggactgatttgttaccgaattgtgctgctgctatg

SEQ ID NO: 58191 - DNA, 1304 bp, Cannabis sativa
ttcatttttttatttaaaaaaaaactattagtatccaatagcaataattatatattcattcttggtgagaaacataaaagattccatttatgcatttttagcttccaaataaagaaagttaaaagctgtatgatgagtagtggagaacccagatttgttgggatacatttgtattgactttgtaattataaaattctaagaatattattgaccaatatgcagctggagatcctagaaatcttggaaaaaatagacttttagataacttataaattaaggattactcttatcactagttttagctgtgaacacattaattgcaacataaagcacatgcaaactgcctaagattactgttttaatacacaattgtatgaagtctttgatttagtttaaaaagagaaattgaataattcattgtctaactaaaagacacgtcatgttgaaatataagtcattaaaaacacgatgacacttatgtgatagaattgcacaataaaactatacaaaaaaacataaaaaaataattcaagcaactaaaatagggatattcataaaatacacaatctaatctgtcggatatctatacttttgtatattgaattggaatgaaaaatcaaaattttccacttgtgcatcatatattaattaacatgtaaaagtaactaatccaattaaatttgcacatgtttatatatttttttaaaaaaatactatatatacaattaatattttaatataaaaaataataatttaaaaatctaatatcatgataaaaataaattttaaaatttaataaatcaaatgtatatttcattcttatttatatataaaaaaaatataatctaataaaaaattatatatttctttatacatacaatttttttcttctctctttaaatttgttattttttattttatttattttaatttattgtttgtggcataaaacaataataattttttattttgttattagttatgtgaattagagtgagagaatgagagaggttttttttttgaaacataagagcaattttgagtggaattggtattaaaagtatagatgtcttatttttaatttggtggtatattaaaaggccatgctaaaccaaatttttctatgaaatccgtagcactataagtaaagtagtgcggattgaattagattcctaatttaatttttttatgtatttttaattttttttattctattcctattcatattcttattctcattcatatatatttttattctttctaactaaatgtcactttagtgtgaatcgaatgcactataagca

SEQ ID NO: 58192 - DNA, 959 bp, Cannabis sativa
agcaataatattgtgaccaaaaatgcaactcttagagacttgaagggcaagattttttatttgccgttgaacaaggtgattttcagtttctttattgttttatttttgttttgtgctgatatattaatatttggttatttaattgtttttgtttcatgtttttgttgttttgattatgattttcagttaaagattaaaaatatttgtcctactaatgaggagaggcagaagctacaattggaaggttaatttctagatgaatctattgatgaccgtggtacatctaagaaaacttttgagagtggttcatcttctaagaagactgattcagaggacattgaattgttgaaatctaagttggagctggtcattttgaatcaagaatccttcgccgaagacttcatttctttgaggtgttttgttgaccttaatttcaagtttgtcatgactgtaattaaggatattcaagaaaaagttaatgtcattcatcgtggaccttttgatgaggtatttatttatacttttcttgtttcagtttttaactactgttattattagtttttttccagttttattttagttgcaatactgttgtatgattcagagtaagtcatctgatgagttagtagcacaagattctgatgatgatgatcatgctgaggatgatgacaagggattacctgatcctaagaatattgattccgactccgatgatggtgatgagttgggtaaagatggtggtgatgctgctggagttgataaggttgttagtgatgttcctgctactgatgtgaatcaatctgagactactgcaggcagtgaagagagggctaaggatgttgagaatgttaaggccaaagagctggtttaaagggggatgattttttcgatggtttaagccagcttgaaattgattatgaccaagttgtgttggttggtttagaggctgttcgtaaaat

SEQ ID NO: 58193 - DNA, 2898 bp, Cannabis sativa
gtaggaaatagagacttaccagttcatctgtagctgtaagcttcaccaattatgtattggatcttgaatttgatagtgcaagggcttagctttttctgaggtgagctcaagaggactaccccatcaactaagggggaacctctataaaatactgtgtttgattctcttcttccctaactctcatctgcatattcattcattctcacatttgaacattgcatgcatattcaataaaagaaaaccctagaaactaagcaagaaaaacctgatcactttttcttttgttttgtttttggtaaagttaaatgtttaatcaaatgctttgtgtcaaaagtttgagtgtgatacgtggacagattgtgtccacttgctgaagtgtgaaaggtcaagattgaccttgtgtttgtgtgtgtgagttgactttgtgtagggataggactgaaaaatcccaaaaatatcaaataatataaaagttatcgattttttatcttcaacaagtctttaaaatctacatcattggtcaattttattctgcacatagcaaatgattaataaattttatcatataatatatgtgcttgaattctcaaaatttgacaagaaattaccttccataatggataaccataaaacaactcgtaggtgattctatttcttcttactacacagtcatttccattagaagagttgctattcttctttgtatcaattgggccactactcttttccattatactatgctacaaaattaattttaattattttataagtttaacaacaaatcaatataaaatatctaattattttgagtaagacttattatgaacagaacagagtaagagacaaaacaaaattacatcttttagtctcattagttttagtcaatacagtaaaattatttacaaaataatgaaaaattaatatgcaatccatttttaattaattaccgccgttaaaaaactaaaattttaacacaaatagaagcaatattcacaaagttttcaatcccacaaatacaagcagagttcgcaagaagtaaactttgaaaaatagtttaacaaaattgaagaaaatataaagattcaagtcacaccaaaattcctccaaataaaaataaaaataaaagagtggattacagaagaaaaaaaaaatcaatctttgaaatggttcctgtaagaggctcggttgctttttttctttttcatcattgtgaaaagaaaaaaaaaaataatcacatgtaagccaaaaatacaattacaacccatacacaaaattaataaatcacattaaaatttgagtgcgtgagagagatggaaagatatgattcagatcttaagaagaaaagccatttacttactagctaggattccagtgggagcttgaactagagttgggatggtgatgagagcttgggctggagaagagaagagatttgatgaaggagagaagaatggaaaatgcacgaaataatttcaaccatttatttatcaaaaaaaaaaaattgaaccattttttatgtttataaaactattaccgacgaagcaccaccgatataagtggatccaactggtaataggataaatggtcaagttattattctattagcggcaggatctaatggtaaaagtctgctgctaattattttcaaaataaaaaaggtaggaattttcctgcacaaatgtacaccatccaataccgacgggacattccataggtataaactaaagtctgccactattgtttattttaataaaaaaaatcattcaagattactggaggaatagtggatccaccagtaataattccattaataggggtggacatgctccgcgggtaatgtgtccgctcttatttctaatttttcttgtagtgtgctaagtgtaatttttggagtcattagtgttatgcctgaaagtttgccaaatgtaaattccaaaatgcacccaagggaatgtgttggtacgaggaggatcaaaggaacaggtcaagctacctgtgcccacacctgtgcgctcaagctccgtgcgcccatgcccatgcgcccagcctccctgcgctcatgcctgcacgcctagcctcctagcgagcagccctcttcgcgtgcccagcctccactccatgcacgcccaggctccccgcgagcagccctcctcatgcacccagatttcccgcatccactcccacgagtagcccctcccagtgccccctttaccctctttttttctcctcgtacaaatagcctatgcacataagctcaacatgaatgtcctgaatgtttacaaaatattatgggcatgggggtgaggattaataacttagaccaaggctttgcgagcaagagcgtcagagacaagatagcgaccatacagcaagtacagataatggaggcaaagtttgcctcactcgaagtacaaacggtagggagaacttttatcagggaggttaggcctggtgcgtatggtctttgggacagatgagcttattttgtatagtcgctgggcgacaaaattttgtaatatgcacagtaaaacttttataaatattttcgtaaacagaatctcgatataatacaagtatgttatttcggtatttattagtaaaataaagttttaattgttcacgatttttgataaactcgttgattagcaatgagctgcacatttaagttaaaaatcatgttaacacgcctaaaatagtagggtgttacatagaaagtttatttccattaccaacagtaagagtttctttaccattgtatttgcccttttaattcatgttgctagcatcagaagtgacatgattactagccccactctcagcatactgataactctaagatttagagttattttcatatctttaagcttgaatttaatgtgaattgtggagcaattaatg

SEQ ID NO: 58194 - DNA, 1039 bp, Cannabis sativa
agactatttttatagtagtcagggctgactttaggttaaggcgggttaggtccacgcttaggactcactactattaagggctgaaatgaaaaaaaaaaactttttataaatatatattttttcttaataatattatttctttttaaaaaaaaagattcattttttttttctatgacccaattttactcggggccggccctaatagtagttattctcgtaaggttaccatgaatgagctatccttttgtattgtatacttttgattattatttatttggtgtggagttttcacacacttagctagtagagtagctctcctcatttgtcaaatttcactagactttttattaggtcatctaaagaaaaagagaaagggacatgaaaacaacattaataataaattattaaataatccaccacatgttttcatataaaaatataaaattatacaaagaaataatcaatgcacatattttagtcactcctttttaaaatctttatgaaaacgtagtgtgggggtggaagttagatgtggacaatttggtcattatgatccactagtattgcattttacaaaggagagttttatttgcacatcaaaaatttataaatatattttattttaataatttttattttatttaaaatatataagagaattactatatatatttatatatatatatatattatttttttttaacttttttaaatgtttctatttgagttgctatgtggattttaattataatttaggtttttatattagtttctatgtaggtttcaatgtaaatttttgtaaaaatataaaaaaatactgcttttaaagtgtaaacatgaatttttttttccaagtggtattcttaaaaattatacttatcaaacagaaataaattagatttcaaaaattttatattagaaaaatttaataaaaattgtgtgaaatttttattgaaataaaaaaaatatacatgatttaaaaaatatatgaaaataaaattaaatatgagtattgaaattaacagaaaataatatgaga

SEQ ID NO: 58195 - DNA, 729 bp, Cannabis sativa
actaactcactgtcaaaacttcaagatactgctggtttttgggtggattggcaaagtggtttagcagatgttattacaagttattatacagagcttttcacttcttctccacatacagccgaagagattactagaagcattcccacgactatcacaacagatcaaaatttgtttttacttgcaccagtcaacgaagaagaagtcaccaaagcagtgaagcaaatgcatcccgacaaatccccgggacctgacggaatgacaccaggcttttatcaacgaaactggaacattgttggaacggatgtgataaagctggttaggaatttcttttgtactggattgctgcctcctggtttaaaccatacaaacatggtcttaatccctaagaaaaagagtcctatgactatgggtgatcttagaccaatctctttatgcaacgtcctatacaagataatttctaaggtgatggctaaccgtctcaaggaagttttgccacaactaatatctgagtatcaaagtgctttcattccgggtcgtttaatattcgacaatataatgatatcgtatgaagtcatgcactacttgaagaggaaaagacatgggaaagaaggctatatggccctaaagcttgatttcagcaaagcttatgatcgtgtggaatggccttttattgaagctatgatgaggaagatgggattccatgaccactttgtgcaattgatcattcaa

SEQ ID NO: 58196 - DNA, 594 bp, Cannabis sativa
tgaagtttgttttaaaatatttagcatgtaaaatgagaatgttaggaacattacatataagtaaaacaaaatcaataaataatgcagtcaaacattagttctgtattatataattaataaggtatgtatgtacgtattatcttaatatctacttgggtgggagtggagagtaaatgcaaaattatgtaatacacaaagtatgacatttttaaagaaactttgataaatatggtatttttttttgtcaaagatattttttttttttcacaataatgtttgagaatttatttggaagaaagtattaaatagaaaacagccaagtatttttttattattattatttatttatttaacccacagctacatacaatataagagattatataaaataataaatatatctcgaaatcagatgaaaacttaaaatcctaatttatttactaacattataatgtattggaggaagtttcaatagttacattaaacatgtaaccaacatggttattaaattattattgaatgattgtgattaatttaaaaattaaataaaaataaataataatcaacttataacctaatagtcacttaataatt

SEQ ID NO: 58197 - DNA, 880 bp, Cannabis sativa
attattaaatttaataaacttaataattcaagaaaatttaaaaaaaaaattgaagaagataagttgatatatgtcaataagctaaaaattcatagtggcctatttattttaatttctttttagggaaaataactattaaagttggattgagggattggaaatggaagaagttttattttaaagaaaaaataaatttatggaaaatataatagaggaaagtgtttattgtttattttttcaactaaatttttaatattgtaaattaattcaagaaattaaaaaaaaaattgtaaaatagtgttgccattgtgttgccagtcaataatattataattatattagataattacaatatatataaaaaatattgaaattacattttttttttcgaaatacaaaataaaattaccaaaaaaatgaattgagaggtattccatttccaacagtgttgccattgtgttgcaagtcaattaggtcgaagagacaaaaattagtgccatagttggcaacattctttagttttattttgttgattaaaaatttattgtgaggtcaagcatcttaaaatatattattgatgctttatatttttctataatttcagaagctggttttgcaattaatatataatatcctttgatgacagcagtatatgagtcgaccaaattaaagcttaaaaaatgctttaatgggaataaataccttttgtaggtgaatcatatgtgggggaaaaacaaatcataaaaccgtcactttcaattggataaattaattgctattttttttagtacaattgctattttattttttggattacttaaaaattatgttggattacttaaaaatttacttttatttttaatacaaattattaatatat

SEQ ID NO: 58198 - DNA, 1222 bp, Cannabis sativa
  modified_base (1190)..(1192): a, c, t, g, unknown or other
ccgatcttccactataaatatgaaattacactctttaataatatagaattatatttatataattcttacttgtagtccattgatatatataagtagctcgccttccaattattagttcataattagaattggtcaaaattttctaattatctcttgactccttatgtactattaattcatgaatagatgatctataacttattatagatttggatccaactgttcacactcccataatcaatactatatgggaaccaatccgttaggaaagcttggattgaattattgtataacatgttcccagccatttatgttattaagctcccgaaacagaagttgtacgaatcatcttctctgagaaagtttaacgagtgaatcaaagaactcaatgataatactacaaaaatggtttttcccgacgtttttaaacagtcgagtattcccgtcggtttctataattcccgcctatacaaccgtcgcaaaatgggcaaaataggtgacggttaaacaccgtcgctaatgtggacttctcgacagcttaaaactgtcgcctattacagggtatagacgactgttttaaaccgtgccctatgttattgaccacaactgtcaatgaatatatacatgtaaaaaatacattcattaagttacattttagtgtaatatcgtattgttgctagaagtggagaatgttattgtcgcagtaacagtggagaattttttctgccgctgaggtggagtattgctcttgccgctgccggaggtggagaacaattgaataaaatttggacaaatgagaaaaattagttgattcttaaattcattattgattttgtttttttacagttttacatggcattttttgtttattaatccatacttttagtttacttagttaaaaaatgtcacatttagtggcgttaactttttatgtcatatgtatatatatatatttatatacttgtgacgtatgttaattttattttagtttttagtttttttaatatcataattttaaaattaataatattcaatgtagtgataataattaaaatttgaaagcataatagtgatttaaataaaaataaaaattactattatactatgtaatagtaattaaaaaaaatttattattcatcaaatttatcttcctaattaatgaaaatgctcatctggttaaactatcaaannnttcaaatttaatttaaaataatatttaaaa

SEQ ID NO: 58199 - DNA, 676 bp, Cannabis sativa
tcatctttatacaaattattaatggaaaaattacatactaatatttttataaaatacaaaaaaccacatgaaagtatcagaaaaataacatcaaaataatatataaataacaaaaaaaaaaataacaaaggtccaatataaaaatactgtttttatataaataaaatcttaaaacctgtaaaaatatttaaattctgtaaaataatatttttgtaatttttttttttggggaaataatcccattattaaaagtaatatttctactcactctcactctgagtctcaattttctcaccattttcattctccattttttctctgttaaatgctcttaagatttcgcattttctcaggttcttcaattacgattggggattctgaattttgttctgttacgattgggaaatcggaggagggagatgttgaaccgagtttctcatttgaaaattcccctaaattctcagtcctaattccgatgagggagatcttagtggcttaatgctccctactcacaactcacaagtaagtctcttattgttattatactaagttagaacagtaaatatgcatgcatatatataatatatatgatctgaaattctatgatctgggatgattattctatgttgagaaattatgatcactttttattcaatcttgccatcattttcaggta

SEQ ID NO: 58200 - DNA, 980 bp, Cannabis sativa
  modified_base (781)..(790): a, c, t, g, unknown or other
gaaacacaatctataaatgagaagcattagttcatactttatggttagatttgcagccttctgtgctagtaccttctccaccaacaaatcaagaatggttttagagtattagaacgtaaaatcggtccgggttttcgatgattcttgtcactgaaactttggccattttttagtaaaggttctgcttttctaattttaacagcaatatgaggtgaagagcaaagcaacttgaaccaccaagacaatgaaaacattatcattaagtgattaaattttagtgtttttttaatgcttttttactactaatatttttagttgtatggatttttagtaatgatataaggatcaatatatatattttaagctaatgtgatggaatgattaatccgtatttagattttagagcataagtggtaagtagctaaagccaaaaataaacaaataataaagtatactatactcctttgtaaaaatagtaataaaaataaagaatactaatatgctcaattgcagagttaaatcgaaatttaaaacacacgtaaaagtataaagaaaaggctaattatgatttttgcccatcaaattatgacatgtattaaattatgctctcatgaacttttaaggtcgttaaaaatactcctgaacaattgacattgttggatttaaagatttttgtccaattttagtaaaaatagtcgaacatggatgaaaattcaagggacgtgatttggtacatatcaaagttcaaaaggcattatttggtagatatcaaggtttgggnnnnnnnnnntagtacataaacaatcactgaaagagtaaaattgaatgaaatataaataaaagtccttaaatctaacaatctcaatagttcatggagaattttttaacggtcagaaaaattcaggggtcatgatttggtacatgttaaagtgtaggggtataaatcctcattagtctaaaaaaaaattatttatcaaaaa

SEQ ID NO: 58201 - DNA, 504 bp, Cannabis sativa
ttttctgtcttttttttcttgggaattaggaccacattggtgtcattaagattgtccgggagcgaggcattagcaaaaaaatctttgactgttctgaccacatcattgccaactacgtgccagaatttttgataaaaggcggggctcatgccatcaggtcctggtgatttgtcggggtgcatttggaagagagcatgtttaacttcatcaacagaaataggctgcaacagatctgaattttgctcagctgaaaccttttgatcaatacaatttgtaacagtatcccaagtacactcagatgcagtaaagagattagtaaaataatcttgaattaagttggtaaggccattgttccaatcgatacttacaccagaattgtttttgaggctgtttatctggtttgtacggcgacgggtggaggcagctttgtggaagaattttgtattttggtcacctgaattgagccatagctgttttgagcggtgtttccagtaggcctctttt

SEQ ID NO: 58202 - DNA, 1392 bp, Cannabis sativa
tcccggttcctaactctggtgctcctggagccagtacctcgagtgtctgtaagtctcctctatcttttcatcatgcttttttatcagaagttatgctagttccaggccaattggctttgataggaggttacttaagttgcaaataccccattcccgatgggtttgtagggaaaaagagtggtacttctccaacatttgggatcttttgggtaagtcccaaatgggatctggcccttcagtaccgatacctctggaccaatcatgttatctcacctcaagctggtttcttcttttgtatagtttcttaggagacaacgataccagcatcattatttatgagtttgctagggaaaaattaggtcactttggtaggattaggtttctttctacttgtcttatctttatgactctcttataaatagtccttatgtttctttcatttctttttgcagctagactaatggacaccatcttcgcctccatggatgctctgagtccttcataagggagcaccgtccctcctgctaatttttaaagagtcgtagtgacttcaagagcttcaaacctggaggttgtatgtgtagatgatgaggatgagttaccccaattggagcaaagaggaagagtgaggatggtgactctacatctttaaagaaattcaaggcagccgaaatgccttcccacggtattggggactcagggatcccttcctaagctcatactttcccaagagtctcgcccattccccttactcacctccatctggatgaagctcatcaacaacttagaattgctgagcacaattatgttgcatatgaaaaaaccaaagggaatactgaggcggaggtcttgcagaagtggttgatggagaaccaagatggcccgctctggggggattatagtggctaaattcatgaccttaacatggatccaatgacaaactgattttcaagcttcttggggtctgccttggctcatttcgcttctgagatgatgggttagtttgcttacgacttggttcagctttgaaccaagagattcgctgtctatactctctctaacccagtttacaaggtccagaacatgagcaccgctttgaccttagtaagttcctaatcatccttattccatttatttctccaactaacacctcttttttttgctaatcttagtgcgtgaaattggtcaaattactgttgcattcggtcgcctatccaagaccttaattgataaagggtttgcattgaatgaatatggtggcattgacgaggctctaaggaagctcaagtatgcagaatagggtgaggaagctctcaaggatgaggtcttggtggtgaaggctttgcgagagtgagaccaacgagtggccggagagtccttgaagacggctca

SEQ ID NO: 58203 - DNA, 1192 bp, Cannabis sativa
tggaaaaagatcctaaggctaaggataagtcaattcaaggtgggaatgatgtggcatctgaagttattttaagtaataatgctttattggttgtggaaaacaaaaggagaagaactgatgtggcaaaggagttaggtgagagtgtggatgggccgaatactcctttagttgggctgggcaacatttcaaatgataatggcatttttgaaatgctagatcaagatgttagtatgccaacagtggagagtgtgagtccaaaaaacgtgaatggggcgggttctggtttccaggcccgccaagcattatgaatgtcttgagctggaattgccgggggcttgggaaccaacggacctttcaattcctaaaagagattatttctcataagaaacctaattttgtttttttgtgcgaaaccaaatgtcaaaaagatcgtgttaattgggtgggacgggctttgggttatgaaggagtttttgttgtggaagcccatgggcttagtggaggcttggctttcctttggaagaatgaagatgagggctctttactgggtttttctcagaaccatattgacatgaaagttgctgctcttgatggaagttggtggagattaacaggggtttatggagagcccacccgaaaccaaagagacaaacatggacccttttgaagactttaaaaaggaattcaacccttccatggtgtgtaattggtgacttgaacaatgttcttagtcaagaggacaaaaaagggggtcggccatatccccaatggttactacaaggttttcaaggttgtttagatgaatgtggtttggaagatttagagctcttgggctacccgttcacatgggaaagaggtagaggaactagagattggattgaggtgtgtctagatcgagctttggtcacgaactcttggcgtactctgttcccggaagcttgtttatcgaatttggaagcttcaacatcagaccactgcccaatttttctagagccgactgtaagagtctcttttcgtaccccgcgacgttttcgttttgagaatgcttggctttctgagcccatgtgttatcaacttgttcaagattgttgggatactcaatctcatgagagcatctcgggtaagattagcaagtgtgctgaggttctagctcgatgggggaaagaagtaactggagatttcaaggctcgaa

SEQ ID NO: 58204 - DNA, 1868 bp, Cannabis sativa
gcactatttttcatgaaaagattatatatttatatactttatgcaacataagataagtaaaaagtttttttttattaaagttatatataaaattgtactatttttaaatgtatattaatcaatatttttgtttcgtttactaattagtttggatattaatgtattttaaaattacatggttgaagcttttggttgtacggttactatttgaagtgatgagaaaaataataaagatgaagcatcgatgacggtgatgatgattcagtaattgtcgatcacaatgtgaaaggtaaagttgttttttgtttcagatttttgattgaaatgctataccgactgtttggttgatttttcgtttcatggttgaagctttctaatttctggttcacgattgaagcttttttgatcggttttaatggagttttctgatgaaggtttttagtttttattttaggattgtatgatttggcaaattaattggatgatatttaaaggtatttattcaattgttagtcaagcaataatttgaaaacaaggtggtgcgtttgtgtggaggttagttaaggattccttctctaattgcagtaagtgtatgttttgtttgacgttataactttgctgatgtgtcacaagatttatgttaattattttgagaacgttatttgtataattaatttatttcttacgtatatatatgaaaatttcccttgattataactctttgatactccaagttttgaagcccaacccaatctttttctatttgtaatagtaatattacaatgtattaaaatatataataaaataagaaaaatttatataatataccaaacatttggaaaatattataaaattacataaacacagaaaatttttcattttttactctttaaatttttttatttataaaaatatctcttcagtaaaaattgtaaactgtttcttaattattttatagtttatttatagttgttatgaaattatttttttggttatttttagttattttatagttgttgtgaggttgatttctcgttattaagtaatttttttttttactttttactgagcaaattgtatttttgtaattttaaaactacaaacatattttataattaaaaattttaagctgcaaaattgataataaaacataaaaaaaaatgatatttttaaaaatttcacataaaataaatattacaaatatgatgatttcagatagtgcttagcaccactaatatctcacaacaatgctcgaaaagtttaacacacaatttatgtgtagcaaatttctatttgaaccacttatatttttagaaatttcaataattaaaaacctttatttttcttttcattgtgagtattagcttaaaattattctttaattcattcgtaaatgcaagagtagttttaactatatttaaaaatattttgattaacacccaaattagatttttaattttaacatttttcaaaaagaaaattaaaatacataatagaatttctagaaatgcaagatcattataatgtccaaaaattgtataactctcgttatatataaagggtattttagtcatatttatgaatattgtaaccctaggatctaattgtaatattttactaaacccaaggtctaaaattaaattttttaaaatatactccaaaaattattattgaattaaatttgagtccaaattaactgggttgacatgaattgttttaggtagaagatgatattttatattcaactcttcaaaaactcttttaatctccataaccagctcgattcgacgtcgattcttctctttgaatttcttaaaaatttatagtatgagtaacataaagctccatttttaacttgttcacattct

SEQ ID NO: 58205 - DNA, 672 bp, Cannabis sativa
aaaagaaaatataagaagattacaaaagttgaacaacaccgcgcgaagcgcggcttagttccctagttaaaaaaataaaataaaataacatgtgatcattatttattttgaacaacgcttcacataaaaattactcttgaaaattagaccatattacatatttggcaagattagtctaatggacaactctcactggagatgctctaactaatcacaagacactccatttagatagtactaaatatcattagtgccttataaaaatgtttaattagaaaaatgggcacgcttcgtcttggctccaaagaaagaagagatttcattgtagaatactcataatgtgtaacaactactacaggttctcacatagccatttgtgtaataacgcattctaacctaagagcataggtagactcaaagttattgagagagggcggctaaagcacattctaagatttaaaaatatattaatatacaattattacttacatatttataaatataaatagataatccaccatataactaaaattaatcacaatattctaaacaatggactaagtaaactaattttttgctgaatcactacaatttgagtccttgttaagtgctcgctaaattttcattgagtgttcttgtttcactcaaatactcacatatttttgtatattg

SEQ ID NO: 58206 - DNA, 1093 bp, Cannabis sativa
tctattgtaagtgcacctactgtacttagaatagtagcagtatacactttatttctttaacaatttataattttatatactaaacatatatataaatatatagattcataatcacctagttgtatatagaaatatttaaatatacatttagacattatacaataaaatacttactcacttatgcataggccaatctagcttaaaacaatcaacaatatctcataattaccaaagcaagtattttaagaaataatagatataataataccaaaagtattcattcaggtgatcatagtttctccactgaaaatgctttgattttcctttgcttttttgagattcctatgcaagtaaatcaataaaggaaatgcataaatgaaaccaaaatatattattacaatcctaaacttgtgcaattatattatatattagagttacttccgaaacctttcataaaatagttccattcggttatcagcagcaggttgatcaacttgcaacactaaaaaagtaactaatggtgcgtgaggaggaggtgcaaaaagaggaccctattgcatgagtctctgaatctcctcatcctatctctgaagtctaggttgcattctgcaaacctctcctcttaatttggcagagcgtgtggcagatttgcattactaccaccatgacccttccaacgacctcaacctcgaccacaagcataagagggattatgatttcctcgaccatctctagccttgaccatatcaccctaacatcaattgtttagtcaggtgtccattatacagtacgagcccgcaaattcataagtcacgttagttaggtagtgatcataattgtatattgattaccgcttaacatggaaacatcaacatgaaattattctgctatcatactacgtactaacatgcttcctatcatacttttctattcatgcttatctagttttaattactaaaataaatacaagattactaaaccatgagttcaacttatctttgatgattgtacagatctcaacagtctttaaagaagaacttggcggctctaatacaaaattgcaattccctattagcttaggtatgctacgatg

SEQ ID NO: 58207 - DNA, 1129 bp, Cannabis sativa
gactaaagcttaaacatcaatggctggaggtatttcgatcctttcattgcatatacatttttgatatgtttatagtttatttcgcattacatatcgtttatatatcatgtattttcattttatatattatagtctaacataaactattaaaaagaagaaagaaagttaatatgttgaaaaattatgaatcttataaatatataagaaaaaattacagacctagttggtagatcacgattaaaacattatttttttttttttttaactattatgctaaatctagatctataaatacacatagattttctaaaaaaacttgaaaaataaattatcatgtaaattaaataacaaactacataaaagttatgatatttagtttttgtaattgtattattatattagaaaaatgaatatgttttaaatttaaataacaaagtatataaaaattatgatatttagtatttttctatttatattattattttgaaaaaataaagttaataggtttttggtcatctatgatattttaggttgtttgatagagaaaaactttaataaaaaattagaaaaaattagaaaaagaaagaataatttgaagcgtttttagaccgccactttactgtcttacgactcagcttcatatagatatatagataaatagatatagctaattaactatcaaaaatttaaagttattatttattaaaaagtatggctgactaataattaaaaaatgacgtaaatatctagatattattattaaaataatataaaatattattaaggatttagtttaaaataaaaaaccatcaattacttttttgtataataattttttaatatatatttgttaaaaaaaattagttaacatttacttacctatctttttaaatatgtaaatatataaataaaaaaaataggaattgttgataaaattaaaactaaaaaaatatatgagaataaagagaatataacttagaaacttctattgaatttatatatatatatatataaaacataattaatataaattgagaaattatatatatatatatatgagaacataataacatttattagaacaatatttttgtaatgactgctttagtaatttggattagtaaaggca

SEQ ID NO: 58208 - DNA, 1934 bp, Cannabis sativa
  modified_base (688)..(688): a, c, t, g, unknown or other
  modified_base (1324)..(1326): a, c, t, g, unknown or other
  modified_base (1639)..(1641): a, c, t, g, unknown or other
tcgacttggggacccaagcagcaatgttggacctgtggaagagttagaagagatcgagatcgatctagatatcccgtccagaaagctaaagatcgaaaagggtttcttacacgaagtaaaatcagaattgataaaatttctgagaacaaacctagacgtttttgcctggtcacatgcagatatcgttggaattgatccttctctcatttcacacgttcggaatattgatcccaacttccggccagtacaaaaaaagcaaagggtactggacaaacaacgagcattagccctaaaggaagaagtagaaaagctatgcaacaataattttataattgaagctttctacacagcttgggtggcaaatcccgtattggtgcccaagtcgaacaaaaaatggcgagtctgtattgatttcagagacctcaacaaagcatgccccaaagactatttttcacttccaaggatcgatcagctggtggatgcaacgatagggcatgatatattaagcttcattgatgcttactcaggctataatcaaatcaaaatgcatccaccagaccaagaacatacaagtttccgaacagatatgagtctatattgctactaagtaatgtcgttttgtctaaaaaacgatggagcaacaagaaagttaaggccttattttcaagctcatcttgtttgggtgtanactgaccaaccattacgccaaatactgcaaaagctagatgcctctggacggctaatcaagtgggcggtggagttgggccaatatgaaattactttccaaccccgaacagcaatcaaagaccaagccttggcaaactttgtggtaaaatgcacagaaaggaaacagaaagtaaccccgagccggtacaaacacctaagccaagtaacaatgcaggaattgcccttgtcatgcctgggggaaacacctgcacgctgtagtcaagtttggatttaaagcatctaataacgaagtcgagtattctaattgctgggctaaaactagcccagaagattaaagccgaacacattgaaatctgtagtgattcacagctactggtaaatcatgtatccggagaatatgaggctcggggagaaaagatgatagcatatctgagaaaaatacatgatttgctcgcacaattcaaaagctacggtctcaggcaaaagaagaaaacacaactgcagacgcgttagcttgattggcaagcaccaatgtaagtgacaaggcaaacatggttcctatcctgttcctcgaagagcctaacatcactagcacggaagaaatcaaaatgattgatacttccccaaactggatgannncaatagcagcctacctcgactctaagaaactcccagataattggaatgaagctcggaaaatgagaaggaaggctggacggtatatcatggtagagggaattatgtacagaagaggattctcaatgccattgctttgatgtgtcactcaagaagaagctacacgactcctatctgaggtgcacgacgaattttgtggaaatcattccgctgggcaaagcttatctatgaaaattctaaggcaaggttacttctggccaacaatggttgaagattcaaaagcctatgttaagaaatgtgacaaatgccagagatnnncaaagatacctcgagctccacctaacgagttaactcaaatgcagagtctgtggcgctttgccatttgggtaatttacttgatcagacaactacccaaaggtaaaggaggactgtaatatgcagtggtagcagttgattactttactaagtggacggaagctgaaccactcgcaacccttacatcaaagatagtgcaagacttcattgtgaagaacataatctgtcgcaaccattatttttccatactatccaataaaaataattgcagaaacataatcacaattatttttcac

SEQ ID NO: 58209 - DNA, 2134 bp, Cannabis sativa
aaactcgaagtaagtcagttgtttgatgataggacaattatatggtgcaaggatgaaaatgaaaaggaggaattgctgaagttaaaacagaagaaagtggcaggtgcgtgtgcagtagtgacctttgtcaattggtcgctcgaaaaacagagcaaagatgtgaagattgattgtaggggatcttggattgggatcgaagggcttcccataagcctttggaggatgaaaacgatgaggaagattggtgctctatgcggaggcctattagacgttgatcaggagacggctgaaatgaattttttgccccacttaagattgaaattggagggacactccgatggttttattcctgagatcttagcagtaacaattgacaatcttcatctggttttgaaatttttcaaactcaatgatagaaactacagatttaatggagggttcagcactctctggtttcaagatacggctatgtgtcggttgatcgaaaatgatgatgaggggtttgaagagggtctgactgagggaacgacgagggaagatgcaggggctgatcgatatacggaggtaatgaaggacggtggggccattaatgttcagaacgaagatggtgctcagatgtcggagaaccagacgccggtggagtccaactacattgagaaagaagccgagaagactgggtgggggcaggcaattgaagtcacatcagttctcgaggtggatagctgctgtaatcttaacgcatttaatgagagttcgactcccgaggcaggcgaagtcgaaaagtcatttagtgtgcagagaaaagctgctgtggaggccgtaggacacgaagaaggacatttaagtcgtacggctgagagttttgaggaggagtgccgttcggtcttcattgatgtgccttgtgttggaaaagccaaaaagaaagaagaagtgactcttaagagaatttttggtcggttatttcaaaatttatgtggtaagtatgtggataaagcaccagatgtgatgattcttctccacccttatgacacgtggattaatggtgttagtgggacaaaccctctatgtgttccaaagaggttgttgggccttgggaagatgggcctggattcaattggatttaatcaattaatgattaagtcatttaataaaaggggccagggacatattttaatggagatgggccgtatatgtgttagggagtggccaaatattaattatttggagtgtttggggccaaaggttagtatgggccagattttaagtgggtcagtgagggaaattgtccctttaatgggattggaggtgatgagaagtgacatgggccaatttaattacaaacacttgggcccttttactattttactggaccaaaagcaagttcgggtgccttcttcaagacaagtaaaagctactatggataatataaacatcatttttgaaggtattctcaagatagttagaccggaagagaagagaagagtttagaagtgcagatattaattcatgggaagacttcaatgctagaggaagaataaggtcgaactcagtgatacaagaatcggaacaagttctatttgaggaggaagccatcagtgaaagaaagctgaaagtataccttaggaaaagaaaatccatttcttttgacagcgaggtagtatttgagcctatagtcggggaagatcattttgaggaattggagaaggatgaagacccaaatgtggaaggaattaatgaattcagttcagcagaggatgattcggaagaagaagatgattcttgtacagaagaagatgaaaaaattgaagatattgtatgtcatatcaaggagctttggccagaggatgatagtcttaaaagaggctcagaaccccgtgagcttgctgctaagactgtaagagtggatttggccgacccagaagagagagagactttgttattttctgaaatagatttagttaaatccatggcggatttgggcatgaatctaatacttaatgagaacgtagagaaacatgaaattcagtgcctcaagagtggaaggaagagcaatagagaactcaaaaacttgacttttaatataaattatgagaaaggtcagaaaaaagaagggcttccaaaaagatcaatatga

SEQ ID NO: 58210 - DNA, 1251 bp, Cannabis sativa
atggtgtgtgcctccttgtggacaacaaggaatgatttggtatggcgtaagaagcaaacatcgattgaagaaattattgtgtcttctaatctctccctttatcattggttacgtgctcaaaataatcctctcattccatggttgaattttcttattcttgaagacggtactgagcactggactaaacctattaatgatttgattaaggtaaatgtggacgcaactatttttgataattgtgattgttatagctttgcttgtgtggctagaaatgatacttctcttcttttaagtgctatctctagttgtcggcttggtgtttttcaactgggtcttgctgaagcaataggcgtgaatgaagctttaagttagatcaagaggaacaattgggaaaaggtagtagtagaaatggattgtcttgtgttggttcaagctattcataaccctcatcctttgaattcttatttcgatgcgattgtcgaagattgtcaaaggttgttatctactttaaggcattgttcaattatttttgttaaacgatctgcaaataaggcgactcattgtcttgctagagcttcctatttgactgttgatcgtattttttcttaactttctattagttctacttttagctatgtacttctaaaagattttatctaatgaagtttctctttttgattaaaaaaaaagacacttgcgactaagatgtgataaaccccattttgtgtttcttaaaccattaatttgctgctttagtgaaaattaatggtaaatcgagacatctcatgtccgaaatgaccctaatgcacgaggggttgaatatgtcatccttctatacataatgattttaggcagaatgaaacccttaggaagcggaacctcatctatgtgcttggtgcacaactccgcttcctcttattcagagttagagtctccttcgcactatctcttggccattatggctagatatttacttactcgttggccttgccttgagcgggttgttatcttcccttccaaaattatttctaccaaattttatagagttcataattaaattttatttagtttttaatacagtttggagatggtatttttacgatataatttttagaaaatgaataaataaattggccgcacttgcaattgctacctacaagtaggggtattcataaaaccgttcaaaccgctcaaactgctcgcaccacaccacaccgcaaaaaaatgcggtttgaaattctttacagtgcg

SEQ ID NO: 58211 - DNA, 943 bp, Cannabis sativa
tgtaatcattgacgagaagtttacatgagtttatacatagattttccttaatttgcaaaccatattctttggatctttggatacaaaattttctggttgcaccacataacttttgtcatcaatattatcattgataaatgacacttttaataatctatttgatataactcaagaccataatgagtagtcagtgtcatgcttatcctgaaataatctttcaattaaactaaaagaaagtatttaaaatgaatatatgctttatgagtaattctttacatacaagaaataaagttcatctctccacattgcaatttgcatcattcttgattataaatatttatttataaccaattagttttataccttatagcaatagaaaaaataccaaaactttattgtctcacatcaatttgtattccttatttatgatatcaatctagtttcgagagtttcaactttcatggcatgataaaagttgattggatcatcgtctatcattctattattttttttatgtcatttctctcatggatttcttcaatgacactgatatttgaggttgttgagtttgattatctaaaatatataccatatcttgaatgagaagtttttagatagtgtcttatcaaagttcaggattcacttattgatcaaagaaagtcatgaaaacctaaatgctgttaaaagtaataattagaattaagtttaacgttaattcttcctcaagaaaaatatctataataatctaatttctcccccaaactcaacatactcaaaattattaaagtttctcgtctcaaaattgaaccatagtgtgagatcacaaaatttgtagcttttaattactagagtatacagttgagtatagttccttactattttggagtccatattccttttatgaggcttataagacctcatcttaatcgaacatccacaaata

SEQ ID NO: 58212 - DNA, 1018 bp, Cannabis sativa
gtggacaaactacaaaagctaacagatttgattctgagtctgagaaaaaactaaagttttgattcactgattttaagaactgatagtgccataggtaagtaaaatcaactaatatatgcaaccaatatatgtatttttgtttgaatgctatgctatggttcttaaaatctctttgaaaagcaagcaaagataacaagataggtctggcttggactgcatacactcgttgacctttaatgttatctcagatgacttaaaacaactacacatattcactaggctatgtttggatctcagatttaagcatggaaatcgtatgaaggaaaacaataaagaaaagttacataaaattttacaaccatcttttttgaatcaattatcttatagaatatatttacaattgctctagattttataaaatttcatcatatttaacattaagttaattatacagcttgaacagttaagtttagtcctgatcaaaatccaaatctaccagacacccaaattaataataacaatgaaaaaaaaagccttcataatatgctcaaatcaagcacacccccctccagtgagcttgctcagttgtcagttgttcaagttaaaaataaccctcttacaaaggcaccaccttttctctttttccagtaattacataatcatcacaaaaaaaaaaaagtgaataaaaaaaaaaggaaaacccagattctgaaagaagacctgtaacaatggcagtgagaccagttccatcgatcccttgagtaacttcctctgccgtagaacgagctgagaacccagatggccctttccacccaaatatccacatttgtctagattaatctcaaactgcactaacccaaatccaaattatataaaaacttccccttttgaaaaagactcttcgatagtaagagaaagctaacctcgtaaatcacactcagaccacctcggatgtctcttcgttggtgttgtcgaaatttaggggagtttacaattacatatctatactaataaatgt

SEQ ID NO: 58213 - DNA, 1411 bp, Cannabis sativa
cgaagtttaacagttttggaattggatgtgcctttaaaagcatcaatttggagagaaataatccaaccattaccattggattgtatcaagtatctactaagagatggttaaagtgtacatagtattctacgagtgttacttgcatggagtatgttgagttgatatttaaacaaagtttcacattaacattccttgcagctatacgattgtttacaatcttgcatctgtttcaaggtttgtggaactgcaagattagaatttggttgtgagaagagatcatgctcatggaaaagaaacatatattttctgattcaacaatgaggattttttgcttgttttcttttgatcatagaagcttgaggaaactggtacaaccatggtcattagaaaatttttgcagccaaggccaattttcttcattaggtgaatgaatgcaagttcaacgcaagcgaacttactattcttactatcattgtgtgaagaacacagtttttgcattcccatactgcaaatactctccgcacctaggccagtttgacagcagaagagaaattgctggcattaattcgccagattgcatcaataatgttctaaggttagccttcattatgacttttcattttgtcagttaaactaagatgtttcaaaacttatatttggaaaacaaacatgtgatttacatcgacatcttttatctttccaactcacattcttgatattgtaaaagctttgtgatatggtcatggtttctcactttgaatgtacaccactcacttgaactagtgatatgtcttggcaatggcaggtgggaagcaaacaataatgtcaaactcatttgtagtgtttacttattatagaaactacaatctcctagaagcagtagctgaaggggactactaaatgcaaaactgatgttgatcattctctaagccataaagagtccaccaacaccaaaaggtaaccctccacgaggcctatttgtttttttaagatatgaatttgggatattcaagtagaccaacctatcatctgtaatataatatttgctcccatttcttgtaattcttgcataataattgttacagttttgtcttatattaaaaatttataaaataacttgcatagaataatttgttaatgataatgcactgactacatacactccattataatttataacctcacctcattagtttcttctttattacattttagtcagatacaatatactcttctcttgtcttcttttaagtggagtggtgtggagtggagctaccattttctacttgcacacactaatccctaccatttttcttagttagtcagaaaataaaaataataaaagactgcactttttatgcctttgattttcgttaggtatttatatatttgtatatatgtttgaatatga

SEQ ID NO: 58214 - DNA, 1134 bp, Cannabis sativa
tacagaattaataataacaaatctgtacacaaaaatctaaaataagcaaagaaaatgggtaaacattactaaaaaattaatacatcatttgaactaaatgacaaaccttggaacaataaaagaaatggacacaaacaacatacaatttaaatcaaaactaaaatttctaaatctatataaaaaaaactataaatgcactgcccaatatcaaaccccaaaaagcttaaaccggaggtgcgaaagggatggttgtcgttcgtcgaggcctgcaaacggccgccgctcgtcgaggcctgcgaatggccgccggtgacaactctggccgtacgtcgagacctctgctcttctcgtcgctcgggattttgggtgttgcgagcactgtgatgtggtccatttggaccatcgtcgttcacctagttacgccaccgatcaacaaaagagggaacgacttcctctctggaaaccacgatttcgcctttgctgctttcctcggcctagtccctcagccggccgacggctcggatttcgccgaggcttggaaggagtacgaagaaaatgaggagagaagggtggtacaaaggagaaggttatgaaaatatgcatttgcagggaaggagatggtttgggaaaatcaaggccaagttcaacgtagccaagggagagagagagcgccgcacaagggagagagagagagatcgagatcgggtagagagaggaattttagggtttctattctaacataccccttttatacctctttttagttcttttttaatttgttttaataaataaatttagagaggaaaatggggtaataggctgattatattcagcttttttttcccttttttattcagctttttttttcttttttattcagcttgttttaatgtattttattatatttattttatattttataatttaattttttatattggttgaaaaatgttttaattgattgggaattataattgaataagaaagagaaagtggcgtgaataacaaggatttgccatttttaaatatattttttattttttatttttttattaatttattaattacaattgtatttttttattaaaaaaatatgttatgatatagtgacacgcaagatgtgtggggatatat

SEQ ID NO: 58215 - DNA, 1866 bp, Cannabis sativa
tctttgatccaaagaactacccagcaggcctgtatagtactcaagaaatgcttgttgaacccgatatagattatcacaccaattccccttctcatcttcaatagaaatttttttattattgttccttctagctttaattgaagcatgaaacaaggctgagttttcatcttcatactttagccatgacacctttgccttctgagtaaggaataacgaataagccttgtgtatttctaagtagttcctgcttgcatcctgttcaattctcattttttcctcattaagaggatcagtactcagttccttttgagcctctgctaatgcctccctcgataagatctctgctttatgaatgtccgagaacccctctttgttgatatcttttaatacctgcttcagccttctcagtttagtgactactttaaacattttagtccccataatcggctgattccaactttgacccactctatcttcgtaccctggtgccaatctccacatattaaaatatctaaaaggttttttgccaaagctcctatctaagtatattgatacaagaatagggctatgatcaaaaataccttcaggtaggaagacagcttctgaatccacgaaagactccatcaaatccaagttcaccaaagccctgtcaatcttagaaaatatcctttcatccggcttctgcttgttgttccaggtaaagaaattgcctgaaaaatttcaaatcatttaaaccacattgatcagtgcagtctctaaaccgttgtgatggcttgttcccagctcttttgccaaccctctcactagcattaaggatctcattaaagtctcccattactagccaaggctccttaatgttcttgcccaattcttccaaatcatgccacatttgctctcttttattctcatcattgaatccatagatcaaggtaagttggaaatgtccctggtgttgtttgaactgcaccaaacagtgcatcatttggcttgaacaaaatcgaatgtcgacagtgtaaacatttggttgccacgccattattattctccccttatccaaccatgaattattattcgaaaagcaccaacccgaaaaaagactagcatacaatttccccatatttttattctgtaccttcgtttcaaggagactaaccaagccaacttgcttcgagtgaatcaatttcttgatttcttgatgtttctgttgactgttaatcccccttacattccaacatagcagcctatccattggaagtagagggatctccccccctccaatgtaaatgtgctctgtaagagaatcaaacatgttcttcatttcggttatggccacaacctcatccacaaccacttttttccctttagctaccttctgaaacccattttcatcaatcccctccttctccttactttgtttctgttttggaacccacacttgtttctctttctcctcttttgtctctttttttctgcaattacttgtctcatgaccaataccagcacaatgatagcacacaagaggaatccattcatatttaacttccaaatcaatgtcatgatcaaattcatcagtgaaggaaatcgtgctaggaaattcctgtgaaagactaacctgaacaagaatccttggatattgaagtcgatctctgttctttgtgatattatccacttgcaacgggtcaccaatttggctaacaatcttgaagagagaagtttccccccaatacttgatatccaagcctttcagttgaatccatgtagggacattggtgacttcttggtgaaatcatcagtaggattccatggtttcatcaccataggtttcctatcaaagaatacatatccttgctgcatcactttatccct

SEQ ID NO: 58216 - DNA, 1055 bp, Cannabis sativa
caccctggaggaggtcatgtagggccccgtggcccaggagaactataagtcccgtgctaacgggtgggaggcggacgagatccactccacactgacctgtgctcaccagcttgaaaagattgtggtggtggcaggcatcaaatcttcaatcttcgggacctaccaccggctgcctcgggacgaggagacacccaaccacaattatgggggcttcggagcatggagccagacccacctgatgtccggggctatgctccctcttcaggactacttcgtaaactttcccatttttgttggccttgtgccgtacaaactaatccctcaagcttactgcctgctttcaggcttatttatcttgtatgccgcccagagctggggatcgcccagtccggctgaaattttgtatttttacgaacttgtttctgtcctcaagaagggggacaaatttaaagacagattttatggcctctggacccatcctttgaaccagggcccagtccctttcaactatcaaaaacatgtgaaggagtatcgccaccgcttcttcttctcctttggtttccaggccatggaccgcccggagcttctcacggagtgggttaggatccctccttacatgcggaccgcgcctacccaagtatttctctagcgggccaattctccacgtatgacaagaaggccctcaatgttggggagttggttacgacggagaactgtcggaaggccaagctgatttccgagaatcagtcggtggatgacttcaatctttccaaggtcatctgcccggacgtgaggactccggctgtggaaagggtgctccgggtagacattatcgcctcggcggaggaccagtaccagaagtacctttttaagagggaacaggagctggcttatatcaaggcccaagcggctgccgggaggacttgtgatcccagttcccaactctggcgctcccgacgccagcacttcaggttctggtaagtctcctttaataattaagtatgttcctcctgtccgagagtatacccaatgtaggcctatagggttcgatgagc

SEQ ID NO: 58217 - DNA, 934 bp, Cannabis sativa
gaggattctggaaactcttttattttctatttgagcctctattaccaaagaaacattatgagggaagtgaacatgtctggcgtcgtcttctgtaaaagtcaattgtaaattcatcatccttggatgttgggcaggtgattgtaccaagtggcaagctttaccttgattcaactcattaaggtatcacttttatatattttgagtgctttcggcagtatgacgtccacttaaaatagttgctacatgaccatctaagacttgcaatgcaactcctagagggtacggatttccaagaccgggggctatagctactgccgctactagagcgttttgtgccccttgaagagcttgtgcatttggagtttgcatccttacccaatttgttaaatgttcgctccatactaatccctcaattttatcttttaaatagtcacattcgtttatggtgtgaccaatatcaccatgatatttgcactttttgctcagatctcttgtttattttcttcctttgtacaattgcgaaggcttcctgtagtgtaccatgttacaggttgccttgtatacattttcttgaatatctatgagacttgtgtactcggtgtatcttgattcttgggtttttcccttctttgcaaactcactctgatttggaccctttgaacttcttttactccgttagtgggttaaattggaatctagaacttccactttttggttcatttgtttagaagcagtactatatctggtttatgcagctctgaacccagaataactagcttgtgcagctggctgcacaaaagtagttggcaatataccatgggagtagtaaaagcagttgggggagggtaaatggatggagttttcatctataaaggctaggcatttattacatcagtggaaggtgttgggactactccatatgcttgagcgtaag

SEQ ID NO: 58218 - DNA, 1007 bp, Cannabis sativa
tatatttgaaattaataaacaatataaatgtttatttttgcttatggtagtataaatgtatatttaaggtaattttaacccaaaatagaaaaaaccccaataaaacgcctatctttatctctctctatatataaaaccccaaacaaaacaaacggaagagaagagaagtcagataaaaatgttcatttcttctttttctttcaatttgttcttcgttaatattttgattttgattgaggttgatattcttcttccgtgaatctccaattttagtttgattgaggtgcatgttctgattgttttttgttttgagtttagatcgaaaaatatattgtaatgctttaatttgtgggaataatcaatagcatctatcctaataagtattagtttaggtttacttaatttgtttgtctaatctgataatgtaatggcagagatggcagaggtggttaaagaaattaggaatggtaaatgtttgttagatgatgatgattatgactctcaagatgaagatgaaaacgattttattatttttgaagatgaaaggataacgagagcaaggtataattattattattgttgttgttgtttcttatatttaattgcttttctctctttctctttttatgtataatattaatttgatctaataatattcttgttctacttattattattagggaacttaaagctagcctaccagtttcagattcatccgatgaagaagcagaagatgaatatgaacaagactgggccattgtgaacaaacaacttgaaactgatgtatgtattcttattcttacttatactttctctctttctccaattgtacattaattacatctaatattaattcttttaatgtttatagggttttcatgttgattaccttcctaatcaacacaaaaggaactggtatcaaaaaatctttgggcaattcttgttgtaaatatactattgaagcagctaatttagcaattgtcgaatataacaaactcgaggtagct

SEQ ID NO: 58219 - DNA, 1459 bp, Cannabis sativa
tgtacaggtatcttggcaagagatagcatgattctttagcatttccatgtagctggctttgtgctcgctctttactacgccatgctttcatgtaattcatgtgttattccgtatttgtctttcatttctccctttatatttgcaggactgtcctttgttttcaggttcaagaactttagttttacgaaatctgctatcaactttgcagttgcttgtcgttgatctccaaatctttttggaatcacacatgtgttcttcttgataactccttattatgaatgtttttgtgtttctatttttgaagtctttaaactccatttgcagtttgagtccaaacaaataatattgtattctttagtgcaagatttcactactttgtattgaaatattttcttgattgcaaagtagcataggacacttatcaatgtatctttgtccttgtaaatttgtcaatttctattgttttatgtcgtttatcagtgatgatatcatttctttgttgtcgacttctttttcttctttctgcttttgttgttgttgttttctagttgttgtatggttgactctgatgttacagtctcagtatcgagcaaaaaagtatcatcttgaactgatccaattattgatggagatagttgttcttgtttgttgttgttgttgggttgttgcacatctgcttgtgctgagttgttgcatatgatgtcatcatcatattgttgcacatcattctttggttaggtgccaaaaaggtttgtgtctctgtgttgctgattttattcacacacaatgggtaccgtgtgaaatcagtctctttgcttaatagctttatgtagaacaacagactcttgtcatcctttatttgtagtggttgacattcttttagttgatatttcaattgtatttgtgttgtttcagggttgcattggagtttttccatcattattttcactagttcatcaaaaatgcaatctcttgatagtaattctccacttgatttgtaatcaacataatttttgttgtcatcccaatgaccattgttcagtaccgaattttgtagaggttccatgtcctaaaacttgtgtatttattatgatttttttagtttcaaaagttgtaaataactatttcaatctaataaaaaaacttataaacaactgtttttagtatcaatagttgcaaataacattttaatataaacgactacttttatttgtcaaaacaattattttttggtatacaatctttaataagatttaattcaaacaactaagctttccaaccgtctagcttcgaagattgacggcttggttcgtgacttctggtggggctctgagaagggtaatcatgggttgtacttgaaagcatgggacaaactgtgcctccccaagtctttaggggggttggggttccggaaatcaaaagaaatgaaccaggctttcctggctaaatgggggtggaa

SEQ ID NO: 58220 - DNA, 3722 bp, Cannabis sativa
  modified_base (27)..(42): a, c, t, g, unknown or other
taaatgaataataattaccataattannnnnnnnnnnnnnnnaaattaagcaatattcaaatctctacaaaatatctatgttatttaaataaaataaatatttaaatatctatgttattattttaaaaaagttattatactaaaggttttctctgtttttctctctctttcggtgattcgccggtgctatggcaaaaagggggaaaatggccgggaaagccaaatcgaaggggaagaaagctggtccgacgtcttcggacagggtaatcaagactaggtccatggatgctttgattgggattcaagatttagagattactgaggaaattgaggaggttgatgcaatggaacagtgcccagaggcaatggaacagtactcggatgtcgtaccgtctcctgctagtgagattcatctggatttctctgactggcttttgggggaaaatcgtgcttctcaggatgtgagtttggggaagaatccttctcctccaattctcagatccaatatcgcacgaaacttggaatcttgttttgagaaaactgaattgaaagctgctgaatcacagtcgagggatgctgatgctggtgcgagaaggggcgcgaaggtgaaaattgattttgaggatattgctgaggaggttcaatactggcagccgtctatcgtatgttacgtgattggtgctaaccctccaattaacattctggatggatttgtgcgtagaatatggaaagatgcagtagtgaaagttggattgttagctaaaggaatttttattatcagattccagaacttggaaatgagggataggattctggagcagggctatgtgttttttgatcgaaagccaatggtgatgaaaccatggaactcggtggatgatttcaccaaggaagaagttacctctgtgccaacttggatccagctgcagggactagatatcaaatattggggcgagtcctctttgttcaagattgtgggacaattgggggatccgcttcaagtggaccaaattaccaagaatcgagatcgactccagtatgcaagaatcctcatccaggtgagtctttctcaagagtttcctaaagtcatttcgtttattgatgagcataatcatgaaattgaattggaagtaaagtatgagtggattccattagtctgctataactgttcgggaataggacatgatactcaatcttgtagaaagaaagagagtaaggaagagcaggtgaaacaggtatggattcctaaaaaacctaaagaaaagatggcaattccgaaggctcaagagggatttcagcaggttctaaaaggaaagagagtgatggtggaacaagagcatttaaatactgtgatacaaaatagatttggcactttggaatttgtaacaggggagatcatggaaagtgagggtaacataggagaggggggagttccctctacttctaatggatagattattatgttggaatgtgagggggattaatagccaacaaaaacataatgaaatcaagcaattggtttatttgaagaaggttgggctagttagtctcctagaaactaaggtgcagaataagaatatgggaaaattgtattgtagtctttttcaagggtggtgtttttctaataataattcttggttggataaagggagaatcattattgcttggcagcccactgtgtttgcggttaatattaatttctgttccagccaattgattcatttccgtgtgcaatcaatgcagcagaatgggaattttttggtaactttcatttatggttttaatgatgagcaaaaaagggaagaattatggggtgatttggagagattagctgctggtattcaggagccatggataatattaggagactttaatgaaataatgtttgccaatgagagaattggtaggaaagctcaaaataatccttcatcaaggcttcgggattgtatggaggcttgtgacatgtctgatctgaaatactctgggtccttttttacttggaataacaaacaaaagcctgaagctagaatattttcgaagatagacagagccatggttaattcgcgatggagctatgctatgccagactcggaagcagtgtttttaccagaattaacttttgatcacagtcctatcctagtgtccatttatcgtgattggtgctcggggaagaagcctttcaggtattacaatatgtggaaattagcccctgattttgatctaaaagtgagacaatcctggcagggggatgtgaatggtgcaaagatgtgtaaggtggtgtccaagctgaaaaggttgaaaccaactctgaaacagataaatcaagagggtttttctgagatccaaaaggcagatttgatggcaaagaatgagctgattgcagcccagaatgcactgaccaaaaatccgtcttccttgcaattgatggaagctgaacaagaagctactagaagttataaggagattcataaggcctattcaatgtttctctcacagaaggctaagataaattgggcttcatttggagatgagaattcagtgtttttccatgcttctctgaaatcaagaaggacgcaaaacaagatcttctcgattgaagatgaacaatggttcgactctcctgatggtgttcaacatgcttttttgagttattatgagaaactattggggacaagtatgcagaacagacgtagtgtattgcagaccgtggttaatcttggacccaaaattatgaatgtacatgaatccatcttactggcagattacacgagtcaagaggtgaaagatgctctgttttcaattcctggtatcaaggctccgggaccggacgggtttggaagtgctttttatcaggataattgggacacaatgggaactgattttacagaagctattttgtcctttctcaatacagggaagatactgaaagagattaatcataccactatcactttaatccccaaaattgcttgtcctaagaatgttgcggatttcagaccaatttcctgctgtaatgtactctacaagacagctactaaggtgctttgtaatagattgaggagagtgttgccagatctcattgctgaaaaccaaggtggatttgtccatggaaggtatattgcccataatgtcctagtgtgtcaggatatggtgagattatatgggagaaaaagttgtaagccaagctgcatgattaaaatagacttgaggaaggcctatgacaccatagaatggagttttctagaggaaatgcttgctggttttgggtttccgattcagttcattgagctagtaatgacctgtatcagaaccccaaaattctctctcctttttaatggctctatgtgtggtttctttaatgcaaagagagggttaaggcaaggtgatcccatgtctccccttctctttgtattaggaatggaatacttatcgcgaatctttcggaagattggagaaatgcctggttttaagtttcatgatagatgttcctcactaaaactgaatcatatgtgttttgctgatgatcttttgatatttagtcatggagacttcatttcagccatgttgatgctaagagggctgaaacttttctcttcaacttcgagattaatgcctaatgaacaaaagacagcaatctattgttcaggcatgccagatgctgaagttggaagaatcctagatgcctcacatttcaaccgaagttcccttccattcaggtacct

SEQ ID NO: 58221 - DNA, 1611 bp, Cannabis sativa
cagaatcacaactatgcggtggaccctgcatcactgccagaaggtgttgaagtcactcatgtaaatctcaacgatggaagctgtgctggtcttgcttatcctgctaaaaacattatgtctcttcagtatcaccctgaagcatcaccagggcctcatgattcagacaatggtaatgaaaataatatatatatatatatataatcaagcttttgtacaaattctaaagagtgattttatctatgaaactgacaaaggtgagtttgtttacagcttttagagaattcgtggagctaatgaagaaaacaagacatgcttaaaagagaacatctagtgtttgtgtgattgatttatgttgaggtgggaaaaggctcaccattatttcaaggctcttatgtggagagtagcagtagagaagaatggtttactttctctgtttttcttttcttttttccggtcaacaatttttttgcttgtattgaaaaaatagtagagataaaacaacttaatttggtccttaataattatggtcagttgtaacattgtagtttgtttgcttgtattaagtgacattggataaggattaacatgaattattataaaacattattagccaagtgagaggttgttttgttttggtttgtgcatgattaagtcatagctatttgctgtgttttttttcttttgaaaggtactatttgctttgactttgtaattatgatagttttttaattaacctattatttttttttttatttaaaaaacttagttataatatgatacgcctgctggcgacaatgcactcacacgtgtggtcaaattattagcttcaacaggggacacgaatgaaaatagaaataataagaaaattataattgaataaaatttaaaatttataatggaaaaaaagataaatagtttttttgttattattattatttcattttgtactgtgggatggtttttctttttatttagatatggaatagttattttatttatttatttatttttttgaatggatatatggaatagttattttattaaaatagtggaaaagttatttaattaaaacaatattctaatattttttttttaaaaaaaaaatatcaacttcattgaattaaaaacattctgaatacaagagaatcttcaagtcaagccagacattatactcaaaaatgctacaacgagagaaaaatcgagcatgctaatactttagtatcattgaacttgagttttttttttcatcgcgtttctatgacattgaatgctattttctatattaatgatgcattttgaattctttttagttatttgaaattcataatttgttagtttctctcaatattatataggattgtacctaaatttgtgtaaaccgtctaatccgaataacctgctcaaattaaatcggataactccacaaaaaatgtaaattgaaaaactcgacgaaaatataacccgctcaatctttatattgggcgggttgataatcaacccaaactaactcaataaaaagagttatatatatatatatatttattattaatctatatattatataatttatatatatatttataaaaataaaaaattcaaactactatattt

SEQ ID NO: 58222 - DNA, 1628 bp, Cannabis sativa
gtgatcaaaagtcccttcattcaaaaaatttgcctctgctgttcggtattgatctagccaagcttgattagccatgacactatcaattttagaccatattcgaccatgtgaaaaagttcccagttgccttcgcatcttccaaatgacactactcaacacaattcgaaaaagctatgtctggataatacttgactttatggcctattctctcctcctttgagagaatatcaataaagtctcccattaaaaaccaattatcattggttgctaaagcagccaagtctttccagagcatctctctcccatttttatcattgaaagcataaatgatagtagcaaaactactaaaggtatgatccattgtagaaatttttaaatgcattaattgacttgtacatttaataatatctacaatgtatcttaccggattccaagcaatgacaattcttcctccacgatgccacgcaatatttgttgaaaaacaccatccatcaaacacattaagatacaaggtccccaatttgtgaaccttgatccttgtctcaaggagccccacaaaaccaacaccctgattttgaatgaattgcttgatagttctttgcttttgagtgttgttggcccctcggacattccagcaaagaaacttatccatttccaagagagggatctcccccctctcttgtattattctgttttgccccaatttccacttcttggtagtcctgtttctcaccacctgctgctattagcacactaaaagtgttctgcaattcggtttcagcaggtgcttcttgtaatctgcttttcttccctccagaaaccggttgaaatccctcctcatcgagtataatttttttgttgactcccctgttatccttcttcactatccattctttcttaggctgaatcgtcttcttacattcggctgtcacatgtcccatgccatggcattgttgacataaggttggcttccattcatactgtacaagaacagtagtggtgcttccatactcattcacaaattcaatcaagcctggaagttcttgctcaatactaacctctatcaacacccttggaaacataagcctttctcgttcccttgtaatcgcatccaccataataggtttccccaattgcccaactattttgaacaaagacttttccccccaatatttgaggtctaagtcctctaattgtatccaaattggcaccattttcacatcttctttcttaatactaacattcgggtcccatggtttcataatgaccggttttcgattgaagaaaatataacccccattcaaaacttcatctctttgtccaaccgaatgaaatctaatcaagaacactccataggctagcaattttactttatccacattgtcattccatttacgttttgcaaagccttctaatacatgtaaaggtggattggctccaagaacataacacaccaatgaaggtttccagtaattaacctcatcttctatatcctctaattcaatcttcaccatcctatcttgctgtgaatttttaaaagagttttctaaattcctcacaacagttgcagatctcagaataggaggagtagaattcatacctttggctaggttactgttgcattgctc

SEQ ID NO: 58223 - DNA, 869 bp, Cannabis sativa
tgcaattaggaaatgaagcattaatacaatatacataattgaaatccataaaaaacatgaataaaccaatcaaaacaagcaacaaaacccaccaatcaaaaaaacaaaccaaatttatcaaaatcaacaaaaaatttctgattttcaagaacatcaaaaaccccccatttgcattttttgaatcaaaatctctttattttatagcaatttttgaattaaaatctcaacaattattatcaacaacaaaaaagacataaaaaattaaagaaaatgaaaaatggagtgcaattaggaaattaattaatagacataattgaaatccataaaaacatgaataaaccaatcaaaaaacaaaatttaccaagatcaacaaaaaagtctaaattttcaagaaaccccgaaactcacattggcatttcttgaatcaaaatctcaacaattatcatcaagaacaaacaacaacaacaacaacaacagaaaaaaagaaaattttttgttcatgatgatgatgatgatgatgataatgtaccttgcactaggggctctactaggaaccaaaggctgaaattcaacaggcaaacccaagaaaccattaaacctatcaaaggtaacatgtgcaacatggcgcacgttagtaggcaaaccaatttccattgagcaaatttgctgttgttgctgctctccttttttatctccaaacttaaaaccaaacaaagattttcttataagagccactaacaatgccaacagagtcaaatgttgaccaccaccttcaccttcaccgtcaccgttaccggcggtgtcattcacttcctcaccatttgggtcacagtcagtcaccccagaagaatttctctctctttctcttt

SEQ ID NO: 58224 - DNA, 1211 bp, Cannabis sativa
catcaacacattttgaatattgctagagccctttgctttcaatccaacttacctcttccttattggtcatatctcattcataccgcaacatacttaatgaatagaactccttccattctattccaaggttgctcctcatatgagaaactacataacaaacctcctcaatatgaccacttgaggtgcttcggatgctgagcttatgcctctactctcccatcttctaggcacaaattttccccaagaagccgtgcttcaatcttcattggctacccccaagggatgaaagcatatacccttcttgatattgagacaaaacaaatatatcactctcgagatgttttcttttatgaaacaattctcattctcacatccacagttttttccaagaaccgtgtctcccaatgtctcaacatctctctcgggtaaacacaaaaaacataccagattccactggtatatttccccaaacatcaatcaatacacacattaaatccacaccccattgggtccctggcattatttctaaaccagcaacaattcagctagctaacgaagcacctagtatcatctcagctgctccaaaaatcacaccagaccttgttgttgttgatacactttcgaccaacccttccaacatgacaacagctcatacggttgacaataactccaaacaatgcaactctgatattcaaactgatatcacagtccaactcattgattctcaaccttcaattgctgaacttgctggtatatcccaaccagcagcaacaaacaatatttctcccacaactgatgtcaataattgactccaacaacacttcctgacccacaaaaacaatcaaaaagtggctgatccatccacaaactctcacacttaaaggactacgtttgtcacaccacttctacaacttttcctatcgaaaagttcatctcatacactaaactaagtccacaattcagggtcactgtcctcgcagcctattcacatattgaacctcgttcatattccgaggcctcacaattcacacattggctaaaggccatggacgatgaaaccgaggccttagaaaaaaatcatacttggattgttaccaaattacctcctggccaccaagccattggatgtaaatgggtttataaagtcaaatataaccaacaaggggaagccgttcgctttaaagctcgccttgtcgccaaagggttcaatc

SEQ ID NO: 58225 - DNA, 1589 bp, Cannabis sativa
  modified_base (489)..(494): a, c, t, g, unknown or other
  modified_base (1170)..(1186): a, c, t, g, unknown or other
atagtaagggtatatttggtagttaattataaaatagggtatatttcaattaaatttattttaaagttatttttggtgaatgtgtaataaaaagaggtaattattaatttatccctattatattttgtgcaaaaaaaaatttagcatgatttccagtatatgtcaaatttttctcccattaatacattactgttaaagtttaaatttataaaaataaactagaaaaacgtattagagggcaaagtacatcaaaccaagtaagaatacattgaatggtgagtttagaaagccactatatgattggacttgggtgtaactcaatataattactcaatttattttgtttgtcttatcatgtaatatttaacaccatcttcgatgatagatataaagattgtgttatatttgacacaaaaagtagttttgtggtagatttacatcaaattttaacattgtgctccaatgcacaattacaaaattttgatgtannnnnnaatatctaattaatatttttattacaaaaataaaactaataactttattatcaattttattattattttaatatgtaagataataaaataataatataaatacttcataatttaattccatagttaattatacaaataaaataatacaaatgacataaatgtaaataaaaaattagtacatttattgtgatgtaaattttacatcatagcaaatgttgtgctaaatttagtaaaaaatttgctatgtgtcaaatttacattactttttggcacatcattaaagtatactttttgttaaatgagataaattttagttttacaccatttatttgtatctccattaaagatgctctaaagggtactaattacactcttaattagcttagccctctaggagaattgaatgtaagtaaattttttatgaattactaattattttgtaaataagtcaataaaatataggaaaacaaaaactacagtatataacaaaaaatatttgtttttttaatgtaaatgaagggcagaatttattttcatattattaattttgaatgaatatattaataaggaaataatgcacccattaaaaagggatataatgatacatgtttatctgttttagtatttgaaataatatttttagtcaattttttttctcatggtcatgtaaattatnnnnnnnnnnnnnnnnntgcaaaattttaagaaatttggaaaagtttaatatgctgaaaattgcgttcatacattatgttgcacgcgtgattattttattttatacgcgtgtaaaatagactgtttgaacattgttttctacattgtaaattattccgaatttctcaaaattttgtaggatatcttaaatagctataacgtacatggataggaaaaaaaattagactaatttttttttttgaatgccaaaataaatagagagtgcgtcagtacgtttaaaggggtgcattgtaaaattatcaaatattatatatgtgaatgtgatattaattttgaatgaatatattataagaaaattctacaatgcacccccataaaatggatacattgatgcatccttatctattttagcatccgaaa

SEQ ID NO: 58226 - DNA, 858 bp, Cannabis sativa
ggtatgttcatggtcgaccagccccaggcttggaatcagactctggtcagccaagcctgggtcaaacaactggccatggccaactagccctatgttgggtagtgactgactgcttgtgctccgctgattggccgatgcaacagtgtgttggcacggggttgatcacattaaatgcttgggtttggtggatccaattgtctaaagtgattgttcaatggtggaacaaaatcactttgattctcactcctcgagttgatgttgtctttggtgtttccacccgttcccaaacttagctggataaagattgcccttagaacaacttgctcccaaatggtttagagaggaatctcagtttgtaggttacctagaggtgcactactaaatggatgctgactagaggttggctaagtgggggtgttaaagagccagagatacctagacggtccccacactactacaaatattacattttgcgtcggttatgacatcttttatgggcagacgcaagtttagcatcgatttttagagaattagcgtcatttgtgcaccgacgcaaaaatctcactttttgcctgagtgcacaaccgacgcaaacttcctaaattttttcttaaaaaaataaaacataataacgggcttcgggctcatttaagaaacccctaaccctaaatatttaataaccccagtcgcctcccccatttctaacattttttctttctccatcaactctcattctctctctttatttttgaaagtcccaaaccactcagcccaaatcggacccaagtcaccgtcgcacgaaaccccccaaccactcagacacgttgccaccacaaccgttcaaaggtaatttctttc

SEQ ID NO: 58227 - DNA, 699 bp, Cannabis sativa
aaaaaaaaatgtcctaattctaaaaagaaaaaaaaaagtacaaaataaaataatataaaaaaaaacctaacaccctaatagagtaccaaaataataaatacaactaacaaataaactaaaaaaattaaactacttgtttctttttttttcactaacagagtaaacaagagagaaaaaataataataatatatagtgattttttttgaatctatatatataactatataaaaaaaaaactaaattacactatattaactaaaaaaatttatttttatataaacaaataaagagagacaaagaaatgaatacatactaaaaaataataaataaataaactactataccaaactctggtagagcagaaacctcccctgtaacgacgctaaaaattgatgtcgcccaattagttactctgcggtcgcggtagtaaacgggctaagaaaaatatactcaaaagaacagtaagtaattttacaagaataaaataagaaccttgaatgtgatgagtatatttagaaaatgatttttgaaaattaaacaagtaattaaaatgaaaagtgatcaaaaaatgattatgaaagacacaagtttcatacatgcaattatattttcctaataaaattgattatttagagtcaactataattctacaccattaattatagttggaaaatgtgtataattaagttcactagaaa

SEQ ID NO: 58228 - DNA, 1236 bp, Cannabis sativa
tgttggaaagatcaaagtttcttacgtaatttgtaccctaaacgttgatgcttactgcaatggatacatgttttctttcaaaaaaaaaagtttaatataggaagacttgtttgatgaattaattaaatataacaaataaaaaaaataattaaatatcattgattttttataattaatataatattaaattttttaatgtataaagttcatcaagatttttattacatgtcatgtgattcatgtaataagaaatttatgttttataacaacaataaagaaacagattgtgagaatccaaattgcagaaaaagatgtcttcctaaaccacggtaaacacattataattaaattgatatttaaacttaattgacattcataccagccgtgacatattcttataaattattagtgcaagcatatatgtacaactcgacgatggtaccgagttgctagatgttcgaagatgttacagaaaacacattctcacatactacagttcaattaaagtcatattaggtaattataaaaagataaatatataaatttataaattttaataaataaaagttttttaaatcttattaataattattttttacacaaacataggttttttttccaaaaaactacgagaaattatcggccaaaaaatggagaattcagttgtatgtatccaaaatgaacaatgagtccaaagtacaatcaattcaccattcaagcagctaaaccaatgaaagattaggaagaagtttcactatactcttttcgtttttctaataatattccatatattaagacttattttaataattttttcttctttttaatgatcgcacactttctttaatttttgttacataatgttttctttaaattttgcaaaacttatatgttgttcctttaaattttttctataagtaaataataaatattattttgttatgacttatagatacccaattatattttactaactgaatataatagcacaaatattactttaattaaataaattattcgcataatcatacttttagttacagaaatttaaataaaaataaaaaactaaactttaagggctcgtttggtaggcagaactggattggattagacacgctaatttgtccaatccagtgtttgggcatatcagaagtctagataactaatccagctaaactcatttgtctgggattatttatcccatccagggtgggataaataatcccatgcagatga

SEQ ID NO: 58229 - DNA, 946 bp, Cannabis sativa
atctagaatgacagcacaccaaagagggtcgtgatcaggtgtggtgaattccattcacacattttaacatgctccctcaaacttgacgtggttgatcgataacgccaagtttgtttttcaggtaggtgaattgttggatggtcatggccttagtgaagatatcagcggtctgttctgaagtggggatgtgtcttacttcgattatgccttgcttaacctgatcacggatgtagtggacatcaacttcaatatgtttagttcggctatgtaagattgggttggatgtgagttgcttggcacctacgttatcgcaccagatgacagcagggagtttgtgttggatgccaagttctttgaatagagagtggagccaagcaacttcagtagaagtttgagaaagggctcaatattctgcttcagtggaagatttagctactgccttttatttttttgaacaccaggttatgagatttctccccaagtacacacagtaaccggttgttgatttcctgtcatcgacagatccagcccaatcataggcgttagacttagtttatctccaacagacagaggcgttggacttgaagccgagtgcaacatgtgtgttttggcaagaagatcagtggtatattttccttgagagaggtgaattccatacgccccccgagtgatttcaaagccaaggaagtagttgacggatccgagagtcttaagtgagaacacctgttgcaattgattgatgattgtgcgaacattgtggttgttatttcctgttaagaggatatcatcgacatagacaatgaggtaaagttcagcagcagcattatgataaaagaagagtgatggatcggatacagagttacaaaatcccagagaaaacaacacttgtttgagacagtcaaaccatgcccgaggtgcctgtcgaaggccatacaaggccttttga

SEQ ID NO: 58230 - DNA, 1380 bp, Cannabis sativa
  modified_base (293)..(302): a, c, t, g, unknown or other
aataagaggaaggaaaataaaaaagatacattattatgtatgcattaattttttgtgattagttttttaagacgaataatttattttctaatattttgtgaaagacatacgtctagttatatttattaaagttttgattataatattataactaaattttttaagtggagttctacttacaccctacaaaatgataagtacaaaaaaaaaacgaagtttaaaatcctttttaaaaattattcttaatattttttttaatttttttctaacattattttatgttaattttaatnnnnnnnnnnataatttttctaaaccatgtataaaatttattatttttcttttccttataaaattttatataattttttattttattttttttgttcgtaatatttaaaggacaatttatttttatttgataggtatatcttttaagaatataaactagaagaaaaaaaattaaaaaaaaatagtttcattaaagatataaattttatataacataaaaattattaaaataaactttatcatttctcattttccaaatatatatgtaacattataaaacttagcatatttttttattattatgactttttttaaatattttttttcttcaataaatagaagttatttgagtaaattagttaggaagacattattgtaataaaagtataatattatgactagttattaaataaaattaaacattgtttaaaagatgacatttgtcattaaattggatagagagtgcacaagagagtgtgatagagagtgtccttagcacttctctaaaaagattgtagcatcatagttaaccttgagaacacctatattcagttttatctaccgcttagaagacacaacagtaaaaactgttacagtaagttcattcaatctcgtagcttgaacactcaattattgtacaaggtatgtaattgcactagggatagacatccaatccaatcaaatctttttctcctcatctgatccaatccaattagtaattggatttgaaaaatcattatccgattcaatctaattagacctcaaaatctaatccaattactaattagattggatcggttttttaattagatatccaattacacacctaaatttaaatattaacataaaaatatgaagaaaaatacatataatttaaatatcacattttatttaagtttaatactccataaacataccataactacaatatataatgcaactaaaagtttcaaataagtaaaacaacaatatttctaaataataaaatataacaaaatatcatgaaaataaatacgcaaaacaaccatctgttacaaatttaacacaaaaaaaaaaaatcaataaaaatataattggattagatcggtt

SEQ ID NO: 58231 - DNA, 1215 bp, Cannabis sativa
attgtgaatgaggtgtcaacaactattttagaaataaatagtatcaagcaaccaagtagtatgtctcatactgatcaagctcttgtgacaagatcaaaatcaagtcagtgtaggagtacatcgagaggaagatatgatgataaaagagacaatcgtgctcattcatgctcttggagggaagtgctactattgtcaaaaaaagggacatgataggcaaaattgtgaagagttgatcaagcatcttaaagcaatgaggaatcaagaatgcaaagacacatcatgttccacaaatgttgttggtgaaggctttgcaagtgactctaatgttctctctatcatagctaatgaaaattttttgactctttgattctggattctaattgttcgttctacatgtgctcatataaggaatgctttgacacttataaggaatatgatggttgtactattttggtgggcaatgattctagctctaaagttgttggaataggaactattaaggtgaagatgtttgatggtgttatgagaacattgactgatgtgagacatgttccaacattaaggaggagcttagtctctttgggagctttagatacttgtggttgtgactattttgcaaaagatggtgaaataactataaagaaaaggggcttggtagttgtgaagggtaagaaagagcgaaatttgtatagattatttgggaagactattttaggtgaagttgtgaaggttgagtcaagtcacaaaagacatttagttagagtaatttcagttagaagttgtttgaagaaagatgacatcagtaaaagattgaagaatgtgaagacaagtgataactctaagaaaatagagttatttatatctttttgggcattaaattagctttgttctgaagaatgtttagtttaatctaggactttgatttggttttacttaattttgcataaatattagttttagtatttatagattagttttagttcatttttgtaatattttattaattttatttagttgtctatttaaaaaatattattctcaatattgtgtatttatatataaaaaaaaaagattaaatgtatattttaaacttattgttaaaattgaaagaaatgatgttaaagttcataaactcgtaaaagtacaaagtatttatacacactgaagtttacattgtatgcattgtttgtagtgttgataatatgaagaaactaa

SEQ ID NO: 58232 - DNA, 641 bp, Cannabis sativa
ttttttttttttttgtaaaaataagaattcaaaccatctggaccaagggctttatcccaagatagttgaaacaaggccttcttaacctcatctgcaataaaagatttggccaaaaactaaaatttagaggtactgattttattggtaatgcccttaagaatgctatcaatggagctaacatccgagccttgagatgaaaacaaatcagtgtaaaagttaacaaaattatcacaaatatcatcaaaactattgatacaataaccattatctaaagtaatagatctgataaaattaattatctttctagcaaaagccttatcatgaaaatacttattatccccaaccttaagccagtttattctagaacgtttcttctagtataattcttccttatataatagacatctaaagaagattgaatttctttagccttatttatatcaacatgggagatatggggggaagagaaaatattatcaagagaattttgtaagtgtctaatgttatgcttaaacacattcttatttctactccagacttaaatattttgagcacaagaggattgcttctcaaggaaagaaacaaggtgattcctatcagcactaatcaaataagggccagtttggtacaactgtgctgtg

SEQ ID NO: 58233 - DNA, 1381 bp, Cannabis sativa
attttgtacatttactctgtgaaaacctgtcctgcaaggaagcgaggatcaggtagtttttattatctcgggacccacaggaatgatcgaaggattattgtgaactaagttcaaggatgatttcttctgcacatctgatctctcccccatcaacacaactgcatttcgcttaatatgtaagtattaccctttctcaaaaacttggttttgatttttcaatttataaattgaaggcatttacttattgtgcttattttattgacagcaatctcgaagaggcctattccaactcccaagatggagaaacgacacaagattgtcctaggtcttctgtttaggttgcattcagctgactttctattgaatgagatcaatctaaagacctgtaatcttctcagcaccaaacaatccacttttgacttcaaagtccccttatattctaagtgacaacaggttcctaaccctgctgacgaggaagacaagagctgtgtggctcgcatgcacttcctaaagaaaacatcccctcaggaagctaaagaagaagcaacccgtggtaacaactgtggatgtctcctaacatgcttagggctgaacgtactttgctaattaaatttgaggatagccagtataatttttatacctgggatagtttctgtatcgatcgcataactcatagatttgatagttggtacccaaaatttcatgtccaattaagttgcaatagctcttacttcagaattgctgagaagtatggtacaaattttgatagggcgagccatctagactaggacatgtctccacttaatccctttgatctgtacatgattgttggttctagggagtttattagttattatagtccttcttcatcctcgtctgataactatggtaaatttctctaagtaggagtatattccccacctttttattgtttattttggataagtgttgacttatttcttttcttgcatatatggatctcgaatttgaagacatgctctttagtcccactctctcaactaagaagtccaagaagcgagcgacttcaacaaatgaggcctctggatctacaaggagacctcaaaaagaacaaaaactactgcaaataaaaaacgatcttcaaatcaacttactattgagcctactagccgtaatagcccacttctctcctctaagtcgatagtaagtgttgctagtttactctagaatttctgctacaagcggagccagatcactgccaacattggtttggagcctctctgaagccactagatggttagtggctgatttggattctttagatcccaaaaccaaattagctagttcaactttgtgtttggtggcaatcacggtggctcgttgacaaaaatcatctatctca

SEQ ID NO: 58234 - DNA, 1304 bp, Cannabis sativa
cggccaattagatgtgacagctagggatagaactgttcgaacagttacagatttgaccacaggactaaaggtctcttcatagtcaatcccaggtgtttgcaagtaccctttagcatctaaccgggatttgtaggtatttaaggagccatctgcattgagtttaattctgtacacccatttattgtcaataacatgcatatccggatgatatggaacaagtgtccatgtcttggatttaatcaatgctgtgttttctttttgcatggattgaagccattttggatctttaagtgcttgctgagttgttcttggttcagtaggaaaaagagattcttttaatggatgtcttgtagccatgtatgcctttggtttgtatataccactttgggacctggttttcatgtgatgaacccgagtaataatactagaaataggagcttcagctggttgaatatcagatgtagagcaggtatgggttcggatacagggacagtagtggtaggaggctgcaatattatatcagaaggtgatgtattattggttggcagaggcaaattgggtgtagttgaggcaggtatatctggttggtgggagagagtttcggaagcaggttgtatatgttcttgtggctgggaattaatttctggtgtaggcaggttatttgctggtgtaaagtgggaaattgcaggggaaggcatttgggaaggtggctgttgtgtaagagaatgatgtgcggaagcaggtgcttgggtatttgttgatgagtgtggattgtgttgaacatcagtagcacaaccaggaatggaattagcaccagtagcaatattagaaaaagaaaaggtaggaaattgagagtaaggagaagggtgtacctgactcgtgttgtagttggaaaaggcagggaagtggctttcattgaaaataacattccttgctatatatattctgccattggagttctcacagagatatcctttgtgatgagatgagtagccaaggaaaatgcactgatcagagcgatagtccaacttatgattgttgtatggtctcaaatgtggaaaacaagcgcaaccgaagggcttgagaatcttgtaatcgggctgacttccaaataagcattcataaggagttttaaaaccaagaacggctgtaggaagtcgattgattgtgaacacagcactttgaaaggcataccaccaatatgacaaggataaaccagcttgagcaagcataaccaaaccagtttcagttatatgtcgatgtttccgttcagctctcccattttgttcatgatcatgtggaca

SEQ ID NO: 58235 - DNA, 843 bp, Cannabis sativa
gtcaaagaaattaagaaataagccgtaaaagatattaccttaagatatttttttgttagtgataggtcttccttgttgtggttcacactcgtgggtctagctatttcttaactagggtgccggtggtggtaggtgggtctgggtcgtctacgtggtgtggggtgtgggttataggtcagtgtagtgtggagtttcgttggacggatgaagggcggaagaaggaggaaaatgggagtgagaaaaataagcacaattttaagaggggatcaaaatctttgggtttttttttttaaatttttttggatgagatgtaagtatgaaatgttaaaattttcaaatgttttcatattgctttggaagatgtgaataaatagttttgtggtttgttccatattgagtaggaatagaaattttttaagccaaacactatcaatataagtgtcactagatttgaaaagcaccttaatacaccaccacattaagaattatataaaaacaagaaacacatcggaaacaaaaatcgatctctacaatttttttttaactttttgaattatcttatatatttgttctgatagtttttatgtggattgctatgtaaaatttgattgatagtttttatgtgggttgctatgtaaattttaattgcgatttaagttattatataggttgcaatataaatttctgtaaaaatatatataaaaaaaattattttgaagtataaaattaaataaattccaaaccatttactagatacatttcacaatttaaataaaaacttttgaaaaattctatatgcactcttatctatttttttgcatattttaaaaaaaattaatttaa

SEQ ID NO: 58236 - DNA, 1141 bp, Cannabis sativa
  modified_base (50)..(56): a, c, t, g, unknown or other
acataaaaacatactaatatcccgtgttataatcaggcgcccatacaccnnnnnnnaaccctaactgaatcaggaacgttctcgacaaagtatgactaactgggaatccaccctatactcagtactctagtcgtaccaattacgtagcagataactcatactatctcatagcctagcatatgtctgttggcatctcggtgcaactctatgtacacctcaccgatgccctgacatgctaatctgattactatagatttgcctagtctgacggcaactaacatgtacgctaaacatgtataaatatatgaataacattatactaatcttaccttgattccgaatttaggtgtgccggtgaacctgagtggaacaactgctcgacgaattataggctcctacgtcacaacaatcataacataggtaagtgacgcgccaaatcacttttcggggacttaaaacttgaaactaaaagtttccctatcgatgaataacatggaaatgccctaaatatctcaaagatgggaaaaactaggtttcccaaaactgccccaaccggtagaccggttcctaactagaattcctgttatgtggggtttcctggggaccaactagaattccagttcctacaggtccctcagaacaagaattccggttcaatgcaggaaactttcaaaatttcctatctcaaccaaatcaaccgcaaaaaccacaataacttccagacctggtatttagatcatatagaacatattcaaagcaacaaaacacttctacaagctcaaaatcaagacttgccattaaagctccaagtttgagttctaaaactcaaaacttgcttaaacctacttacagccactaaaacaagctcaattcagcctatccaaacatattttatccactgaaaacaagaacaattaacttcagcaaccaccacagccaataacccaattcatgcaaaaaatttctttcgtaaaactcaaagaaactaaaaaggagagttgctcaaaggttaccttagcttggattatacttagagctgttggaaacttgcaagatttgaagaataaaatcaaaccctagctggttctagggattttgaaaaagagagagagagtttgagagcaaaatgagtttttccttc

SEQ ID NO: 58237 - DNA, 1421 bp, Cannabis sativa
ttctcctcttcgagttgatcgactatgggttcttgacagcctcgagatctcacttgcttcttcacgctctgttcttttccccctgagtgtggtttgtcgtatttccctcattagggtctgtatgagtcctcgctctatgggttcgagaagaacgctggtgatttcttgtaggtgacctacattctcccggttgagtcagaagatcctcctcattgtcatgagaatattctcgttcatcagtttccagttgcctcccatcctcatcttagtgagagggttgtggctgatcattttgattttcagggggtatctctcattttccctgggttgttcttcccaggcattttcctgtctcctggttcgtgagccacgaggtctgcctcgtggtcttctcactccagattcaggttgattttgagcattcgtcccctgtgctaccctgaccgcagctgcatcacgttctaattcagcgttccgctgctgcgcctcttccagacagcgccttaggcgtcagttttctatttcataagtaccttctctcataggctgggcacccccacaattgggctcttcatccctcgtcacagggttctggccactcccacactcctcgaacgtgttgtctgcatactaggaccaatgtcggttgggttctccgtaaatgagtggtccgaatgctgaggccaccctcaggttgagtcctcttggatcgggtggtccgtcaagactgtgagttggtaaaccttctggagcccatgggctctttcccagaacgatgatgagtttcctcatgtggagtattaatattttttgggtttttagccatgaaggaggtagtttttctttaaaagaaaggaggatatttttttgagctttttcacagaggctctcaatgaaagcaccaaactgttaacagagatttttgttaaccaaatttgagcctaatcgtgacaataaaagctataaaataaaaagtacgaacacacagggtttttacgtagttttgtagttaaaattctgcatagtccacgagttaatcttattcagatttctgattattttctcagggcctcttttatatgagcttttttgtcctttttttatcttgcttgccaccatttataattacatagtgggcagttaattgcaaagttgactgtaatctgtttacattaatcatcccctaaaatcatggggtttgattacacatcacgtagtgtaaatgcggttatgatttgaaaatcatatagctgtgattttcctgcttttactgggtcaaaatgatcgagttggggccttcctcccaaggtcaatggtgcacgtcttgtgatgatcactgttcttatttacaaagagttctttgacgcttgtttgaatgttagcttctgactcgtcaggattgtaaaccttactgaagttaa

SEQ ID NO: 58238 - DNA, 2041 bp, Cannabis sativa
gagaattttttttaaatctttaagtttgttatttttatacagtgttaatataaattttaaattttatataaatttttgttactgctaaattaattaattatagtatatgttggttaattttataaatttactaattattggtaatttaagtttatttggattatttttcatgtttgtgtatgttatgttatagtatgatactttttgttttgttttatttgttttacatagtgactatttatggaggttgtcaaggtcacttttggagttacttacgtgagataatttttttttatttttctttgcttattttatgattgtttcctatagttactttacttgatgttacaaaatattttgtaagaactcattatttgttttgttatttttgtagggaaaattttcagtcattcaagcagagaacaagtatttttgatggaagggctaaattggtctctcttgtttgttggagctttctattcatttcaagagtctatttgtttagttttgatctcagctttttctaagccttttcgcttggtgtaatgatttggactttttcttagctgatttggttagtttactttctagttttcttgaggcatccctagttcatatctccgttcatgaattagttgtgcatgtacttagggtgaatggtgaatgagcttgaattgatagttttttttttttttttttatcatttcctattaatgatgtgttaaactctgattattattaataagagtttaatttaaaaaaaatgataaataaatatataaatatccattatgcatttgaatggacatgcacatgtggcatgtagagataatagcaaaaattgttgtgcatgaacatgtacccgagataggactaggaagatattcaaaatttaaagattcaaaccttaactagggttaattaatattaacaatatggtcagttggtatagtattgtgggtgtagaggtctataaatagagagccatactcttcatatttcttcattaaccaaaatcaatctctcagcaatctcccttttatcctatatagccaaacctatatatcaccgattcaagcttttatttttatgtgtccacttcgtacttggagtcataatcttgatcaaagcctcatcattgccattcatatctttgcctttcaattttttatcaccgcatattggtaatttttctaaaacacattttatgaactcttttagtcaaactctaataatcttgtatttgatatcaaggattcggagtctaagaatctagtgcgagccaagcttgcttaaatcttggttattggaagttcgtcacatgtttcgctaatcttagttgaaactatagtcatctttttctttggtgagttttacgcaagcttggatgcaagagttcgttggatagtgatttaaggtattattttcgaagaaaatatatgataagcatgatactagaaaataaatttcatagtaagatcaatttcaagttactatcattgtttaaactgagtatttaatttaagatttgaaattaggatttacaagtaccgaaagaattggatctacgcaagtaaaaggcaatcaagctattttttccacgaggtaaggaaattaagtagaaacttttaagttttctgtatgaaataatgttcaaaaggagtaggaatgaggtataagacttcaaacctatttttgtttgttcattattatattatattgtttgaataatggatggtacaatgagttcgcattatttaaacagtagatatgtgtatgtggtttgaataatggacggtacaatgggttcacattatttagactatagatatgtataagtagtttgaataacggtcggtacaacagattcacattatttaaactagttatgttggtttgaataataatggacggacggtagtacaacaatagattcacattatttaaataattatatgattatgatacagttatgatataattatgatatgattatgtcatggttatgatatgattatgatacagttatgatatgattatg

SEQ ID NO: 58239 - DNA, 947 bp, Cannabis sativa
gtgtcaaagaacaccttgtaaacaacttgtaatcttctcttctatcatcaataaagataatagccattggggctgttctggccgaggagtaggcaagtgattcataatcacttgttcgaacctcgtaaattgattgtgtttgatttcttctcctactcctattgctcttaattgctttacttatacttgttcaattctggttcttattgctggatttgctactagtttattgcactttgttcatagctgcattgtttaatattgaattgttcagttctgttcttgattaacttctttgtattgtgttgtttgcgaggtgagtgatcatgtattgatcacatcaaatacaatacaatacaatccaacacagtacaatataatacgatacaatacgtcgtacaaaacgagtcctaatacatctcacattcacgctcaacgtgatgtataattaataaaatttgtttgcaaattctgggaagcatccatcctatatgcatatacaattaatttcttgactagaatactgttaataattaatgcactaaagaaaatctagatgtacgcataatttaaattgttataggtccgcaaattaattgtatcgcatatattctatatagatttatttcagtcttacggagtttgcttcatctaacgtgatatatgatcaagccgtatattaatataaattcatgtacttccatacgtacacaaacataacattataataattttaaaacccatggcaaccaaatgattatcaagttgtatttggatccaaacacaaacgcaaaagacattaattgaagtgcacatgtgtattcatttcttttcatgtgtaataaagagaagtgttacggtataagaaagtgtcattatcaatgtatagtttgtgtgtcgatccgatacgaaaggtcttagcatgtgagctaacacactaagtaatg

SEQ ID NO: 58240 - DNA, 1014 bp, Cannabis sativa
atatatatatatatattaatagatatctatccttcccaaaaagcatcataccaatggagatatataaatatatatatatatgtctatccttatatactcacaacccttctcctttcaagccaatgtaggactttgtttgcattcccaataatcttttcctcaaacataggactacatagcctcccctcagacgatctttcattgcaccgccgctatcaccaaatggaacacatcgcctgaccttcattgtcaggaagactttcgacacaagacaccaaacaagatctccaatctgttcattctctaccaactagtgtactttcctccataacccttcccctttcaagcctatgtaggactttgtttgcattcccaataatcttctcctcaaacacaggactacatagcctcccctcaaacgatcttccatcttgcaccgctgctttaccaaatggaacacaccgcctgactttcattgtcaggaagactttcgacacaagacaccaaataagatctccaatctgttcactctctaccaactagtgtactttcctccaatgcattgaaacgcatgccttacatggagccctaccactatctcgagagtttcttgctcattactaggccaactttagacggaatcagagtacaccgcctaactaagcacaaccacggatatcatgagagtacactgaggcacatcactttaagaggattcattcgaatggttaatgttaggttatggctctgatatcaatttgtcaaggatcctcaaacaccaactatctccaatctaagtatgatattggttgttttcggcctaagttctcatgattttgttcttgaaaaccttcttaaaaagcctcatactaatggagatatgtccatatttatatacccatgattgttaaatgccaaaatattacatattttatagtgtaaaaatacaaaataaaattaattctttataatattttcaagaaattaatgcaatatattattatattgaaaata

SEQ ID NO: 58241 - DNA, 1195 bp, Cannabis sativa
ttgtttgcttgttggtgtttaatcttataattatcattattatttcacaaaatattgcttgcgatattaaaagtggcataaaattgattatgacagccatccacttagtatttaacaaaaaaaaaattaatttttttttcattatttttccaaattatttattattcctaaagatgatttgttgagtaattgattttatccaaagtgttatagtgaccaagtgaaaaaccttaatagattccctctcttttctcattattttccaagctatagagtaaggaatatgtatagagaaaaatcaagaaatatagcttgaactttctatgtctattttcattgtaatgaacccataatggaaaaccaatcaatgataacttttcctttaagcatttatacctacaaatttccataaaattttccaagtcattgagagtgatcccattggcataaacttggcttaaaaagatgagaaaaagcatgtgagattctgagtcgaactttttggtaatttttatttggtattaacttgactctttgtctttgggcacttgagaaagaaagaaaaagtgattgagtaatgtgatttggtaatcaatgagaattgtttgtaataagtcttaatcaagaatcttggtaacatgtcatgagtgttcaatcctccaaaaactcaaacatgtcttgttttgatgatatttaaaccaaattaatctatgaatctttggataattccataatccactcatctaatgaggcatcattcaccaaatagtaacaacaaaatgtcaaaaatgtcattgtcaaaagttgaaaaaatctaaataattattgaacgagttgagtgaagtatacaacaagctattgaagaaggtttgcatttggcatagttagaaatttcaaaggagttacctatgttgcttcttggaaagaaataaaagaacattagagactaacactaataatgaatcaatcaatctttcattttaagttcacatttagggtgtgtttagttggggagtaattaaaataggcaaataggaatagaaaaaagaaccaaaataaatttaatgtgtagaaaaaaatatttaaattattcgtgtattgaaactacttttttgtaggcaaccaaatcaaaaaatgaaaatggtttccattccattcctttaccatttcattacatatgtttgattggatgatt

SEQ ID NO: 58242 - DNA, 677 bp, Cannabis sativa
gacgcagagaagcctcacggatgcaggaacaagtcaagactgagaagatacacggaagtccacttcgccttatcctagcttcccggacgcaaaaggcatattgtctctcgtggacctggagtggtccaaatgtggaagttagcccagctggtacccagatgagtacttgaagggtctatcgcagatatcgatcgcccaagagtgtcgcagacatctacctttggtgcaacccgaatcgcccaatgatagttatgctttttctgacacaagatcatatcttgtcccctatgtccaggcatagtagtgcgtgcacctcatccacctttttgccagacggttattctaaacctcttattttaaaggtgaaacctttgggcgacatgtgccccctacttttgaaggttaaacctttgagcgatacgtgtacacaacgtacaatggtccccaatttgtagttgtagcacaattgtttctaagggacccaatagtcagctctcttttgcatgtaatttaccccattagtgagatttgagcaaaaaccctaggcaggtcatagcatgtccatacccgccccttgcctataaatacccttctatttccatacaaaggggggaggacaaccaaaaatagctgaagctctgccaatattgctctagtctgagagagagagagagaga

SEQ ID NO: 58243 - DNA, 1252 bp, Cannabis sativa
tttttcatacccaaaaatatatcctcggtgttagatcgtgtttttcttcatttttttaatgcaaatcgagcgaagagttagtagtggtggtggttgtagctctagctatcgtttttggtattaaaaaaggttgaatcacaacagatattaaatataaatctaatctctaataattttattaatgtacaatgctttattttttattttgtaaattttttgaggattttttttatattactaagattgtgttcttggttgtgcgtggtggtcgaattttggttggcattgatggtcaaattacagtaataaggtaataatttaaattttaatagtatatatgtatgtattttgtgttgtattgaatatatatgtatatgagaatgagatataggagagtacgtattttatgtattgtataagaatataccgaatattttaaactaatagttttgtgaatattgtaaatgagaatgagataagattagaatatcaaaacaaaagttagtttagaaacaaaattttacaaaataattatattttttattttttttatttcaattttattcatgtgtttttatttttttagtagctagtaaatagttagttacaactatttaacaagctactaattttcattcatattcatgtatttttattactaactagatactcattaggaacaagttagtaataaattaactagttagtaatcagttacccataaatatattagtagtaagtagttaaataaaaaaaaattaattttgtagtatttctttatgttgtaggttgtgaggtcaatttgcaaggattcgaattattttgtgttgatcggtttttagctagcttgaggtatacatttgctaacttttgttattaattaattatgaatgcttaatagagttagaatatcttaaatatttatccatagtaaagtacgtcctgtgatatattgtactgcgctaggattggtaaattaatatatacatgctagatgagtttgaatatcttaaatattcatccgtagtgaagtagtttctgcgaatacatgtactgcagaaatgggtagtaaatttttgtatagctaaatgttattgtgattagtgttgtgataattacaacacacaagtatacgtatcgttttaacaattaatactcacaaaaagtgaggtcaatcccacgaggattatagctaagtacgttaaaattaaatattcttacttctatttggctaaataaaattttaagagaa

SEQ ID NO: 58244 - DNA, 998 bp, Cannabis sativa
gtgcagaaatatatttcattgcccaagtatagaaaaatatctattaattatatgcagctcaatttgacaataaaaaaaggggataagctaaagccatagacataggaaacatttgtctttagtgtcatatgccttgtagtggttggtttcattgattttaagcctcaaatatctatgcaggctggggtccttactctatgacctcatatagtgattgaggtgtggcctccactatatattaagtaaaagttatataaggaaacttactatttcctgaaatgggcctagaaaacagtctctagtcgaaaatgtgaaaacgtttctgtcaaagatttctgcatatatatatcactggcttccttcaaagtcaatgacccttgttcttgaaagtgataacacattgttttctgatcattcatttacaagaaaaggacacattatttggtgggtgatggtgaatacttacacttactcaagtgtcctaaatttgagtatgtaatcaggttttgtttaagtttgtttttgaaaagaaatgaagaaagaccacaagtcgtttctgagatatttaagctagagatttgtcatttgatgttttggggattcaactttgagctaccttgttttattatacttttacattgagccgaacctaagactaagacttgcactttaatattcttcactttaatatgtaaaacacattacaactcatcttaatgaattctcttatacaaaaccttgatatgatcttagttaggaatctcaccgatctcatatacaatgatattgtatatctataatcaaacttggatactcatgaaaactaaatctttttttggcaatttttttttttttttttgatgaaatttggcaaaatttttaacaaacgagaaatttgataaattttttattatcatattgagcaacttagtaccttctaaaggtgtcactttaaaattggtcaacgatcagactaattggtgctttttaagatttat

SEQ ID NO: 58245 - DNA, 1596 bp, Cannabis sativa
aatccaatctaattactaattggattggatcaattttttaattggatatccgattacacatttatattttaatatttaacataaagatatgaagaaaatacgtaaaaattaaatatcacccttcatataagtttaatactccatgaacatacaatcgttacaatgaaatgtaactaaaaattttaaataattaaaacaacaacatttctaagtaataaaatagaaaaaaacatcatgaaaataaatactcaaaacaatcaagtgttacaaattcaacacacaaaaaatctaataaaaatataattaatatataatatgtttttttttaatatttttatacaatataaataattttttaatatatatacacatgtaattggattggatcagtttttaattggattttgagattgacatccaataaccgatccaatccaattaattaacttttagcatccaattcaatttaattgtaatcagatatctaatttttttgtaattggatatccaattttttgtaattggattaaattggatgttgcccatgcctagattgaaccacttatagatcctaaagagaaagtatttattcttgattgaaaatttgcataatcctcgatagttaatgttcataagaaacgatctatcttttttctttataattaacattgaacctttccaaggtgacacactagatcggataaaccctatagcgagataagcgtctcgctattagttgtttgggttcgcctgactgttatacttagtttgtatattatacgctaagtgttttcacagtcattatgcatcgcttatgccttcccagccgtaacaaagttaatgtctcgccttgtgcatctaatgccgtctagtttcttgttaatacatgaggtaacaatttgtatatctttatctcacatgggaccttatagtcagcaagttgcaaatatactctgtcacttctgcatttaatgagttatttcattaaatgtaactactgttacatgcatcgatccatattctccttaacttgacacgtgtcctccattgaaatggtagccaaatttcggaacaattgccccttaattttttttaataaaaagtactttttaaatgcctacatagggtgtattcgtcacaatccattttttgagaccacacatgcgctcaattttaacggctccacggtttcgagtgtcattagtaacattaatgaactgccctttcaccttctacctcattccaaaccgttagatttcccaacctttggccattccgttagtgggttccgagtgtaaaatggtggcttggtttaaccatgttccatacgctccttgtttttgatgagtttcatccagaagttggattatcattcgcttgctatgatgtcccatccaagctcagaaacttatccttcaatactcgtaacaccaaaatataccaaccatttttcctctccgtacgttcacagaaactttaaacctcaatttaaattggaaacaaacgattccaagactgaagatcatccaatttatcaaaccaagtagatacaatcaatcaatacaagcgattcccacaagagatttctgagggtaa

SEQ ID NO: 58246 - DNA, 1640 bp, Cannabis sativa
atatgttgcaattttgtgtgaaatctgttagttaaggttagatttaagaaaattaggaagagatttgtcgaaaatggaatttttttaatcaggtccgatgggacccgatgcccgtccgatggtcgggtccgatgggggcatggctggaggttgaagatgacaactcaatgggcccgatgggcccgatggcctgatataggggtccgatggggcccgattccttgggcccgatggcctgatataggggtccgatggcccgatctgattccttgggtccgatgccttgggcctgatgggtccgatttacgtttaggggaaaagatgggaagagaggagttgatgtaattgggggagggtattttgggaaaaacaataaaattgtcatatattaaagttattggtaagtataagtttaggaaattttttttaaggttaagcatagaaatttaaatttcccaaatcaaattaagcattcatgttataatttcataatatttattttgaaagtgttattggttattgagattttcagtaattgttttgttatttgattattttgtatgaaattataagattttgataatcagatatatttgttatgattaaatctttttttaaaaaaacaagtctgtattttgtccacatagtccatgtatgagtgatttatagggtgtatattttatattatgcaataaatattatgtttgggagtgattaaatctattaaaaaagaaaaatcaatttgaacacactaggttgtcaaactcttggagacaacaagttgggattaatagcaagcaattacgtagacttagtaaggtaatttacaaactatttgagagctaaaatttccaaatttaaaaaatggattttttgtctattatatttggtgagctagaaatgaatttttttggcttgatgtttctttgtatacatgtgggatcaatcatagaacaaaggaagatgttaaaactaaaattttatgtatttggcctaaaaatgttggtcatgaagatatagaatcatattattgtttgtaattggagaatttattatgtataaagttgattactatatacccaggttttcttgagaagacactattaggttgtaaaatgtaaattattttggagtaatattcataaaaaaaatttacaaactattattaataataaaataaaaagattttattaattaaatgaaataattatcaatttaatttttatattttttaaacgagattaaaatatatatcttaattaatatcaattttaaatttttattagaatatggtatcttaatatttctacattgtttttatgagtagaatatcatcaacataaagaacaaataatactagtacattacttttgatgtatttgtacacacaaacttcatctacattttgttggaaaccgtatattttatttgtatcattaaaaatgatattaagttcaagaggtttgcttcaatccataaatggatttaagtaatttacaaaccttttgatcttccccattttgcacatacctttcaagttggtccatataaatagtttcgtcaagattttcatttagaaaaacatgtccatttgccatatctcataattatatgtagcatctatggacaagaaaatgcga

SEQ ID NO: 58247 - DNA, 1652 bp, Cannabis sativa
  modified_base (43)..(55): a, c, t, g, unknown or other
aagttcatatttagggtgtttatcaacatacttgtgagtagannnnnnnnnnnnntaaaataatttccaacactatcctgactaggaaggtcaaaatcattaaaggtttgttgcttgaaataaaattagccttaatcaaatttatgtgagaacccttgacatttttgcctggtcacacgtggatatggtcggtattgaccccactatcgtgtctcatgccctaaaaatgtatccagacttctgtcccatcacgcagaagagaagaatgctagacaaagaatgtgcacaggcactaaaagaagaggtagaaaggctacacccaaacaagttcattattgaaactttctacccgtcttgggtggctaaccccatactagtacccaagccaaacgaaaaatggcgagtatttatccacttcaccgtcctcaacaacgaatgtcccaaggactattttccactcccaagaattgaacaacttgtggatgcaacaacctggcatgaaacccaatgtgttatggatgcctatttggggtacaaccaaatcagaatgcatcaacctgactatgaacataaaagcttctgaacaaatataggtctatactgctataaagtgatgccattcagtttgaagaatgttggggctacctatcaaaggttagtaaataaaatgttcaaaaaccagatatgacaaaatatggaagtatacgtggatgacatgctcatcaaatctaggaaggctgggggcacatagaggatctagatgaatgctttaaaatccttagaaaatacaacatgaaaataaatccctcaaactgttccgtcgggattagagtccaacccagctaaaatacaagccctctagatatgaagtcaccaaaaaaacaaaggaattacaaagttaactgaatggatagctgcactcaatagttcatttcaaagtcgacggacaagtgtgttcccttcttcaacatcctatgaggtaacaaaaagttggaatggatagaggaatgcaaaggtgcctcccaggggctaaaaagacaacttgctaagcctcctgtactctcaaaacccttggacggcgaagaattaaggatatacttggcagtcaccaaatatgttgtcagcgtcgtgctgataagagaagaaaaccatgtccagcatccagtctactataacagtaaatgacttgttcaggcagaaggtcagtatcctttaattgaatagcttacttaatgtttgatattaaccacaagaaagttaagatcctatttctaagctcatcctgtttgggtttataccgaccaacccttgcgccaagtattaaaaaaacttgatgcttctagacaattactcaagtgggctatagaattaggttagtatgaaataatctttcaatcccacatagtagtaaaagggcatgctttggtagactttgtgctggaatgtacatgcaaagaggaagacatttcaaaggatagccccaagccaatataggaatccctaccagaagagaatagagacaaacctatatggaaattacatgtagacagatcaaccactgatcaactttctggtgtgggaattgctctcatcacacctgggggcaacctctgcacggagcaatcaagtttgggttcaaagcgtcccacaat

SEQ ID NO: 58248 - DNA, 1040 bp, Cannabis sativa
cagctatcgtctttctcaaaccccaaaataactagcaacccttcttcctcttaaacccacaaaaccctcgcccaaccaccccttcttccttccatttcttcatttttcatccattttacccattctattaaatcttgcatttttcatacccaaaaacatatctctggagtttttcatcttttgtttggttttttagggtaaactgagcttagaggtggtggttgtagtggttgtagctccgaccgccgattttggtggagaaatcattgaatcttaacgtctattacgatataattttaatctctaaaaattttattgatgtaaattactttattttttattttgtaatattttttagggttttatttatattgttaatattgtattcttgtggttgtgcatggtggccgaattttttattggtagttggatttcaataataaggtaaaaaactaaattttaatagtatgtatgtatgtattttgtgttttattaaatgttttatgtatgtattcgtattttgtaattgtatatatatgtatatgtattatattgtattgtatatgtatgtagacaaatattgtaattatattttatattttttatgtattgtatatgtatatattgaatattctaactaaatagttttgttaaatattgtgaatgagaatgagatagaagaatattaaaataaaaatttagaaattaatttctttaaattagtttagaaattaattttattttttatcatttttttttcaattttattcatgtatttttatttttttagtagctagtaaatagttagttacaactacttaacaagttactaagttttattcctattgatgtatttttattaattactaactagttactcattagtaattagttagtaataaattaactagttactcataaattatataactaataactagtttaacaaagatttttttatttttatagtatttttttttacattgtaggttgtgaggtcaatttgtaaggatcttgcttatttggtgttgatcggtttc

SEQ ID NO: 58249 - DNA, 827 bp, Cannabis sativa
caggagtgaactctgagctaggatggtgtttgtacatgtcatggcaacgcaacctggagtgttcagtctcaagacatctgaaattttattttgtagtcgttgtgccaccaatttataaatatattttgataatgttgtaaaattttaaatacgggatcccaacttatgtaagtaattgtatgaaagtttataacgtttagcaattaaaccaacaatttttaacttgtcacgatttttaagaaaaaccatttgagtaacaaaggtggcactataattggaaaatcactgtagcgcacctaagtatcagggtgttacatatggtgtataatagcatcaaataataacaccgacgtataatttattttttaataaataaatttattactattaataagtaattagataatttaattttaatattggaatatttatttaaaaaattattatttactatattgataaataatcattttattgtctagtttaattataaacgtcaatttaataagctcattttttactttaatttgctgtggtatttaatagcaacaaacctaattttgggaaaattatgaaacattttagaatagtaaactaatatagtactttcagccaaaaaaaaaactaatatagtactattgattgcaagcagggtctgttgaaggatgggacagtaggggctcacgccaaggtctcctatccaggctcaaaaaactctttaaaaaaattacttcaaatttattttttaaaaatactatttttattttactattatttattaggaaatataattatttttttataaataaaaatacttaatttatttt

SEQ ID NO: 58250 - DNA, 3799 bp, Cannabis sativa
  modified_base (1402)..(1407): a, c, t, g, unknown or other
agagaagctttgaacaagtgtgggtctccggagaagacttttctaagtctcattttagaaggatgtgagcatatatctttgggagaagatttgtttaaagccttacttagagaggaagtaaagcacacatcaatagttgaaggtagttcactacttggtgtgtttcagagatcagattagcaagatggattataaagtattgcggcaaatcattagagggagtctaaatttatttaagtcaattatttttgtaatctttattactttactaatttatttaaggtggattataaagtattgcggcaaatctttgattttgttttatgatattcatatttaatttaactcttttctcataattaaagattgtaactttgactttttgtgtaattattttgtttttttttttaatttaagcgtttatatatattacaacaatgtataatttgatactcgaactcagaaccttcaatacacacgcatctcgtataacgactggagctaacctcaagtggtgtgtaattattttgttagaacacgtcaaattaatatttgcatcaactccaccaacacctataaacaaaccaaccaaattgattttcaagtcactaacaattattttcgataatttgaaaaaaaaaaaaaaatactttattttctctattctagtatgtactgatttttccttttttcccactaaatactattgaaagaacccattccgatggggtggggtttaagaatttattctagatgagagtacttgaaattaacttccatttcagtataagaaatttatattggggtggctaccattaactttgcttaaagttcattatgtattgcataccaactttgctttcaatttccataaatgttacctattaaattatatgattaagaaagagaattccatacaagtaacttattttcttctatatgcaataattgctcatttatatatttacttcctttatgtatctgttttttttaactttccttgaagaaaaggcaatttcaataaattcttgtttgtcattgaatttaatttatatcaatttcgacacttaatatttgtaatagcactatgattatttatttatttatttttatgttgttaggcttaacaacattatatttttggtatagtaatttattatattgagtattattattagatgctagtagtgttttggactatcactaagtgatattttactaaaaaaaattatttttagtcacaacaagacttgtgactaaaaataaaaatgttgtgactaattataaattattattcctacgctgtgactaaaaagtctgtggctaaaagtattagtcacaaaaatcaatttttgttgtgactaaatgtgtttttagtctcaatatttgttgtgactaaaannnnnntagtgacaacttgtgtctaaatactatgtttagttacaagtaacttttttgttgtaactaaaagtcacatttaatcataattttttttattgtgaataaaaggttgttattaaaagtggtctttttttatttttgtagtgttttgtgaatagttaatatttaataataattattaaattaaaatatatgagattttttttataaaaatatatataacacctaatacttaattatataattaatcaatagtaatataaagctattatatattggtgttgtttgatatttctctattctattagcatttggttgctttctaattttacctatatcccaaggtagaatttaggagctccttcgtaacaaaaaaaaactaaaattaagctaagactagtacttatatctatttttcttgtttttgcaattgcctaatacaaaaaactttcaaatcttattattattagggttgattggtttatgattagaaaattgtaattttaaaaagatgaaattcgaaataaaaattttaatttaattttgtttttcaaagtgtgattaattgtaatgttagttttttttttttttttttgaggaaattataaattttatgggattttccattatttatgccaaatatgcctttttaaataaatatatattatgagaaaaattcaataaaaagttaaaagttatgggaatctcatactttgggtaactagagagataatcacttaatatatattgtttttcttatatttttaacttttttatatataatatttccataaaataattttttttgataaatcatatttttgtaaacttataccttaaaatttaaactgataaaaatatggaaaaaagaaagttctaaaaaaattgaatttgttatttattaaagtgtaaaatatttggagaacttttgaaaataatgattaaaagctaaaacataaaatttcatattgtttttcaactaaaaatataaatttgtatttagatttggctggttttcagtttttagaattgtattttctaaaataagaatagaaaataatttttggtcattttaaaaatttaatggtgtttgactcaaattttgtaaaactatttttagattttttttatatatatattttacaccatactattccataacatgaacccatcccacctcgtaccgaactctagacccggactcaaaactcgaacccagacctgaccatggacctagacccgatactggacccaaacccgaaccctagacttggacctggactcagacttaaatcctgagatttgggatcggggccgggtctgagttaagggttcggggtctgggtctgagtccgggtctgagtccagatcttgtgtccatgtctaagtccggatcgaggtctgggttccagatctaggtctaggttcaagtttgggagtagagttggggtctgagtttgggtctcgaaattcagattcgaatttaggtctgtaatataggaagagtgagatcattttaaattcattatgtgtaaagtgtaatgtcacattagcaattattattgctctttattttcaatacattaatcttatattgtactaaaaaaatcttacattactataataatttataggtcaaaaagtattatttaattatattttacaatgtacaaatggaagggtatttattaaaatatgatagcataataaatacatatatatgaaaattattgagtttatttttttattttttttttcatttaatatatataggctattttaatattatattcacacgtttaaattgtaactttttctttattctttctataagaacatattttctctgttgaaatttagataacatatattttttaatatatataatacatagaataaaacataatttaaataattcgagagttgaaaatatatgaatcaacaacttaaaattaacatggacacctagaatttcagccaacgctcgagttcataatcccaactagttaaagttttagtttctgagaccattttagtgcaaaatgagtcaaattttgtattgggacatatattagacataccacaaatatatctgaagcatcaaaattaaattcagagaacttttattttttagcattcgaagcacttataattaaaaaataaatagtacttcctatatgtggaaaaacactctctaaaatacataatttgatggagcgtgaatttaatatttaagtgctttaacaagttttttatattctttttttggttaagaatctaaattatttaagatgtcaaaattatgatgtaaactaattgaacctaatttattcaagaaatttttacatgaaaaattctttttagacactttattacaaaattaccctcacacgcctat

SEQ ID NO: 58251 - DNA, 904 bp, Cannabis sativa
gctgggaaatatgttgtgtattttcttcgtgtttttgttcatatgagtgcatttccaagaggtatcaataaacccatatcgtcgcattctgaaaaagaaaaatccttctcaaattaatgggggagcttaggccgatatctctttttaatgttcttataagatatctttcaaagttttagccaatcgtatgaaatggatattgaatcaggttatctcgaaaactcaaagtgctttcattcctgggcgtttgataattgataacattatggtggtgtttgaagttgtgcattatctgaaaagaaaaacaaaggggaagtaaggttatatggtattgaagctcgatatgagtaaagtctatgactgtgttgagtggtcttttttggagacatcaatgagaaaatggggtttaattctcggtggattggacttattatgagctatgtaaatacaatttcgtatcatatgattcatgggggccataaagtagggcctattttttttcctactggtgaataagacaaggggatctcctttctccttattgttttattatctatgcagaaggtttttcaaccatgattcagaattttgaaactaatcctcttatcacgggttgtcgggtggcgcgaggtgatccatctatgagtcgcaataagtcgattatcttgggcttcttaaaggataaaatgagtaatagatcaatttagagttgggataataagttcttatctagagcgggaaaagagatgcttattaaaacggttgttcaagccttaccttcgtatgctatgagtattttctcaaatctggttggtacttgccatgctattgagaatcttatggctaatttttagtggcagttggcctctaagaatagtcaagggaggagtataaatttgatgag

SEQ ID NO: 58252 - DNA, 520 bp, Cannabis sativa
cgatgtcccaaaatgagtgagatcacggtagaattttccaaatatgtatacacaaattattgatattgcatgtacatattttctttaagaaaaatgtataatttatatttgaaagatttaggtataagtattgcgtagcatactcgcattcatcatttttctaaacaagtgtatcaaccactattgaaagtgccttaaaaaaagaaaacgatgtgagaatttttcttttgtgaggcacgaattggaggagaaagacaatcaaaaattgaataaggatttttataaaaaaaaatgaataaataaataataaaaaataataataataataataataataatttattgaataatatataagaaaaatatctaccgatttaatatttttaaaataaaatttacttcttgtagggcattctatattcaaaacaaagttgaatactgaatcatattaattgttcatattaattaataatcattagccaatcacatttttctattttctttttgacaaaatatcaca

SEQ ID NO: 58253 - DNA, 873 bp, Cannabis sativa
tcttccatgttaaacttttgaataattttcttgatgtacccaaactgcttcaagttgatagtccgttccttctagtttcatgagactttgataccaagtatcttttgaactggtccaagctctttcatctcaaattctaacttgagctttgctttgatacttttgatccctaatttatctttactcatggtgagcacatcatctagttagaggaataagaacacgactatagattgctccatattcttgaaatataagcggtgatcgtatgtggattgtttaaacctaatttgaagcttgtacatatcgaatcttgtattccattgtcttagggactgttttaagccatacaaagttctattaagcttgcacactaattcaacttgtttcccttccacctgaaacccaggtggttgcttattatagatctcttcatccaagaatccatttagaaaattagtcataacatcaagttgttaaacttcaaactctagatatgctgttagggacagcatcaaccttatcgtcctgtattttaccactagtgagaagatttccatgtagtctatacattccacctgagtaaaacccttagccactaacttagctttgaaccttactggttcattctcattaattccctcttttaccttgagaatccatttgcactccataatcttcttgttctttcactttggcacaactatccaagtcttgttcttccatagagaatccatctcctcatccgtggcctaaagccatttagacttgtttccacttgaaatggcctcttaatagcctttgggaacttcaatttcagtctgttgaactaccgccagtgcaaaagctattatgtctgttggaaattatttt

SEQ ID NO: 58254 - DNA, 1385 bp, Cannabis sativa
  modified_base (806)..(833): a, c, t, g, unknown or other
  modified_base (867)..(870): a, c, t, g, unknown or other
  modified_base (915)..(920): a, c, t, g, unknown or other
  modified_base (1033)..(1035): a, c, t, g, unknown or other
ggtttaattattacgacacatttgtagatgtaataaccatatcttatactggtgcatatacagtgacattgtttgaatataagtggtatagcactaatccaatataaaagaaaataatcactgaaaataatataaccagtgtaaatataccaaatttggtatcaagatgagccgtacatacttgctaatcaagataaacaagttttctatcttcaagatccacttagaggtcgtgattggaatgttgttgaagatgttaactatcgtcaaatttgggacattgacaacaatgaagacgagaaaaatgttgatgtcgtacattattcgaactcagtaaattttgtattgatggttgatctcggggagttgattttacaatccaatgaacaagctgtaattgttgaacctaacatccaatcaatggatgttgagtggaaaaataatgaacttgataaagattatgttactgaagaaattgatgatttactagttgaacgtacttattgaggatgaaaaccagaacttggtgaatgatggaaatgatagtgattcctctttgtagctttaattttacttttgtttgtaataaaactgtaatgtctgaataacactatgtttctaatttttatttttgtttgtctcaacttttatttatttgctttgcatttcgtggatttttatttttgtaaaacaattttcacatttttatattatatttttctccaaagtaaagtacaatgtcagctaataacaatggataattaatagtgtatctataccttagaacatatagagtgttctatatnnnnnnnnnnnnnnnnnnnnnnnnnnnntggagttaggaggaattaataaattagggaattnnnntggtaaattctagatctactaattggaagcttgattatataggcnnnnnntccccacactagttgagataatactgcttgtagactaagttaattagttttaattaatgaattataattctaaatatttagactatgtcttatatttatgaattttcactaannnagagcttaattgtgaagaaaagatattttaggatttattcattaattaagagactttgaaaggtctaattaacaaataagttcaatagaaattttatttgataagtaattataattatcaaatatatatatatagttttgacatctaaaggattgaaattagaaaatatggcattagtaaaaaaaagatgaattattgaataaaacatgcaaaattgtaactagtgggacccattgtatggttagccacttaagtgtatttttggccctttatttatcttttttaatttcatatatataatttaaacctaactgtagaaaaattcctataaatagatagtgttatgcttg

SEQ ID NO: 58255 - DNA, 894 bp, Cannabis sativa
agggcataaaacccaacaggctcaaccaccgattttgtggattccgactagaacttatatgtctatacaaagtcatctatagtctcaagcaagttcctcattcttgttagtttctcgattcaagaatttacactcacagtagcatagagaaatagatagatattagtacattcagtaaatgtattcaaatcaaagctaaaccgtggattactcacttcaaacattcttctttcaacatgaaactctgatttaggtttccccacttcaaccttaacgttcttcaaagcataacatgcttgttgaatttgtcgaaagaaacacctcactttctcatcgttcctcttctcattcagaacaatgtgcaacaccgattatctcatcaacaacaacttacactacaactcaataatattcaatacccaaactaattgactcaactcttgtttctggatgtccatcacacctgcatatatatatataaatatatatatatataaatttaaacaaacacaaaatgaacaaaagtcaaagtttaaaaccaagttaaacaagtcacagaaataagtacaactgtgtacattcaaactgtggaagttaatcctccaaaacaagaatatcaaacttaactaactacgcagtgttagttgaattcggttatttaactcactatttagttataacagttacccttgtttcttgtatgagtcattatatatatatgaaaaaaccctagtccatttcatttcgattgtaacttgtgctaagattatgagagagaggtaggaagagttagagagaattaagagagaatcaagtcctttgggagtaataacttaagggtgtattcgggttttgggtgggtgaatgagtgagattgtcttttttttttttttt

SEQ ID NO: 58256 - DNA, 1464 bp, Cannabis sativa
ataaaaatgatttttttttttttatgtaaaagtaactaattagtttcttatcaacattataagtaagtaaccaaaaggtaagttttgaaaatgcaactaaattaaaaataaaaattagaatttaagattaattttgtttcaggcatattaatttagaattaaggtattttttgaagatgtggcaatgtattattgtaaatgagatttgtgaaggtatttttgtaattagtttgtattttaagtatattattgaaaaaatcccttttatttttcctgcaaaatatgtgtttctatatcttaaaccattttattttcaatctacatatatactctcttaatcgtactactaggtctttttacattattctaaattctctataaaaatagtatattcattctctgttaattaattctcttttttttttaatttttttttttattaaatttataaatattaattaatttttagcatcctaaatattctttaattttgtattttttttaataaaaattaagataaaaataaaataatcattaaaatatattttccccatttaaagtatatatattttcctatttagtcgtataactcaactaaaaaaatatcaatcaccctatccacattttttgtttcttattttttctcatttttcatcaatataaattttttttaaaaaaatgtatatctctaataactaaaccttcaaatcattatctttaccaaaaaaaaaaataaatcaaatttatatatctatacattaatatatttatatataaaggagagatacaaggcggttatatgacactctaaaatttttctaaatagcattatttattttttccttgattcttttattttttttaattttttattaggtatataaatattaattagttaattaaaatatgtagtatcctaaatatcatcaaattttctattttttatttttgttaaaaagtaagctaaaaaaaattattaaaatatattttttctcatttagctgattaactcaactaaaaaaaatatcaatcacaccttattcacatttattttcttacttttttccattttcatcaatattaattgaaaaaaaaaatgtaaatctataataaagtaaaccttcaaatcattatctttaccaaaaaaaaaaatcttcattcaaatcattatatatatcacacaaatttttctctcaagacttttctttttctttcgttctttttgtgttatattttaatttttgaagaatagtagcaattttgatatctattattcattatcaatcccaatttataaatactttaagttttaatatatcttttgatattttttattcactactcttccttcaagttactaaagggaaatttgattttctatacttaaaaaactaaaatattttatttttaaaccaatacatttaaaactaacaaaaatatgacacttttttcaaaaccccaaaa

SEQ ID NO: 58257 - DNA, 987 bp, Cannabis sativa
aaaaacctgaataccggtgaacatgaccattgtctccatcttctaccatcactattttatttcacacgtataatgaaagggattgtacttttttttatgagaaataatgggcttattgagcctaaatacccaaagagagagatgtcttcgtttaatggactggcctaaagacgttaagagtgtattaatgaattcttgagccttttgtaggttatgtctaatcccattatgaattgatagaaatattaccaatcataacgtgtgagcaactttaattatgctagtacatatgaaatgttctaactaacactagctagctaaaaaaggaagttaaccaagcaagctataatatccaacctgcaaaatttaatgtgactactgtatatgattataatatatagagactacacaccttgggcgccccggccagtattaattttatagatatccatcgatccatatcttcttcaggaacagtatgcggtgataaagatgaggaagattgatcgattcacacatgcctcatgcatctataaatacagatgcttggccaccaagatttctacaaggcagctagcataatcttataatatatatatatatattattgacattattttataaggaaatcttatatagatatacaactgttaaggtataggatcgatatgaagagtttttttcatttcatgatctcggcgctcactgttttggcttgggcaactcacatggcatgcgcattcgatcccaaccctcttcaggacttttgcgtagcaatagatgatcccaaggatacgtgtacgttcctactaattactcatgttacttgtatatatttatataaatgggtgtactcttaatgggtattacccatttatagataattttatgaaaattttagtttttatgcttagtttttctatctaatcataaaaaatctctcatttttatattatatgaataaagattgttccatcagctgaaaaa

SEQ ID NO: 58258 - DNA, 862 bp, Cannabis sativa
  modified_base (376)..(389): a, c, t, g, unknown or other
ataattaattttaattattaagtaaatagttttggcatttaagtggttgaattggaaactatggcatttttgagaaaataagataaatagttgaaatatggaaaaattgcaaagtggtatggcccacatccatggccggccacttgggtgtattttaccatttattttatcaattttttaatgttaaataattcaaacataaacctagttagattcctataaatagatagtgatagtctcaaaatttgaagcttaataatttacttgccttcatttaattccgcggcaaccaatgtaagatttctcaaactttatatgtgtttaaattacattgtttggaaattcatatctaagatgttaaacaacatacatggtnnnnnnnnnnnnnnctggtaaaacatattccaacacaccatgcttgttctgcaagtatttcttgattaaaatgaataaaatcacggaaacccatacctcttccaatttagacttataatgaaacttcaaatttttccaaggaatctttttcttataagttgaagtacccctcaaaaatctagccatcttagactcaagttgcttgaaaagttggccagtagtttgaaacaactcatagcatatgttggaattaattaaacatgtaaagatcgcttaattatattatgataaattagcagataattagggctgaattatgagtttaagactattatttgtgatttataaatttatggagaattatttgaaatcagggtgtattatttatgctatttatgaaagtttacgtttttcatgttttgggcccaacaacaaagtacctacagagttccaaaaatataacttaggtattattactgccaaaaat

SEQ ID NO: 58259 - DNA, 1368 bp, Cannabis sativa
ggctctatacaaatagggttttatattgggttgattcatggggttatttgatgttgtttaaagcatgtttaagctgtttttagtggttgattcttgagttaagcaagtttgagttcaagaactcaaacttggctcaacaatgatagtttttgaatttttgtatattttgaggttataatgcttggtattggtctattatgatattattagatgatctggagcttagtacgaagttttggattattttgagtcgatttggagactctttatctttctacagtgaaaaatggcagaccgtttctacaaaaacagtcgaccgtttttactagtgcagaactagaaaaacgactcaccatttttcaagaagttttctcgtagtatcgcttttctcgtgtttcctcaataattagggatttgccttgctttttatcgatagaaaaatttatagttttgagtttaggtcctcggaaaggtttagcatgttgtttacccgatttatgtgattgtgacataggacctctgtccaacatgtgattttccattcaggtcgaccagcacacttgatttggaaacaaggtaagactagcatagaatatgtatatatgtgtgtgtatgtatgtaaattacatgttctgtgtgtgattcatatactaccaacactagtacgataacaatatcgagtgcattggtacagtatataatgtttaaagggtacgatctagtgttaccaatactagtacacttaagtatgtggtgcatgtggtacaacactcaatagtacttgattaaacacaacacaagctagtgaaaaaactatagaggtaccaattgactcctttgataattctaaagttttaaaaattggttctaaattaactttgtagcaacgagaaagtttggtgatttctcaaacaaaacccgaatgtcttcgcgtggaaacattcagacatggtcggaattctgcttaaggttatacgtcatcgtttgaacataaaccttgatgtgcgaggagtacaacaaaagcaccgcaaattggatcccatgaggtaccagagcactcttcagaaaaaccatatctgtaaaagatacactaattataaacaatcatatgaactcatagaaaattatctattaaaatagaagattattacctgcaatttgccatggagtttgcttagaaagacgcctttcaatctttactttctatttcacaaaaggctccttgtatactggttctcgctaaagtctgacgactgctcaaattagtttgtgttcttacaattcagcagatgtacagagaagatgccaatctcgatccctaactagaagacttctcgaaacttttgtaattttcacgcgattctgagc

SEQ ID NO: 58260 - DNA, 813 bp, Cannabis sativa
tggattgggttgtgggaaaccagacgtgtgaggaagctcaatccaactcatcatcatcttcctatgtgtgtggagaaaatagtgattgttactattcggagaatggtggtggatatcaatgccgttgcaaacaaggatacgagggaaatccttatctcaaacaaggatgtcaaggtatttttcgaaaattactaaagaaaaaatgtattatattggcttaatctgccttgatggccaaactcgaccctgaacttatatgatgtcaattatatcatgtttcacattttttcttactaattctgtttttgtggtgctaatatctttggttggtggtagacatcgatgagtgttcagatcctactatcataccacattgcaaaggatgcaaaaacatacctggaaattacacatgcaagtgtccacttgggatgcatggagatgggaaaaatgataattgtcaaggatttcgttttaacacatttgcgacaggtaactataattgtagcaatcattcattaattctgtaaatatatcatatacaattattatatcaaaatgagtatatatgacaaaataatttccttcaaacaaaatagaatccattatacaatttattttcggattatttcatatatatttatatgcaaaaaaatgataaattttttacatttttatagagctactgttttttttttatatatatatatttttatggatttttttataaaaatatagattgttgttttttacttgttttcgaaaaaatgtcgttttaatattgttgttaggggaaaataatgtattttttttttt

SEQ ID NO: 58261 - DNA, 1278 bp, Cannabis sativa
ctgtttcttagcagaccaagagatgagatttggtcctaagaagatagcatagccacctgtagaacgacgatcatcggggcagcttgcccaatcggcatcggaataagcttcgacagataatctagctgttggagacaaaaataagccatgcgagagagtcccttttaagtatcttagaagtcttttgcatgcctcccagtgagtgtttgttggggcatgtatgaattgcgataacttgtttatgataaatgctacatcgggtctagtaagagtgaggtattgcaataccccaaccgtgctcctatagagagttcgatcttcaaatggagttccttccttaagtgacaacttatgggagctgcttgtgggactagaacaaatctttgcaccttcaagatgaactttaacaagtagatcggttatatattttctttgagataaggacattccactttcagttcgatgaatctcaaccccaagaaaatagtggactgccccatgtcttttaaagaaaaggctacattaagatccttaataaacctttgtatgagacttgaattaggacctgttattaatatgtcatcaacatagaccaagaggataatttgtgtgtcacccgaaccatagagaaacaatgatgtgtcagcccgagaagctttgaaaccccagttgaatagagtagttttaagcttgtcattccaacctcgaggcgcttgttttaaaccatagatagccttgtttaatttgcacacatgatgaggatattgagggtcaataaaacctttaggttgggtcatatacacagtctcatttagatcaccatatagaaaggcatttgacacatctaattgccttacttcccaattaaaggtaactacaagagtgagaactaacctgaccgtgacaggcttaaccactggactaaaagtatcctcaaaatcaatgcccggttgttgaagataaccccttgctaccaatcttgatttacatttgtcaaggctcccatcagcatttaacttcaccctgaaaaccgatttgttgtctattagaaccatatgagattcataaggtaccaatgtccaagtacctcttgctttgagagcataaaactcacttgacatagatttattccaaataggatctttgagagcagattgcatagttttgggttctcgaggtattaaagactcaggtagtctatgcttagtggccatgtaagcttttggtttgtagatacctctcatcgatctagtaaccatagaatgtgttcttggcata

SEQ ID NO: 58262 - DNA, 833 bp, Cannabis sativa
  modified_base (66)..(72): a, c, t, g, unknown or other
ctcagaaattctcattcactttatatttctctcttcatctttttcttctttcttctcatctacttnnnnnnnttttatattattttataacaattccttcattttctttatttgtccagtcgtgtttcttattgtattctgatcttatattagtttcctaattggtttaatcagatattgtgtgaagaaaatcaaaataagatgttctttttctataaaagaaaagttgcacatacaattcatgattttgtagctacagaatcaaaaattcttcgattgattgaagatcttatttaggaaagtttcttgttagatgtggtcttgttaatgttaggatttgtactctaaaaagtctgtaaagacatttttgattattaataaaaagttaaatattttgataaatgcatgaatattaaattattaatatttattattgaataatttaaatataaatatcagaaaagtctttattcatatatgagaccgtgacttgtagttgcacagagaactaagatcacttagtcatgaataaaatagttagtaacatattaaagatggaatctttaatcaatggttgctaaaacagttcacaaatgcctgttcttcgaggcaagtaatctcagtttggattacggatttagtatgacatcaaaatgaaagtgttgtatataatataaattctaacatgccatttactataaagacctaattcatatttaaacgatgacctatggtagattgacctaaatcttgagtaatcatgaacttctgttcatgttattagtttctttgattcactcattaaaatttctcagagaagataattcttacaa

SEQ ID NO: 58263 - DNA, 1066 bp, Cannabis sativa
attttacaagaatatagtttaacatgtatttagattagtgcgattaatttaatgtaagatagtctctattttatataaacatataaatatttatatatatatatatatttaagctacattgctagggccaggttcttaatctttcaagtagagctgtctctactcatcgtaaataattatcttttaaatatcactataaaattacttgtaattttttattcatgctgtaggcacattatttgttttgttttcttctaataatttaagtttgaaaaaatctagtaatattaattgattacagtacatctataatgtgatgttcttgaaagtttataggcaattattaattagttccacattcttttttattttaattttattaaagcaaaagttgtggtaggtagttttcgtagtttattacatatatattggcaccacaaaaatgtaaatacatcaatataattaaattaattaagatgaaagtgatgagatagatatatttattcctggtattagaaagaatatgaagaagaagaagaagagagaatctgacaatagctagaagtaaactcaccacctaaatatgattttatcgcaagaaaaaaatagtactagtaagtgcagcccattttagttctgatgtttctttcattatttttcaaacacacctaccaactctatattcatgtataactaaattacgtgatgatcaaaacactactagagctagctaccattgttatggtttttctctttttggcttaatttttctatctatgttttgtcgttgttgtcatgtattttcttttttatttttcatacaaaaaaacaaatatataattaaaccacttatacatagtacttgtatttataactgaaataaacaatggtggaaagtgttacctctgattcgctatccaatctcagcttattgaccagatactttattagcaatccaactgtcatgcttccatccctgaagaaaattataccaaagtaaattaattaattaattagtgtacacaaattattattttctaaatagagttaatcataattaccgtat

SEQ ID NO: 58264 - DNA, 2170 bp, Cannabis sativa
taagtctcctctactaaaataaattaaaaatcctggttcacatgtgtttgtaacatgcattttttttttcctcaaaatcttcaaagcatggtttgttcttgagatactaattagttattctcttttgaaaccataacatgtctatttttcatttgtgatgaattttgattaatttgcttgcttagatatcttatatctattgtacatattttattttatgtgtattattttcggttttacaaaaaatacaaaattaaaaataaaaaaagagggaggcgttggtaacttggatcatgggctaagaaaatttgtgcttgaattggtaagtgtcaacatttattctacattgatttattttgatatgtttccatttaaagtttgataacatattcaatgtattttgtctttgatcttgaaggattttcttaaattggctatttttggaaaatatcttggtaattctagtttccttttttttaaaaaaaaaataattttggaaaaagagtgggcggtttcctctttgtgtttgtgggctggtggttacccaatttttgaaattggtttccttttgtggttctctctcacatgattatttaaaccacctccttttgtcatttaatctcaccaccaacctgattcctagtgccttgtgtttttgttctttgtttttcttccttctttcagaaattcatggctaagactaaaaacctagggcatccaagaacaatggtggaatctgaacaagccccctcaaatgctcctcttgttgcctgctgctgcaactgcttcgaacccaagagattcattgcttcctcagcgtgaatctcagcccgtgaagccaaagccaaaaagaattcctaaacaagtggttcaaaaatctgtgcgaccctacaaatgttggacttcatcgtcttaatcgtcaagggatctcctccacctgctactgtatcgcctcctgctagaacagagaagtgagttgctgcatcaactcaaataggcccttccacttgcactcttgcccagcaagcatctatcgagaaggaacttcgcacgaaacaaagtcatgacaaaccagctcctccagccaagaagcttaagatgaatcccccttcggtttcttcaagttctgaagaagaagaacctatggaggtctcctctgataaatccgtgtctattccatcttcgaaagatctccctgaagacattggagcctcctctgacaatgaggaaactgaacttgaacccgagcctcctttccccaaatctgctccaacacctcctcgtgcatcttcatcaaccaaggcatctgctgctgccaaaggcaagcagcctatgaagaattctcctcttggtaatatctctccatctcaagctatcaattctcaattttactttcgtgataatgagcgtgattggaatatttatgctaccccaaagtttgaaagtgaaaggaattatgatttgcatgctcatgggtatatggaattgttaagtttgttcaataccaccaatgggaaaatactctcactggttttgaagggtatattgaaaatattgtcaaagaattttatgccaatttgactaatgacatgcttcatgagaattatgagttctttggtaaagtctatgttaggggacattggttttcttttactgtcaaggatattgcagtggctttgaaataacccgaaggtgtacctaatgctattatgtctatggatcgccatttgatgctcactgaaattactggtgcataggttgaatggaaatctggggagagtcttcgaattacacatctcacatatgctcatgcctctctcatgaggtttcctcttagcaattggctcccaaattccaacaaaaccgtggtatctcaagatttggcatcctttctttttcgaatcacctcgggggcatctattgatctggcttcttcaatcttagaccagattgtttcatttcagagaggtaaaaagtgaacttttaagcttgtgtttcctaatttaatctataaattttgtcctctcagaaagatgttgctcaatctcatgaaacacttgagcctcccctcactggaaccatattcaaaccctcggagtattttgatggagcttttctaaaacagcctaaagctggtgctgctgctgctggtggtgcaagttcgagttct

SEQ ID NO: 58265 - DNA, 768 bp, Cannabis sativa
caacagtggaacaatacggggaaaactgaatatgtattggagcatatgatactgaaaagaagttggctgggataagaaataacataacaaatgcaacaaaatgtgaagaactagggaacaacaagagaacacacatgagaaggcatcaaaaatgaaaagaagcataacaactaaaaaaacaacagtggaacaatacggggaaatctgaactattggagcatatgatactgaaaaaaaataacttacatacaaattttattattttcctattactattaaaaatagagctatacaataatatttagaaaaaatgtgataaagaaatgaaagaaataacattaagataataacaaaataaacgagtaatagaaaaggataagttagagaaagaaggcggatttagaagtacggtagagatggatccaacgctttgagaccaaagagactaaagaacatgaacttagtgggagtttctgaaagattctacaagaagctcatcagagagcaagttctccatctctctcacacacaaccacacttattttttccaaatcttcttcttcttcttcttcttctcctccttcacatactctttatttttggttacttactacaaaaggagagggttagcttttatttaggtaatgttgtagacttaagaaaaaatagaagaagaagatgaaatgggtgttagaattattataatggactaatacaatcataggtttaatttcataatacacaatcattaactatgtgcctaatgtt

SEQ ID NO: 58266 - DNA, 995 bp, Cannabis sativa
ttcgtggtggtcgctggggttggttggagaaagccggcgttgtgcaccttgagagagagtgtgtgagagggggtcgggtgctagggtttggtagggttttttcattaagaaaaaggaaaaggaaaaggaaaaaaaagagatggaaagaaaaaaggaaaaaagaaaataaaagaaacgtgggcagtccgctgtggcttaactgtgatttttggacggagggtacagaacaaaacagaatgagaatttaggtagtttttgcctctaaaaaattgatttttataggtaagtgttaaaatatttaacattcaagtgatttaatcgtcaatatcccttatataaataaatagataatatttatgctttttatatagcacgccacttaattaataatcaattattatgatataacttagtacacatattatacgtattcagctataattagccatttttgacttaatatagatataagtatataatattctattttccacctttaatatacaattatttattttctagaacacacttgaatatttaatcggtgctaatattgactagggaagcttcatgacactaccaaccatacgtaataatcagtaaatcttctacactacagccaagttcttttttcccagcgaaagtgatgatatatagcttttatttatacaaaagcttatgttatatgaattataaatatatatgttatagttttcctttttatgtatatattgagtaagttaagatcccaaagtgataaaatttttggactataattatccatatctagaagggtattaattcgattccgacataagatcaattaacatataaaatatttcaattataagacttttgactgtatatgtagcatcaaagcacgtgagaccatgtgttgtggaattttttttgaccttacttaacttctctatcttgcccacgacattgaccaatctatatataagtaagacttttatgaaatatatatatatata

SEQ ID NO: 58267 - DNA, 737 bp, Cannabis sativa
gaaggtccatatgaagttcaagataaaattggtgacacctatcacttgagaaggctagatggaagaaaaattccaagagcatggaacgctgaccacctgtgctgtaactataagtaaattgggggtggccagtttcctttattttctttgattattatttttcatgtacgccttaggacaggaaccatttgaataaaacaagaaagaattttcatttcatattcagtatttttaaaatttttgtcttgtaacaattgatcaaaagtctaaactcttaatcacttggaggtagcatacactatattattttaacattatacctctcctataaaaataattaaattaacaagtaaaagagtagtaagtattgcttgaaaccggagctctagggaaccagaagtaagccacttccttattaacttaaaattaatatagtacgtttcataattaactcaagttaattaatttagaagttcatgcttcgtaattaattgaggttaatttaatttagaagttcatacttcgtaattaactcaggttaatttaatttgtaagttgaggctttgtaattaactcagattaaaaaaattggaagtttagatttcgtaattaactcagattaatttaatttacaagctcgtgctttgtaattaactcaagttaatttaattgagacattcacgtttcttaaaataactaattaattcaggttaatcaagtatttaagttttaaaaaa

SEQ ID NO: 58268 - DNA, 1146 bp, Cannabis sativa
acaaaaatgtatattgtctgaacacaagagttcaaatatatattacttattacagtttgtaaatatttccgatttataattggcctatatttgtgaccaatttttttataataaaataaaggttgttcctatatagaggttctactgtagattaaatagaagagagatcagagaagtgtaggttgttaatgtatggccaaactgcagtccatgaaatattcaagagtaatactgacttacaaacttgcatgataataaacaaactctatgcaaacatttacgacacccacaaaatagcacaacaaaaatatttactgtgtcacaccaatcagaaccagatgacaatactcacttgaattgaaaaggacagagtataattaacgtggcaatcatcaggtggagtaattaaatccattggacaagtctgactctcacacaggggctttgttatcctgacaataagaggttcagaagacattatttatcatgtgattttcaattaattaggtgagttcataaaaaagagagctatgacctaaggttcccactcacttgagtctacttgcatcatcatccaatggagcttgaattaaagaaccgtctccaacctgtcacatgaccagttgcaaagcaatcacattcaaaacagaaatcaaagaaaatacttattttgaaagttagcattgaaagcaccacaaatcatctcttggtaaaattaataataataattgtttccggacgctgagggtcatatatgatctcttcactttgtaaaaaaaaaaaaaagaagattagtgaaatgagatagatacagagaagaagaagaagcttttgcatggacttaagtacattgtaatgtataggtttactattttttggtcaaaataaaagaaaaataacaagtatgtagagtcaaagtatggacccggaaatgagttacaccaatggcttactgttatgttgtaaaacagagacagagagagtctctggcctttgattgcatcaccacggccagtcaatctcagcagcccctgaccataaacacctaggtttgcatttgaactaatgacagagttttgctgcaaaagacaataaattatatttttttttccttttgtagcggaacaaaaagaaacgaaaagggtg

SEQ ID NO: 58269 - DNA, 903 bp, Cannabis sativa
  modified_base (79)..(79): a, c, t, g, unknown or other
gccaccctcaggttgagtcctctatgagcgggtgatctgtcgagaccgtgggttggtagaccttctggagcccatgggntctttcccagaacgatgattagtttcctcctgtgggtattaacattttctgggtttttagccatgaaggaggtggtttttcttcaaaagaaaagagggttttttctgagctttttcacatgggctctcaatgaaagcaccaaactgttaatgcagatttttgttactaaatttgagcctaaccgtaacaatctcacacagaaaaaataaagttttaaaagtaaaagtatgaacacagggtttcttacgtggttttgcagttaaaattatgcgtagtccacgagtcaatcttattcagatctctaattgttttctcagggcgtcttttgtatgagtttttccgtcccgtttttgttcatgcttgccactacttataattacatagtgggcagttaattacaaaattgactataatctgtttacaataatcatcccctaaaatcaaggggtttgattacatatcacgtactgtaaattcgtttattatttgaaaatcatacatatgtgatttttccgattttactaggtcaaaatgatcgagtatttaaacatgtatttaattgttgtatctggggatgtctcgagagaagcttagttccaatgatcacaacagcgagttggggccattttttcctaccaaggtcgatgatacacgtcttgtgacaatcgcatttcttatttacaaagagttcttcgaggctcgtttgaattttagcttttgacttgtcaggaatgtaagcctcacgaagaaaatttttggagttaactgggtgaagttactggaagccttcccatagcgaaataggcacctcgcttactaggtct

SEQ ID NO: 58270 - DNA, 604 bp, Cannabis sativa
attatatagggtctatttataatgagaaatgttgatcaaaggatgggtgatgcccatcatcaacatcatcttattaagtgttcttcagaaattggaaaagaaaaatattaaaaagcatcattaatatttaaattaaatattgagtctcatataatttaatttaattaactaactatttacaaggtgccggtagcttacaatgatcgttaagaaaaagaaagttgtacgaaatttaagtgtacaaagggattgatattactcactaaaatcatgtggggcccatcaaaattttacgaaaaatacactaaatactataaggtgtaattcaaattttcatttattccaacactatattgcatacaatttagaacactatataagtaattcaataatatataaaacaaacatgtttaatccataacaataacaaagatttggcattacaatactaattaataacttactaagtcttcctagatttttaaaacagaatagaagctagttgatcaactgattagcaaaatacaattgtgatgagtatttatagagttaaggatgtaatctagcaacagaaccctagttggattaggcctcatcattaaaa

SEQ ID NO: 58271 - DNA, 1410 bp, Cannabis sativa
attggagctgaattcactaaagcagtggagaattttttcttgacaggtatcatgccacgggaacttcatgcaactatgatcactcttattcccaagacagaaaacccgactaaagttgtggagttcaagccgattgtgtgctgtacaacaatctataaatgcatatctaattactttgtttgaggctctctcaagttcttccaggattggtaaaccagaatcaaggagcttttgtgcaagggagatcaatagctcataatgtcatgattcttcaagatctcctaaagaactacaaaaggaaaaacatttcacctagatgcactatcaaggtggacataagtaaggcatatgacacagtcaattgggagtttttggagaagcttctgaaggaatttaacttgccgggcagattcatcacttggatcatgacatgcttaaaatcgacatcttactcaattttgatgaatgggagagttcaagggagtttccaaggcaagaaggggttgagacaaggtgatcctctatctccgctcttatttgtccttataatggagtatttaaccaggaggcttcttctagctgctaatcactctgaattcaggtatcagcctctttgtaagaatctaaagataattaatctgagttttgcggatgacttgatgatattttgcaaaggagaccttggctcgattcagattattaagcagattctagatgaattcagtgccacttcaggacttcctatcaacattaataagtcccatctctattttgggggtgtgaaagacgaagaaaagcaaaaaatggtgaaagagttgtcccttcaagaaggagaattccctctcaagtacttgagagtccccttaagaccaaaaaaatggaaagcggaggattgtggtgtgataatcaagaaaattaagcaaaggctccacacttgggctactagacatctctcatttgccggcagggctcaactcatacattcagttctgcgtgggttaaggaattattggatgagtatattcattcttccgcatagtatggcaaaggaggttgagaaactttgtcggggattcctatggggttggaatgggacctcttgggagaaagattgtcttccaaagacctatggaggccttggcttcaaggatggtatcaagcggaatcaagctattcttgcaaaatatgtttaggccatttctaccaaaagggacatgctttgggtgaaatgggtcagcaattatctaaaaggaaagaattggtgggaatatgatcttaagagtgacactagttggtattggaggaaactatgttctctaagggacaaattcactagagaagacatacacaaagcaagggctggtatgagattcaaggctgccttactgtataacagcagcattcctcaaa

SEQ ID NO: 58272 - DNA, 1766 bp, Cannabis sativa
tacttatcaagttcatttttcatcttgctgctatttttctccattcttcgtgccacgaactcatcatggacattacgagacttcttgcctttaggtcgactagaaagatgaatgaggaagaaccacgtcatcaataggttgagcttgtgattgagtgattgaggaatcaatacttgatgctgaatcattatattgattaaacattctgtgaatcatttgttccgcccctttcaccatctctttgcattctaactccgtatgagtaaagctaaaacaatgatagagataatcaactttatatctagggtcaagaactaaggcaaatagaagtgcctcattacagtcattaagcttcctccaatacttgtcatactcagggccgaccctgaacattttgggaccctttttttaaaagaaaaaataaatgacatgtatacgtacatattatttgaaagtcacaattttattgtaaccttaaaataaattcgtttcaaaaaaatttctacttcatatgattatcaacttaattttattatatcatttaaatataatacgtcttgcattcttagatgcaaaagtactaattaaatttgcataatcaagtttttcaaccatatcattttcaatggacaacatagttaaaccacttaatctttcttgagacattgttgaacggagatatgatttgatcaacctcaatttggaaaagcttctttctgcatgggcaacagtgacaggtatagttagcaaaattctataagcaatccaggcatttggataacacccatccacttcttttatatagctcaagacatctatagctgttttggtatcatttggtaaactttgacgcatcataagtaactcttggtataagtcttcactgtcaagatcagatttctcaccatgcttcattaaatttgtaagactaatacaaaaaatcttcaagctatccttatttgcagactttaatttcttaaaatcaaacaaaagtccaaaattttctctaaaattctgaaattgtccaaacctagttaaacaagaattattttattaataagataggaatagtaaagataattttaaatgaacaacatgaaagtattcatacatgattttaaatggtgaaatagcttgatcaattatgtagatgaaatattcaattttaaaggactcttctgctgaccgtaccacctcttcacagacaacttcatcaaacttcttctttctattattttttcgcttttccaaaaacacaggctcaacttttattttaattgcaattttagtagcttctgtcatagcttcctcaaaaccagtttctctatacttttgaagaaataaaagtaggttttttaattctttgacagcaacatcaatttgcatattttcactttgaagagctttgctaatattattattaacaacaacaaatcatatcaaataacaatgcctaacaagaactcaaaattatgaatattatatgttgctaaagtctctacattgctccttgttttggcatcttcattactttttgccaagcaattaaaagcttcttctatttgtggagcttgaagtcttaccgttttaacactaacaacacgactttcccaacgagtttctgataatggcttaattgtgaaacttggtacatgacctgtaaaaaatttccatctctttgtagaagctgaaaataatgagtatatacgttctaacacaccaaaaaaaggcactgccttgggacaacaatgagccatatcaaaaag

SEQ ID NO: 58273 - DNA, 962 bp, Cannabis sativa
attttgaaatgatatataaaatatataactattagaaaaagtgcattcattgctaaataacaatacaaatccaatcattttgtttatttatatcacaaatatcctagcccactaacaaaagttacttctttaaaattccaaagaaaaatataacatttcttttaaataaaattataatatttaatattaattttttgaatgtaaaaaaaatcacttaaatattagttgcactcttatattgatactaacctaccaagcacaacacatattttaccatccattttgtgaattcacacatttattttttttttaaaaaaaaaggtcccttatgctattgtaagtttgaatagggaaaaaaaaagtctcttagtttttggcaaatgacaaaattttgggttgttaatttagtaaatgatataatattttatctataaacatgtttttttggaaggccattgctatatatttgattttgcagtctttatttgattttcaagttttttttttttattaaataattcttatcaaatatatattttacagtaaaataacataaatacctttcttaaatattcaaaaaaatgatataaatttctatttcaaagtgattttaagtggtaattttatgtatgcatcttcttttatatatatactaatcaaagaagtcaaaactttaacacaaaaaatggatcaattaatgagtcaaaaaattgtttagctacgaaatagtaaaaaaaaaattatacaaacaatgtttaataactattagaaatcaattagacaaaattgaaacaaaaatagataaataacaacaaaaattaaaacaatgatttatcaaaaattgagaaaccattagtagtctttcttaagataaaaaccaatccaacaattgaaggataaagaaaaggttataagacttatacatagaaaagttttctacccaagagagccttaacacatgt

SEQ ID NO: 58274 - DNA, 979 bp, Cannabis sativa
ttatttcttggagaagggattgaatccatgtcaactcagccgagacctgagcaagggctctatactctgattcagtgcttgaacgagatacaacagcttgtttcttggatgaccatgacactaaggtatccccaaaatacacacaatagcctgccacagactttctgtcatcgggacaacaggcccaatcagcatcggaaaaaccagtcaaagtcagcctctcactatacttgatgtgcaaaccatgatttagagtaccttttaggtatctaagaattcttttggcggcagaccagtgacaatctgtaggggctttcaagaattgactcaacttgttaacagcaaagctgagatcaggtcttgtatgagtcaagtattgcaagccaccaatcaaactcctatactctgtcgggtttttgagcaaattcccatctgtaatagacaaagttttaccaacagacataggagtaggacatggcttcaagtgtgtcatgttgtttttctttagtaactctgttatgtacttggcttgagatagaaacattcctgtgtcatccctgtatacttcaatgccaagaaaataattgagtgacccgagatcttttaaggcaaaaaccagatttaacttcttgatgaactgctgcaacttttctgaattattaccagtaataattatgtcatctacgtaaataagcacaagcataacttcactcacagtcttgtagaaaaataatgatgaatcagccttagaattgacaaaattccaacttagcaatgtctgttttagcttgtcgaaccaagctctcggtgcctgcctcaacccgtataagctcttagttagtttacacacatgatcaggatgaattttgtcttcgaaaccaggtggctggttcatgtaaacatcctcattcagagtgccatttaagaacgcgttgtttatatcgagttgtctaacctcccaggattttgctacagcaat

SEQ ID NO: 58275 - DNA, 2170 bp, Cannabis sativa
  modified_base (1281)..(1294): a, c, t, g, unknown or other
agtgctaattgccttttctaatcacattactagagcggtcattacaatatttgtcctcgttgttgctatatcaactcctaagattagtcttttaggaatcctgatataagtcacattttgcgtatttcccttagtctttcaacatactcacgagtatgtgggttaatgagttgtaagctcttaaagaactcgttatctaccatttccagcgatattgtttcagttcttgtatgcttctgagtgaccctaattagctccgagatgacctctgaatgttgttatctcgcaatactgtgtactttatcatcaccatgtgttagtgatgttgtagcatagcacgaggttggtatctatttatggtttcttctttcgaggcaagataggcattgtaattatggtcctcttttaatattcgagaataatgttcacgtgtcttgtccatatttatgactcaaaatatgggcataatatttttatatggctctaataccatgatagaatttaggatggaagtgaatatatcgtaaggtgtctaaggtttcatctcaaagtgaattgacaatgaaaggagtagtccatgtatctatatggtattatctttctacacattaacaatgtgagaaaggtattatttatttcgaaaatatgattaatttaaaaggtaataaaataatattaattaaataaactaaaaaatctgttaatttctcaattaatataaataaaattaaaaaaataaagttaaaaccaaaaattctattacatagccatttttggatcatattttgctcatagtgtacccgattcgcactaagtgtggattttatattttagatccaatccaatccgcataataactcaaatctaatctaatccaatccgtaaaagtacagattagatcagttatttttgattggttgatattaaattatttaatatatatgaaaaaatacatttttttaacataactattaataaaataaaataaattatttttattttatatctctaacaacaaattaaaataattaaaaaaacaaattcaaaggaagaaaaaaaaaattatatgtataaagaaatgtttaattttattttaaattatatataaaaaatataaaaataattatatgtaagaatagaatatacatttaatctattaagttttgaaatatatttgtatcatatgtattaaatttttaaattactattttcttaacattaaaatattaattgtatatataattttttaaaaaaaatttataaatatgtgtggattggatnnnnnnnnnnnnnnttacatgtcaatcaacatctaattttgaattttacaatccaatctctaattcgcacaagtgcggatatccacactttgcggattagattagattggattaaattgtatggaatagattggatcagctactttataaacaccctatacttacatatattttgtcaaatgtgattttgtaaaatattatggaaagaaaaaaaatagcatatgattgattgcctatataagactatctccggaagataagactatctccggaagatgtaaaacttatgctatatttgatataaaattaagtgactttgtgatatatttacattaatttttagtattgtgctcaatgcacaattataaaatttaatgtaaaatttaatgttaaattaatgtttttattaaaagtataaaaaataatttaaaataaaaaaaaaatgtataagatttgaaattttaagcaataagtaaatttaataataagatattaaaaatgacataaaaataaatataaaagaattgatttattgtgatataaatttgagtgaacttctattatgtgacaaatttgtataaatttttggtacattattagaacaaaatttttacataatgagctgtattttagcaatgaattgaagatgctatcatttgatcaaacttggcggttgatcaaagcttgattgaaagtatgttaaatattaatttaataatgtacatatagtattgaatgatttgtatcatgttaagatctaaattgcaataaccatattaaatgtttcaaaattgtagttttgtggctatgctcaatcctcgttacatcatttgaacgtcattgtaattaatcaagagatagttgtagtgttgtaaactcaatcatatata

SEQ ID NO: 58276 - DNA, 3220 bp, Cannabis sativa
aggatgttttgcacccgatgtttggatgaggcctctttccagctgttaggggatccccatttccctttttgattttagggtttaatatgggggctaactgttggatttttactatttcagatgagtgaagtccttcgtgaccttcatacgcacagtttctttgggtttgaccaagaaatccttgatctacaccaagtccactccatgtcaacccccactgccagagtgaagtcttcgaagaaggggccaaagaagttggccaccttggacgaggtcatgaagggccccgtcatctacaaaaagtttgcatgttgttccaatggctaggaagccgatgaactgcattcaacgttaacctgcacccaccaattagagaaaattagtattgtcgcagggatcaaaccctccagttcgggggtctaccatcgtctccccatggacgaagagatactaaaccacaattataacgactttggggcatggagcaagacccatctgatgtccggggccatgcttcctctccaggattatttcatcgatttccttgtctttgttggtctctcacctagcttaccgcctgttatcaggcttgtacattttttatgtagccaggaattgggccccgcctagtcctactgaaattttgtatttttacgaacttcttttagtccccaaaaagggggacaaatttaaggatggtttttataaactccaagcccatccggccaacgaaactccagtgcccttcaattttcagaagaatgtgaaggagtaccgccacagatttttcttctcctccgggttcaaagcttttgagcgcctagacctactgacggattgggtcaggatccctcctatgcaccgtaccgcccctactcaactcttcctaaaccacgcacatgtgttttctggttacaagaaggaagacttgaacgtgggagatctggtcacgacggccaactgcacgaaggccaaattgatcttggagagtcgatttgtggaggacttcaatttgtccaaggttctttaccctaacgtccggaaccctgggagtgagaaggcactctgagaagatattatcttgtccgcagaggacagatacaataaatatagacaagagggattaggagcttgcatttgcccgagcgcaggctgcctctggaaagatatcctaagaggaggcagggaacgaaagaacttcagtccgacccaagtttccattcccggttcctaaatctggggcccatggtgcaagcacctccagagcttgtaagcctcctttgaacattcactttgtcccttctgtccaagactatgctgacctaaggctagtggagtttgataatagattatacagttttcggatgccccatttctggtggagataatgccaaatacttttatttctcaaaattaagtcactatttgggtcaaacccggatgggctcaggtcctcccgtaccaattccttggatcactcctcctagacttcaagttggttccttccctcggatagctttttaagtgatgatgacaccagcctttaaatttgtgaattttctaggacagaattaaatcacaaaggtaggactacttccgttgtgctatacttgcatatatgatttctgatgttattctgattttttactcattttgaacagggaaacccatggaggatcttttggatgcactcacccaaacttacagtcctgagttaaacatgcctaagcagcccagggtaagtgtgaatctcggaggacctgccatcaaagctcttgggaaccataaagtggccctgattaatgaagaggaagaagaatttgtctctcctctcgatcgaaagcgcaagagcgttatgactgagccagagtcttcaaagaaaatgaagagggttgacacactgacccaagtgctaattcggggattccttctgaagttgatgagtatctcgctcctctgggcatcattttgactcctgctcatcctaatgaagaaagggttcaactctgcattgccaagcataattatgtcgtgggggaattatccaggggggatgccgaagcaaaggctctgaagaagtgcctgagggaggcctaagatgggtcctttcaaggcgaatatgctagggacgtctaggatttaaacttggatcccttgatagtctggtttaaaagctttgtggggcccaacttggctcattttgcctcagaaatggtgagtcactttgctgctgatttaacccaacttcccaccaagaggtatgcggcgtgtgcttcttcgaatctcgtatactaaatacaagacatgagtgttaccctgactacaataagtgacaatcttataggtctcttttatgtttttacttctgcagttctaacttttttctcttttggctgctagattgctgcggaggccggtcgtctttccaaaactttgatcgaccaagggttcactatgtcagagtttggtggcatggacgtggtaatgaaaaagctccaggactcaaaggaccagaaggaggccattcgtaatgaagcccaagaggataaggcccttatggagcggaaccattaggcggtgctgaaagccagggatgaaattgttgcttcggccaggagggacctccgagactctaaagaggagaaccaggaacctattgtgaagctcaaatctctagaggagctgcaccaggtcaatttgaaggcaacaacctatttaactgttgaactcaaagagcttcgtgagttccacgatcagactcgcaaggaggcttccaaagctgcgagggatgctttactggctccaattacctgtaagcactgcgataagcattttgatgacggggtgttcatgtgctggaaggccaataatttcgaaccccatcttcctttttatcccaatcccgacgttgttctggctcaattttgggagaaaaataagaagttggatgctgtcctggctgagcgcaggggtccccgtcttccgccttgacttgattaattaactcttttttttttatatttcaccttcccccttttaagacaattctattttcgtacttattttttgtattttaggtaaggggagactttttatggccctaccccaggccttttgttattcatattttagacaacttatatgtttatatgtttattttgttttcttcatatctagcctatttttgcaagtatgttatgccttaataccctctaagtga

SEQ ID NO: 58277 - DNA, 995 bp, Cannabis sativa
agggtcattcatcaatccaaaaagtagccaaagtgatgtactcgtgtataagagccattattcagtgggtgtaatgacccaatggaggcttaaagtggggacgttacaaagctcactgaggtagttccccacaggaggcaaagtcctttaggggtcagatgggtgtgcccttcgtccaagataagcgagggacatattatggccttggataaggttgtatacttgggcagacttgagtgttacgtccccttttcgaatcatcgggcaaccaatccatagaaagggttttgtgcctggtcgggtgctcacactaagcaaagggcgatgttgcctctgcactcgtacttcaagagggttacagattattttttcctttgtgtgacccagttcactcccaagggcatcaagtatttgtctaccctgttcgtcctctacgccattcaaggatggggtgtgccatctccagataaggtcaattggttttttgacttgaagtctacccctaagcagagcaggtcggggtacttctacttctctcagccagacttcaagtggctgacgggcactgtggacaaggatggtagcaagatcgggggttttgttgacgagtactactttgtggaaggcatggacaccacctatacttggtttcaaaagatcccaatatattgtcgttcgccccttacactggcacttagggacagggctcaaaacattctccaattgccggatgctactcgaaacatcactttgttgacctctgaggacaactttgtgaagtacaagctttatccgacagactttataccccagcctttgaaggggaagaagaagaagtccatggctggtcgggctgaggtagctgagcaagagaaggagctcattcaacttaagtgtgaggctaagttgaatggtgatgctggaaccaagcagaatgctcaggaatattttgagaaggagaaggaggctcaagaatattctaagcaagagaggcc

SEQ ID NO: 58278 - DNA, 812 bp, Cannabis sativa
ccaaatatcacagtgaataatatcgaaagctttattagaaagagtattattgctttgaaaaggaagttttctctgtttcgcaacaggacaaacataacatggtatttctttgtgtaaatcagaaactttacagttcgaaacatttttgaggagatttaatcgtttgtgagataaatgtccaagacgagagtgccaagtctcagcagcaacagaaagaatttgactagagttaggtgtattgtcaagaatgtagagatctttgacattactgccgcttccaatcatcctcttgctgacattttcctgcatagtgaatccatcagaggtaaaaagaacagaaatggcagacttgttactgagatagcttacggatatgatattgtacttaaatgtgggagcatacagtacatcagttaagatcatttcattttctaacttgacagatccactttggttcacaatcaaacaatcatggttaggaagtatgagtttaattgagggtatcttacacttatattgaaaaagtttcatatttgaacaaatatgcctaatagctcatgtgtccacaatccaagaattatgtagaggagaactagaactatgtgatcgtatgatacctgtatttcccgtggaagtactagggtcattaacgttcataccattctgttgtgaagcaagcaagttaagcagctgttggtattgagccgtggacaattgagggaggatcgcatgattgtcactggtagtcgagttgctctcttccccaaattgaatttgatttgcaacgacttccttgttcttgttctgtttgt

SEQ ID NO: 58279 - DNA, 816 bp, Cannabis sativa
  modified_base (751)..(776): a, c, t, g, unknown or other
taaattaattttcaatatcaatataaatatcatattcatattcctatttaattaaatttcttaagaaaaatattttatatttaagtgtcttgaacaaaataaccttaaatactaattttcttatttaattaaatatatatctagaaaaataccaaaaaatctacctagaaaatatctatctacataactcataaactaattacttattttctaattaaaacaaagtatttgagtctatttattttaaataaatgattaatgaaaattacttaatttaagttgatataaaattaattaaaaaaaattaattttcaactttaatctaattctcaaaaataaacattttgaaatatctacaattaaaataatttcatttcaaaatttatgtgggaaataattttaaaaatataataagatatattctgaaaattattctaatttaagttgatttgaaattgaaaaatatcgaacttaaatataattttctatttaattaaattcattaaagtagaaataattaagtatctagaataaaatcaacttaattattcattctaatttaatatctaagaatatattctaatttaagttggtccaaaattaattaataaatcaatttacaacttaaatattcttaattaattttttttttgaaatagaaacaaataattaagcatcttgaataaaatcaacttaattataagttctattaagttctaagaaaaatatcctaatttaagttggtctaaannnnnnnnnnnnnnnnnnnnnnnnnntaaatatatttttctacttaattagatattagaaaatata

SEQ ID NO: 58280 - DNA, 607 bp, Cannabis sativa
ataaagaaattctaatataattggtgacaacttttttttctcaattattttagtcctttcggttatatgataagagattgactttttagttcttcaatcctaatcatacttcgtagttcacaatcacacggtgttgaaaaagttgacaagcaatcgtaattcaattatatatatttcgaaaaatatacgtatttattaaaatatatatgtatctttaaaaaaaaaatgaaaatgagtaatggggtaaggaagtctttagggtggcttgtcccaataagaaatcctattgtctccctcgaccatagttgacatttctgaaggcatgtatcactttcaattttgaactgattacaaatttaaagggtagtcaacaacttgggagctaaatcattattggaaatgggaaaattaacattattgagtcaaaaagtttattaggtggtcatgctaagatatgatgccattgcactgcagcccactcatggaaattgctcattttccttttgttgtgttttagcattcggatcatggcaataggaatgggatgggcccaatggatagtgtaatgtccaaacattatcctgcccaaaaatatagataaaaagaa

SEQ ID NO: 58281 - DNA, 802 bp, Cannabis sativa
tctagcccgagattaatgtcctgaacatgatgattatgagacttttaaaccaggaggtaaagtgtaaaacttataccttacgttttcaaatagagttgggtgatccccaacacttatttccaaaaatctcaccacatatacccataaggattacgagaatgatatgtcaatttacacttgagtagatgaaaatttttataggtatgaccattgtctaatggaaggtaagatgttatatgcgagcaatcccacctttaaatcttatatgtctgaggagtggaccaatatggccacaatcttaagtttaaagatgataacactttttagtacttccttttgagcaagaaatgctagctttaggagaatatttcccctttcttaacttgtttgtatgtacttttatttaagaatgtgtatgtcacttctcatatgcttgcttgtttttgtatgtggctatgttttatgggatggtactattcatgcagctcttttatctttctgcatgtttttggtggctagcatgttcgcttctttttttttggtgaaatggatgatttgcaaacctatcgttgatataataaattttttattaagcaagatcctagaggctaggaattcttggacaaaccttattgggtatggcccccacttgtcagcatgaaaatagggaaagtattttagtttctaaatttactgtaccaacgacaaaacaagtttcttataaaggagaataaacaatgagatttacacacccactactctgacacgtacttatcccatgcgcccataggcagctcattca

SEQ ID NO: 58282 - DNA, 1259 bp, Cannabis sativa
tggagcctctgccaattctcttcttcagagcatcaagcatcttctgagacatgtctgcacagaataaaaaaaacaacatggttagaagaaacagacatcagaaacatgaagcttaatagtcaagaagcttaaaagcaggatggagtaatatgcaagatgattgctcgagcaggtctcgaaagtccatcgcacctgacatgcctctgattttggacataatagctttctcttttttgagcacaggaggaagtggccgagcaggagagatgggctccctgatgcgaattgcatgttcgataggcatgggctgggttggaagttttttcctccttttgagcggagtcacctgctcttcctcaacctcatcttcaggattcaagggctcctaagcatattgcttggcccttgcatctcccttcaacttagcttcgcgcttaagttgaatgagttcattctcctgatgagctcgttcagcccgtccagcattagatttcctcttcctctccctcacttgcttgggaatgaaatcctttggatagagcccgtacctcacaagattatcctcggaggtcaaccgaatgatattccggtcttcccccagcagtcgagcaagcttttgagctctatccctaagagcaagagtgaggggaggacggtgatatgttggaatctgctagaaccgagtacgggtgatgcccgcgccatccaccaagaagtactcatcaacaaaatgcctaattttgctgatggccgagtgataggtgcccatcaaccacttgaagtctggttgagagaaatagaagtaccccgacctgccttgcttgggggtggacttcaaatcaaagaaccagctgacctcgtggggagaaggcatatcccacttctgggaggcgtaaaggacgaaaagggctgacagatacttaaggccctgaggagtgaactgggtcgggcagaggctgaagaagtccgccacattcttaaagtattgatgcaaaggcatcaatgcccctttctgggcatcatcacccgaccaagcgcacatccccctttcagggtttgtggctcgattattgtgggcgggaatgtagcactccagttcgcccaagtagccatcctggtcgagagtccccaggcgcgcctcagtaaacctggatggaggactcacccacctggcgcccaaggcactttgccttctatgaggaaccgcagcagtaagctcctcactgacatagtcaacaccctcaaccaggacatctccg

SEQ ID NO: 58283 - DNA, 1055 bp, Cannabis sativa
  modified_base (26)..(26): a, c, t, g, unknown or other
ttacattgaaacagagttttatttanggcataaaacccaacacatacttcatccatgacacctaaacactaagtgacatcttctcataagtccttcacaagaactcatcaattcttggtctgcaacaccttgttctcattattgtaacattcaaagagaaccatagctagaattcataaacttctcacccatgatctgcaaggtagaatatcaatacaactaaaataggagtacatcattacccactaaacaagagggccaaacctctacgaatctttttgtctcctgtacgatatatggttcttattgacatgtggtgattgtctaatataaataatttggctccactgcttgctggccaaatcctcagtgaacattgtattttgaataaattagaaaattcttgttcatttagaaatagaaaattaagtcttctccaatatttcaatattggttctacgagttctttcatttataatttttttgaaatttacctcatataaaaaatcttacaatttgtttttcttatggtaaaaaatgtaaattgaaccgtgagatttttattatacctttgtataagaattatggttatatctcccaatgaagaataaaaagacttatttttgatagaatttttgaccccttaatttaacaaatattagattttgtaaaggggtaacatacaaatataaggaaatgagatggcaaaataaagtttcaacgtcttataattgatgcatatttttttatgaatctttccttatggtttcatagagtgatcaacaagattttgctgtgttcaaagatgactaatggaacttatatttttttcagaaggtattaatattcagacgttgcttcttttaaattttcaaaaccatagttgacaaatcaactagataaaaaaaataaagtcgtcaaaactaactacggttgaaaacactgccatgggaggtatgacgagtcaggtgaacgtctaagattatttgtataattaataaagaaatataatttcatcttgaaataaaaatttttggcgaacctagcacgaaggg

SEQ ID NO: 58284 - DNA, 1686 bp, Cannabis sativa
tattgtattagctcccatatataatatataaatagtagtaaattcttatttagaataaaatccaactaaaagtatatttagaaaacctaatcgtaaatgttcaacaacaaaaatccaatcgtatttttttgaatttaatgaaatttatttaattatatataaataaaaagtgacccatgaatttctcataaattattttatttttaatataaataaaaagtcacctatgaatttctcataaatcaagaattatgttatataggaagactttatatagataaatatataattcttatttgttcatatgtatatatccccataattgtatgacatgtgattacattatcttttttttttttcaaaaaatagaggataaaatataatttagatccttaagcaccaaagaatcaaagtcctaggccaatgatatcttcaaattctttcgtctgtataaattgattttttttttttttttcagtaaatatgagatgaatttattgtatcacattaatgtacattttagaataaagacatttaatggcataacaattctttagaaaaaaaacgtttagtctttgctttttggttacgtatcacatattgacttattttttaaagtctaatgaactaatagcatgtttactaaaaaggaatgggaatcaattgtatgagattgattctcattcatttgtttactaaattttagaataagagaaactagtggagcccacacaaattaaaaagaaaataaagagaatggttcatcccccgttttcataaagaatacattttcctttccttaacttactttatattaattatatttttattagttaaaaataaaaaagacaaatatacccttaaaaatatataaataaaaaataattacatgttctaataatgacaatttagtcaaattaagtcattccgattacctttcctgattatgtaaacaaaataaaatgattctgttttcctatctggtcagtttagtaaacaacaaaacaaaatattatttccaattagtttatattttaacccgattcatttcttccattgattgttctgattctaattacagtttagtaaacgtgccataaaaaaaaaaccaaataaatcaggttgcataatgccataaaaattcatattattatcttcgattatatatcacatattgatttattttttgaagtctagtgaatcgaagagaaatataaaaatctatgatgaagttgacaacataagaatattagtctctttctttctcttttgattatatatcacatcagcttatatactgaaatctaatgaatcaaagaggattagaacgactcttaatcacaacattgaaaaataaaagaataagaagaatgatatcttcaaattcttttgtgaatgtataaattgattttcttttttcagtaaatcatgagatcaatttatcgtttcacattgatacatattttagaataaagacatttgatcgcataacaatttttttttttaaaaaaaaaaacttttactcttcccttttagttatgtatcacatattgatttattttctaaagtctagtgaactaaaaaggaaaccaaataaatcaagcagcataacgccataaagattcatattattatcttcgattatatatcacatatcgatttattttttgaagtctaatgaatcaa

SEQ ID NO: 58285 - DNA, 618 bp, Cannabis sativa
atggccttgagttgttaaattttctattgattatttctattcaaactttctattttatccacgagcttcaaaaaggaagtttagctaataataacgattacaatattattgaagtttagctaatcaatcaggtactataacgataaccaacacaccattgttataaagtttattctagtgtctaatagtcatcgcattacataaaaagataagcttttggtagttgaaattatagttcatcttaataaaaagaatagttgaagtatcaccaactataataataattttaataattattgaatgctaatccaatccaatttttgttttacaattctaatttggatcttattgactctcacagtcacatatcacatgccgctatattgttaataatattttttataggccaaaagtccatttaatttaagtgttttatttatttggcacatcacatcattgtacggctttttctaagtcttttttttaacattcatcatacatactttaaaaacattgtctaaaacacgtctaaaacacgtacttaaaaaaaatatttattagttgtacatgcacttaaagtgaatggtaaattaatttagattgaagtttatacatctt

SEQ ID NO: 58286 - DNA, 1594 bp, Cannabis sativa
ttaaacttaaattataattaacaataattttgaatattatattttctttttataattattacttaaattaaatatttttaataaaaaataatattatttatttataacatccatataaaataaataaaaaaaaattaatcataaaattaaaaatatatataactaaaataaaaactaaaaatataataagtattacattgtactgtacgtaatactaacttagtattatcataattaagtactatcaattatcacgtacctaatgccacatcatgagaaaaataatgataaatgccaccgtactaaaatcaaaaatatatttatatttgcttataattaattagtttatgacttatgtgatattaaaaaataattaaaatttagttcacttgtacttacttaactacgaagacgtaaagtttaattttctattgtaaaataataattaaaaaaaaattgtgaagattgtaaaataataaaatttgaaaaaatatataatagtttatatgaatgattatgtatagagcttaaattgtgaagattgtgaagattgtaaaatttagtttatatgaatgattatgtatagagcttaaataactagtacgcctcactaaaagtatatatgaaaataaatagtgccccattgttaattaacgataatttttaacactaataatattttttaaacactaataatattttttaacaattgctattttatttagacatggcctaccaatatatttgccatgctggcctggcctgcagagcctaatatttatacataaatatatataaagggtgttaaaaaaaaatcaaagagaacagatttttggacctcttatcgtgagttgtttgttgtttttttaaacaagtgagttgtttgttgtaataaaaagattatgtatggagagatttcatccacgagtatcaattgggtactgttcaaagtcacccgttaccttactttttgtggaccatttactcataattatgaaagaatttaagtatccaaacatacaaaaaaatcaactcaattgttgacagtgacctagatatttttctttcctagtgtacacatataaataggaatttatgtataattaaaaattaaaaaatatatatattaagagtgcgttcattatactacaaaaatattattatggtcattcattaacgtggcaaaattacaattaatcactagatttgacagtaatgagaataatggattatatctcaaaactaattggtgatgagtggagtagtccgtgttcttatatatggctcaatacttttacatttaatccatgtgagacaatgttctccaatattctcactcaagacgtactacaagaaatgtcacttttgccatcacatttttgtcctggcaaaagttagtattccgctggtaaaatagaatttacctatgatgcgttggcaaaagggggtaggcagatcaatgttggtattagaacttttgccagcataaataaaaagccctggcaaaaaagacttttcccagcgtgtaaatgtgctagtaaaagttagattttagccactgcaaatgtacgctggtaaaactttgatctctttg

SEQ ID NO: 58287 - DNA, 669 bp, Cannabis sativa
  modified_base (336)..(339): a, c, t, g, unknown or other
ttggtggcaattggttgagttttgagcaagccttgggtttttgggggaactggtacaaagtggttaaccgctatgccagtacctgtaaaactagttaacgggttttggcaggttccccaaataatatgttttctcaattcttgcccatctcagtgccttagttaggtgtttccctgtttcctaggatagtgtagtccctagtgattataacagaaccatgagttgttggttcgggtttccaagattagggttttggacatgtgatttacccggttttaatatgtgattagggcatcaatctagcacaacacttttcgttcaggtcagctaactcannnnaatctggaaaggaggtaagaactgtgtataatatgtgatgtatgtgttaatgtatatgcatgcttgttgtgattcatacactaccaacacttgtacggtagcggtatagagtgcactggtaaagtgtatgatgtctgaagagtacatcacgatgttaccagcactattacggaaggtacaaggtgtatgttgtacaacacttaacaatactcggggtacagttcataccccacctacactattacaatggtggtactaagtgcatgtggtatagtggtacatggtcgtttcatagttagaacgttcttactcatatgttaagccttgtaa

SEQ ID NO: 58288 - DNA, 1192 bp, Cannabis sativa
gtattgcaatagcctttgatgctcgagcaactcctctcttaatggttttgtcattgctcttctttcggcctttggtggcttttccttttaaagcctccatagtttgatgagctttcatgaccttcatttctctaggaacatcagtttgagtatgggttccaatagaaaatgtcatgagaaagccatcttccttcttttgcctcgagttggtgtgcacatgtgcaagcttgtggaaaaatactattatttttggtgccattatttttccatgtaaaatagcacacttaattacaaaagtgagattttttagttcttaacgtaattatagatgaaaatgagaatgggtcccaccgggcgtgccaaaaattatgtttgactatggattctaatagaaaatgtcatgagaaagccatcttccttcttttgcttcgagttggtgtgcacatgtgcatgcttgtggaaaaatattattatttttggtgccattatttttccctgtaaaatagcacacctaattactaaagtgtgattttttagttctcaacataattagagatgaaaaggagaatgggtcccacagggcgtgccaaaaattatgttatgcaaaaattttatatttagaatattaaaaataaatgcaaaacacaatttcccctatgccaaatatatatcataagagtttattaatttaagttcgacccatccaagattataaaaataatctcttaattataatcctcttgtttaaaggaaagaccctttggttccaattacgatgatattaaacttggggtaaattttaggaaaattaggagaatttggaaatgcagctgaactcaatcaacataattaaccgagctgcttacataccttctttgtgaaggatcaagccacttgtagttcagaatacggtattttaaaatttgaatacaagaattttgctagatgaccactttcaggaatcctttgctatttaaaaatttggaaaaattcctaggtataaccatttatggaattttgagatgtgtattttataccattttacagtatcgtgattgcgctttgtcttatcaactaagttgcctacatatcctcttataggaatcaagtcaaacgtagtttcaagaatgttaaaagattttgtatcttcaataactttgtggagaattaactttgatattttgaggtaaat

SEQ ID NO: 58289 - DNA, 1159 bp, Cannabis sativa
cattaatgacacgtttactaaactgtaattagaatcagaataatcaatggaagaaattaattgagttaaatgaaaaataatcagaatcaatatttgtaaaccctgaaccctgacccctgaccccaaacccctaccctctaaccctaacctctaacccctaaatcgcaaccctaaaccccaaacccaaaacctcaaaacccaaatcccagcccattcccattctcattcccatttacattcacattcctattctcattctcattccccagcccattgccattcctattcgcattcccattcccattccctggcccattcccattctcattcccgttcccatcccatccccattcccattccctagcccattcccattcccatcctcattccaaatcccattcgcattccaatttccattccctaacccattccaattccgattcccattcccatgctctggtcaattcccattcccattcacatcctctatcccattcccattccccgacccattcccattcctattcccattgccattcccattccctatcctattcccattcccattcccaaagcccaaaaccccaaatgccaaaaccccaaaaccccaattcccattcctcggcccattcccattcccattcccgttccctggcccattcccatttccatttttattcacatttctattcccattcccattcccattctttggtccattcccattcccattctcattcgcattcacattccccagcccattcccattcgcattccccgacccatttccatttccattccccggccaattcccattcccattccctggcccattcccattcctattcccattaccattcccattctcattccttggcccattcccattcccctaatagggttttggcgtttggggttttgaggctttggggaatgggaacgggctaggaataggaatgagaatgggaatgggcatgggtcggggaatgggaatgggcatggggattgggaatgggaatgggaatgggaatgggaatgggctgaggaatgagaatgggaatagcaatgggaatgggaatgatccaggaaatgggaatgagaatgggaatgggaatgagaataggaatgggaacgagaataggaatgggaatgggccgag

SEQ ID NO: 58290 - DNA, 886 bp, Cannabis sativa
ccaagaaacactagggttttctgtattctctccttccccattagagaaaatactttacagagatagtgtcttcttagaagaacataacattttgtacaatctccaataatagcttcagattagtacttctgctcatcttattatcatcttcttcttctttgatttagcaaaagttctataaaatatgatttaggattttatatattaaagcacttttaggaatatatttaaatctgtgatatatatatgtgtcttaagtgttttataaatcataacaaagtgttatcagtgccgccttttgctaaattgattgagtatctgataattttattattcatgaaatttagagattttgaaaattaggtttttttgatcctattagatttatatacatatatatatttgaatatattgtgactttttgttcaatgtttgaatacttcgtctattgagattttttgtattaatatatatgtgccattacatattattttatgattatttaatctttagtataattcgtatgaatataaggttggtgtagtttatactaacgacaattttttgatttcgtttttcttttcttttataatacaagtttctaatttggaatttaactatcaaaacaaaatgactatagtatatgtgttggcacttttgttaaaatgtgtgacagtaatatatatatatatataataataatctcaaatattatgattaacatctatttgttttggtagtaatgtaatttagtttttgttaatgcagatttttgttaattaaataaatagcatttttagcaataaatatactacataattgtatgataataaatattttacgtgattttatagttaaaaaatctacatacttcacgagttcttat

SEQ ID NO: 58291 - DNA, 1229 bp, Cannabis sativa
gatgcgaaaagatgtgctgaaattcgtccaagagtgcgccatttgtcaacaacataagtttgcagccactaccctagctgggttactgcagcccattgccctggcagctcaagtttgggatgatatttccgtagatttcatcgaaggtttgccaagattggaaggctgggataccatcatggtagtggtggatagattgagcaagtacgcccatttcgtcacccttaaacatccattcacagccacaacagttgcgcaagtcttccttaaagaggtagtccgcctccatagtttacccttgtccattatttcaaaccgtgatcggatctttactagccacttttggagtgatttagcaaggtacatccctcaagcgcagcaccgcttaccatccacaaactgacggccaaatagaagtggtgaatcagactcttgagacatacctccgttgttttgctaatgagaaagccaagcaatgggctaaatggttggcttgggcaaaatattggtataatacttccacccattcgagcattaagcttattctattctaggcattgtatggcagagattccccacctttgattcgctatcatgctaaatcttcgcatgtgtccgcagttgataccttgttggctaatggagatgccaacattgatgacctatggatgcatctccttcgagcccagcagcaaatgaagcatcatgctgatcaacacaggcaccatgaggaatttcaagttggcgacttggtttatctcaagcttcgtccctaccgacagtagtctttagccaagcgtcgctttgagaagctcgctgcaaagttttatggtccttttaaggtgacagaaacggtaggcgcagtagcctatcgactagagctaccaacttcttcatctattcacccggtcttccacatctcgcagctgaaaagagcacatagttcgactctttcatcgccgactctgcctcctttgacacctgagttagagctgcaagttgcaccagaagcagttctttaagtgcggcagcaagctacacatggcctggaagacttggaggtcctcattaagtggaagtccctgcccgagtttgaagctacatgggcgagctttgacaagatcaacacaacctttcctgaatttcaccttgaggacaaggtgaaagtgcacccccggggtattgatacaccaccaattaggttgacttattctaggagacctaagaaa

SEQ ID NO: 58292 - DNA, 1190 bp, Cannabis sativa
atagcaagagataaatttgatagaattataattttaattatgcgaacaaggaggtattgaatgacaaaatattattgggagaaaaaaaattataatgaaggttttttattttgattagatttgtaagtttatggtatgaaattagcttaaatgacattattatctaccatttacctaaacttatagttacatgcctataaagtctttttgatttacatgactttattttatattggtggagatgaattagttatgcaagtctataattatctttaatgttttgtggtaaaggaagtctttatgcacatggattaaatgtatatagaattaatagaattaacatatacacatttttaataaaaatacaatatggaagttaagtttaaatgggataaaattctagtcctttgtttaaagtacatgttgaataattgaaagagaatttggtattttgagataaattacttttggtctaactttcttgattttttatccaataattgacttattagtttttagttttattctttttcattgttggaggacaagcaatagtttaagtttgggcatgtgatgagtgcacatttgttcacttatccttagatgaattagtattgattttttaaagttttgtacaaatttgatgtgtttttttaagtgtgtagatttgtgcttaaaagataattttgtgatggactaagacctttgagctaatttttgacaatatttttatcattttctcgaagagcttatgaaatccaaaataatagagctcattcccagcttttcaaaacacgttaaatcatttcatttagagtccaaacgcgaatgttatgcatgattcactaagcaaggtcaaagcaatataatagcgacgaaaaaatagcatgtggcgctatagcgccaaaagtatgccgctataacgccactccttaaaaaaaagataaaactgagaaaaaaaaagataatttcagcacgtgggtgatactgtgaagtcatgcatggcactatagcgtcgtgtctttggtgctatagtgttgtacgtgtatctttgaatttaaatcctcattctaaatggattctttttgtctttttgggcctatataaagaatgacgtaaatcgacttttagactacgggagagatacaaaaaagcaactttgagattagaaaatacattaaagagcgaga

SEQ ID NO: 58293 - DNA, 2025 bp, Cannabis sativa
agaacttccaccatgacaaggatgtgatcttcttcttcaagggaggttgcaaggtggtagccactctgaactgtgtatgtgtctgtattgtggtgatgccatataagtttgtctgttgtactaaagtagctcaaagggatggcgagtattttgtcaacatcaagagggcaaaaaacttgctgcaataaaggaacatcccactctctttcatcagttataaaatttgataccacattatttgggggtccaatgtatcttgttggaaggaaagatgtataaccaggaatccaagggtcataaccacatttgacagaacgaccctctccaattttccatcacaaccctttggtgaaaagatcatgaccccacttaataccttgccaagttaacgaaggagaatgacccatacttgcttcaaggaacgagttacgtggaaagtatctgcttttgagtaattggcttaggagtgaatctggatttttaagaagacgccacgcttgcttagctagtaatgcttgattaaagttgatgaaggaccgaaaacccattccaccctcaccctttgttttgcatagaaaattccacgagcgccaatggattttagacccatttgcattcatccccaaccaaaaattagccatcatactctcaagttggttgcaaaagtaacccggtagtcgaaaacaacttatggcatatgttgggatagattgaacaacaaccttgagtaggacttcacgacctcctgctgagaatatcttttcactccaagagtgcatgaatttccaaattcattccttaatgttgctgaagagctctttcttgtctctacccgagtaggagggtaggccaaggtaacgttcatgacactcacagattggcatgtaaaggtgtcgatgaaagaaaacttgggcaggcaaggtagtgttcgaagaaaaagacatcacagatttgtcaggattgagaagttgacctgaagcttgaagatatgtgtctaaaactctcttgatagtaaggcaggagctttcatcagcttgacaaaatagaagactatcatcagcaaatagtaaatgtgatatggtaggagctcggcgtgtgagtttgaacccatgtatattaccaatactctgttcatattgcagcagcctagacaagccttcagcacatatcaagaagagatatggagatagagggcaaccttgtcttaatcctcgggtgggagttacttgaccagtgacttcgccatttacaaggaaggagaagctattagtagtaaggcagcccattattagtgaaatccaagcattagcaaaccccattttcctcataacttcttccaagaaacgccattcaactctatcaaaggccttgctcatgtcaagcttaatagttgcaatacaattacgccacgatgttttattttttattgcatggaccaattcgaaggctatcaaaatgttgtccgttatcaatcgattaggcaagaaggcactttgtgattcggaaatgaccataggaagaatctctttgaatctagccacaaggattttggtaaccatctttgaaatgacattgcaaaggctaatcgaaatccttcatatgttgtggtttcttgatcttcggtatgagagtgattatggtgcggttgaactgtgacgggtcagctccgttgttcaagatactgagtacagtcgaagttacaagatcccctacaatttaccaattttgttgtaaaacatggccgacattccgtcaattctcgggcttttatccgatcccatgttcttgatggcagcttcaacttccatagctatgaagggtgcaagtagagaggcattatgagcatcggagaccatattgggaatacattctagagtagtttgaagagccaaatcatttatatcaccagctcaaaagttcagcataataatcttgaataaccaaagaaatttcagcattagatttcactttgagacccatatcatcaataataaaattaattcggttgttgaattttcgagcatt

SEQ ID NO: 58294 - DNA, 1669 bp, Cannabis sativa
acacacaacagttacataaaaccaaaaactacatgttaaagtttgcaaatactacaagtgctaattacaaaacatcaggaaaccacaaaataacagtctaaactaaacgatagtaattgtaacactaatcatccaatcttcaaagctcccctagtagctttgggcatcttcccagtaaactctgaaccagattcatatccattcaactccttcttcatagcatgcacaaaaagctcaacgcacatcttctttcggacgaaatccatattcaaagttttggggacattgttgatcatttcatgtataaagtattcagcatactttataacgaatacaccgcagtcactacaaaataaagaataaaaataacagtcagaaccatcgtaaactaaaatgttaataaaaaaaataaaaaatatacaatatagttaccactgatcttgttgaggcaatttatctataaaaacaatttccaatggatctgtatccttcactccctgaaaatactgagtgctcttgtcaatatcagacctccgaccatagaaatccacatgagacaataaaatcggcaaaataacagcaaatgcattcacaaaactgcgactgtccttaaactttccacgcctcaaagaattgcacaccttaagacatctcatcttgatgtcaaagacgcacaaaatccaatgtgccaaagccattacattgaccggaaatagcatgaaatctaaaacgaaccatggtttaccacacaacaagccaaatcccgcaatatacgcagctgccttagtgtcccgaggaacagaattaatatcctcatcatttgcacaaaacttgttgtacaaatcaaatatatgggctgcaaaaaaacaatcagtggtgctggcagcaaccctcacacttttgtcatacttaatttgcttcctcaagtaataaaagcacacatcaatatgctgcataacgtataacataaaaaaaaaacataaattataaacaaataaatgaaaactcaaacacaaacataaaaaaacaaaactcccatcaatatatcataagaaaaaaatactaaccgaacatgataaatttctccccggggttctcagatcgtaaaaccacattttatcgttaaccttcacaacaacaaaatctaatggcaccttcaatactcgatcctcttgtttgaacttcttcaatttgtttttatcattgaaaccagccttgaaccattgctcaaatgatttaacttgaagctcatctggcatggccatcaatccatttgaaaatggaaacaatccatacacttcaccagttggtttaccactgctggccgaaccaaaatttgttgtgtaaggactcttcattacagatgcaggcttcgcagcccttttaacaaccttgggcgtaaactctacattcaaatcctaccaacaaacacaacaaacacaaattttaaaaataaaaatagtaataataaaaataaattaaaaagtttcaataataagtacataaacaaaattaaaaaataaatgttggtagataataattaaacatttaaaacatggaacctttgcaatattcctctgattagaagccattacttctttgtgcaacaccttaccctacaaaaaaaaaacagttaaaaaaaaacaacctaataatccataacaattac

SEQ ID NO: 58295 - DNA, 1838 bp, Cannabis sativa
  modified_base (549)..(549): a, c, t, g, unknown or other
ttttatgtgtttattttatattgttttataagttcatgtttaggatgttaaaaaatatacttgttagtaaatctagatactggtaaaatatattccaatattcacttgcctagggaagctataataagtcatatgcaatatcataggatgtaccctattgagcggtattttttttctctttaaattatttttctaatttctctactctttggaagagaatatatactcatatatatatatatatttatatgtttttataggtatatgcggacattaaaagagtatgttcataataaggcacaaccgaaaggttaattgtagaaggatacttaattgatgaatgtgttacattttgttgaagatatttttatggtgtggactaagtttaaccaagccaaaaaagtgtaatatctcaaaaacctaattatgaataattaggatttattatatattatggattaattaggtagtaatgaatataattataatcttggtaacctaactgagcataaattataaatttgtctataagtggataaataagcgtantttattaattacagagatttacttggaatatgtggacataatgtaatttatttgtgtaataaaaatattttcaagttcggcgactctagagacctgattggaggccaaaaatggcataataattttagttagtaatattaatgggattattaagataagttgattttagaaataccatgacattttggggtactcagaattgaccaaataccctaaaattaaagatttctcaatggctatgaaataataagataattattaataataaagtttttattagtattattaatattatattattattaacgttattcttatcagtttaatatacattatatatattatgtttttaaaaacataaatagaaaaaacaaaatcttcctttttttggtgcgacgaaactttctctcctcttaatttcttcgattgtcaatttgaaacttaataattcaagcttcggtagtagcgggatagttaatcatcgaagagaaaaagcttaaagtaatgataggtttcgttttaagttgaaaacaattagttttatatagtaactttgtgatttagagtagttatggagattctgactttatggaattgttctttggtagctatgggactagtttcgatgtttacttattgaatttgacgtaattttgagttagaaatcgaagttgaaacattttaaggcttaagtctgaacgtcaaaggcgttttctatttaagggttcgattttaatttcggttacataaggattgttgtatatgtggtatatatgtgtcccgtgaagtttggaatgatttggataggttttgatagtgtttcgaagagtgcaaaatttgagatcttcatgccaaaaaatggttatttttaccaaaacgttctgccatttctagaaattctagggagattagaaatcgtatttttgtcataacttttcacttgggtgtttgtttaggacgttctatataccgttttaaagcttaggacgagatctacattatggtgtatgttttagagccaaagtataagttttattttattgtatttataccgcagaattcggtagaaaatcctagattgtcttatgtgaatattaagcgatgttttggaatatacacttatttgtttatcgttgttatgacatagggctcgggatcgtcgatcgttctccaagaaaatcggccaacatacctgaaatgaaacttgaggtaagaaaagtatattgtactgcatagcaagttatattacaatgtaattaatgttgttgagaattgattaatattgggat

SEQ ID NO: 58296 - DNA, 781 bp, Cannabis sativa
tttaaattaaatgcatatttttttcttattcagttcttcaaaagaagccaaagaggtattttatcttttgtcgggaatattattgttatgtgttgcaaattcagcatgcaacaaaatcagtattgttacatgttggtcgtttgttacaacaatatgtagtagatatgtacgtaaaactagaaacttctcgattggattattttcaaaagaatcaagaagacattcgagctgaattatacaaagggatcattggtagcattgaaataggtgaaacacgaggctttaaaattggtcgaagaattattttgccttcatcttttattggtggtccaagagatatgcgaaaacgatatattgatgccatgacattagttcaaaaatttggaaaactagatttgtttctaacaatgacttgtaatcctaattggcaagagataaaagaagaattaggagatactgatcaagtgcaaaacagaccagacttgatagcacaaatttttaaagcaaaattggatgaattgaaaaatgatttattcaagaagcaaatatttggtcatgttattgcttatgtttatgtaataaaatttcaaaaaagaggattaccacatgcacatttcttacttataatgaaaccatattcaaaaattattaatacagattcattttgataaaattatgtcagctgaactacctgatcaagagaagcatgcatatttattttcattagttgtgaaacatatgacgcatggaccatgtgggaaacttaatgataagaatattt

SEQ ID NO: 58297 - DNA, 2135 bp, Cannabis sativa
ttgcaacacttggtgcaagggttgatcgatgtaaactcgaataggttgagcttggaaatatgggcttaacttccttgtggctaagattagattgtaatcaggtttttcaattagaggttaccgaccttctgcttcaacaagtcatttgctaatatagtagactggatgttggacattattttcttcttttattagcacgatgttcactgcgtattcggtgtctgccaactatattctcgattcttctctatctaggagttttgagagtacgggaggctttacaagttgtctttttagttattggaaagcattctcgcattcttctgtccattcaaacttcttattacctcagaggatgttgaagaagggaacgcacttgtctgtcgactttgaaacaaatttgctaagtgcggctatctgaccaattaagctttgtacttcctttatttttgttggagacttcatatccaggatggcttgtattttctctaggttggcttatattcctcaagcattaataataaatccaagaaacttacctgagctgaccccgaaggaacactttaaggaattgagtttcatgttgtactttttgaggattttaagcattcatctagatcctctatatgccccaactttcctggattcgacgagcatgtcatccacgtatacttccatattttatctgatctggtttttgaatattttgtttactagcctttgataggtagccccaacattcttcaaacccaaaaaaatcactttgtaacaatatagacccatatttgtttagaaacttgtatgttcttcctctggtggatggtttttgatttggttataccctgaataggcgtccataaagctcaagatttcatgtccaactgttgcatccacgagttgatcaattcttgggagtggaaaatagttcgttaggacacgcctttttgaggtcgatgaaatctatacacactcgccattttttgtttggcttgggtactagtacggggttagccacccaagctgagtagaagcttcaatgatgaacttatttgtgtgtagccattctacctcttctttcagtgcctgtgcacattctttgtctagtagtcttctcttctactggatggaacgaaagtcggatcaatgttcagggcgagagacatgacagtggggtcaataccgaccatatcctcatgtgaccaagaaaaaacatcaaggtttgctctcaaaaatttattaaggctaattttatttcaagtagtaagcctttatcgattttaagcttcctggtcgagatatctagatcaatttcgaccaattctaattcttctattggccaaacatttgtaattgtttccctaagtcagggatccatgtcttcgtccctaccttaggcgacttcttattgggcgatgctttttcccttttctaaaatcgagccgaaggtattttccttcttcgccttagatagaacaaggttatagcattcccgtgcaatcctttgatttcctttaagacagcccaccccacttttagttgggaacttgacgcacagatgaaaaaccaatgtgacagattttaaatcatatagggctggtcggcctaacttgacattaaaagctgacgggacatcgattaccaagaattgtgctattactattatgctcctcggagcttgtccaacagtaagtggtaggcaaatttctttaaagggtgcaatactctggctggagaaaccgtatacaagctgactgcaaaagattaagtctttaagtttcagtcccctcttctcataagttattttaaatagaatatttaaggaagctccattatctatcatagtcctcgccaccatcttacttgcaatctacacctctacgaccagagggttgttatgtgggaagatgacatggctagcattcactttagtgaatgttattgttggttctcctacacttggtattttaggttttctctcttccacggccaggagtgcttcatttcgttcatgatgtaaggcttgagcatacttttctctagcttcgcccgagtctccagcaagatgtgggcccccaatgattagttgtagatgcccgtccgctggtggaggcattagttggttatgattattatct

SEQ ID NO: 58298 - DNA, 790 bp, Cannabis sativa
gtcactgttctaaaggggagagagattgagttccttgataggttcaaaactcgagtaagctattgtcattaccataatcttgttcaacctaactcttgttcaccataacacttgaagtttgcttaataattatcatttttttttttacaattgtagattaataaacaacgagtgaacaactctactacagtctcaaatgagttgcatgctattgtgaacctagcgaatccaacaatttatttttatcctgggtgcataatgaacggtgttaaatttttagttgaggagagggatgataatcgcaaaacacaaaatagttgtgttatggtgcctgaggaagatggtaaatttttttatggcaaacttgaaaaaattataaagttttctcatttgaaggtctgtaatgttttattgtttaggtgtaagtggtttgacacaaatgggagcagaatggatagtgatgatgttttcactagcattcacatcaaccgggaattgtatcaaaatgaatcgttcatacttgctccagcaaaagttatttttcccatcaatgggtttatttaagcagttttttacgttggcatttggtttattaccagtgcataagctcgctggcgaaagcctattttgtcggcagaattggcagttgtctcggaaaaaattcttttatcaaccgagaacagaagacactttttaccggcgcacttatgtcagtgtaaatatgcgctgataaaatggcatgtcttgtaactttacggttgaatcagactgtttaagagcgatccaacta

SEQ ID NO: 58299 - DNA, 5197 bp, Cannabis sativa
tttatgggattaaagacttttttctgccacacaagattatttcgggctccccaaacagcccaacagaccgctgccattgtacatcgttgttctccactcagaacttggaacttgctgctgcaccattgcagaaaggacattgctggtgtagtcgtggtaccaattcccacgcgattccagcattcctgaaccaccgtgcaagtcacaaggcagtgcattgtgaactcttcttcggcctggcacaacggacagaggacactgctgttaacgtgttataaaataatataaaatagataaaaagaaaagaagaagatgatgaagagataagagaaagtaaatgagaatttctcagttgtttattccaatggggtgaacccctatttataaaaaatattgactaaagaaatgagaaactaaattaatatgtaataaaagaaaatacaatcaagtgttaatagtgataattaatatagtaatttgaacatccataaataatatttcataacactcgttgatttctttcttatttattaagcatctgttgtataatttactttccattattgtacttgtaacaaacacacaaaatactaataatgcaactatttatttatttttacagtatctatcctatttttataggtaatggttcctacaagaaaatgcaaatatggagatttaaaaaagaaaagaaaagctcaaaatacaactgttgaaaaataagttttacataaagttcaagttttcttttttgttttttgataaccacataatgttcaagttggttctcttgaaagaaaaagaaaaaaaaaaactctgtaagtcaaagttttctaggcccccaaattctgtggattggctctggatggatacacaacaaatcttacgtcatgtcataagttactgaagaaaaggatagcaatgttccttcaatgattcccaagacttttcagtgttgtcaactgtcttctccgcttccacttttttgagccataatggctccttgtccagttcagcattgatcaaagcttgtcttgatgcagtagcttttccagccaaatcttcaagattgctctgaagctgtgccttctccaccttcctttcagctagctgtctctccatatctgctatttctcgattgacttcctcagctcgattcctggtaggtatgaacttaaaagacaactgcttcagagaggttttcaactcaattactgatctcacattctgttcggcctcccttatgtcctgctctgcacccatatatcgttcacaagttttgttcaaatcatccagaaactttgttacctcatctacttcgctgtcaggaaatgaattgacagcaagcataacagaaactgcatgtttaaattcacgagttcttcctgactcgatgaagctggcaagcctcatatcaaggcattgtttaacgattttacgtgcattcgtaatctcatcatcagtgctaggcactgagttctgaaggcagctagaattaatggcctcaccagcctttacttccaaaaggctttggatatcagcaaacaaggcatcaaatgaagatagagaagaattcatttctgcttcaactaaatttggctcctaaaacaaaattcaaagaaagaaagaaaaaaaggaatgagagctctgccaaccagaataaaactaggcaccaaattaagtcagagcaacctgatgaggatggacatgcggatgaacagtaggggtgacagatgggataggtatcgttttaacatgcggggctacctgaggacaaataacttctacatgagttgcttgctcttgagtgatgttaattcttgattgtgggagccaagttacatgaacatctcgaattatagtttgcaaacgaggccgaccatcaacaaagtctccctgaacatacttgaacattagttgataaattataccgaggccaacaaaaaagcttagttgagagaatcgttaaattatatgttttcttgagatcagtcaatactaaattctgctggataggttaaatcataataggagacaaaaagattgcttacattggcttcaccagctattttggccgatcatgaaccaaacaatgaaattatcagcaattatagtgcatactgcatagtagctaggaggagcaaataccttggagttgagatactcaaagaatgatggaacatctggacaatggcattgctcgatcttttccgatttctgaaagcaaatgatgtctccatctctgagctgcataaaaggtaaaaagtgcatatgaacaagaccacaaagaaggaattaataatttataaatggtttgcagtaagaaattagcctctactagtatatatatgtcatcaatctgtaaataaatataaaggatttatatgtaccttactacaaagaaatgttaacttcttgctaatgggaacacacatggtgcaagattcagattttgtctcctgcacatttaaatgggctatatacttaaggttgtcccttgccagtgatataactagtaaaaatcatcaaatgagtgaaatcccaagttagtagttacctcaaaaagtatgattttctcattaggattgaaaccagccattttgtttaattttttcaatattctactaggcttctcgtgcagttttacaaaaagccttcctacatagctgatatagaagaaaacataagatatatatttatatgtatttatatcgataagcacatacagagaaagaaagagaaagagtaccataactcttctttccaagggtcataaagtttaaaaaataaaagaacatcctctttagattttagtggaggagcaacaggctgcaaatcctgattgtaaaaagaaaatacacaaatgacggattcgtgtttatagcaaggggaaaaacaaaaacatttatgatctaactcaaaaaattagtatgtaaagtttgattgaaaggttgaaaaaacactaccaaatcaagttctacttccagaaaaagccttagcacttcttctctctttctcttcttgtctaaataatctgtcagttctccaacctacaatagtcactagtcaatcttgtaacgaacaaaagagttcatacctcgacaagttaagacaattatacagtacttccttgattgatatcttagtcataagtacatatgatgggttcaagtagtaaattctctcaaagttgaaacaaacgcccatcagataattaaatgaattaagcggtttaaatggtcttacacgtctttgttcttccacacttgtcaaaggccttaaaggtctgtaggtatcattgtcgcgtttttcccacacccagaatcgttgaaatttcactggtacatcgaactctatggctaccttttcctgagtacaatggtgatagcagtggtaaaagtgtaaaaccttatattgtatctagataaagaaggtaaaaaaaactaccaagagcaagtacgaataacaaagataacaggcaaggatagagagaaatggagagtagacgaaataaagaaaatagactgatctgggaccaaaagataaggacaaactagagcaatgaaaaatttgacagacctcaactctccctacagcaaagctcttataaaatatcactcaacatttcgcctccaattctctcctctcatatctatacctacattaacactaacatcaccccaatcaactaagcacacaacaaactataccagctcatccaatacaaatacccattttcccttctacttcctatattctataccaattccaagtcccatcagaaggaaacagttcttgattaaaaatacatttgctgagacattgaagtaaaaattgatcagagggaatgtatcaagtgattcatatctaaaattactacaggtctatagccctgcacacacccgtatctaatacacattagaaaaagatagatgtgtgtccagtcatataaggcagggatttttcagaatatgttctgaacaaaaattaacctttataaagaaacattttaaatttataaaattaattatgaaaaaccaaactattataaaacaaatggaagaaaaggtttgaattttattattataaagcataaagagtaggtgacattataaatgatgacaagagtctaaataatatgaaaatatgagcaaatatctaaggtgagtactaaaaatgaaagaaaaataaaacagttcagccactcaaatctccaatccttgaatgttgtaactttttatatgattcaacggtgttagcagataccccatttcaattatgcgtcaccttatttgtgcatggttcatatttgccccctacagatagaaattagcccaggcttttattcaatgttggtcatttatccatatgcttgcacaaacctcctatggaacttaaatgtataggcaatttccttgagaaataggtatatttagatacaaaatagtagcaaacgcatagaataagcatgaaggatcaaaattgatagaatgggaattgattgcccaaagatcagtaccttaaatttgtagaaggtaattaggtttggaatacgaaaattacgaactttgtcatgatttacaagatcaaaatacatatcccttcctatctgtgcaatcaaatcctcgtcacgaacaacctaaaaacacgcaatgacatttgataagtcacattttgatctcatttcaaacaacaatggtataaaaaaataaaaatcatcacttgaatttaatcattttaagaaagaaaaacattgctttaggaggtttatggttacttaattcctcatccaatgctccccacaaattagacatctctacaatccccaaattataatttgcatccctttattataacctttcatttccttagtatcgtggtcttcaaggcaccttgaatcagcacaagtgtttcaattccaagtgcatattttcaaaggcctttcaccatgtgtatgtgtgtatatatatgcatgaaaaaaagtggttgaaaatcgaaaagagtaaatagtgccttaccttgatgtcagtataaggatataaggtaactcttctagtttctttctcctgtatgtcttgatctccttcacgtgataaaattcagtgtttaatatccattaaaaaaaaaaaaaaaagaatgataagataaatcatattttttcaatgatttttattattttttagaaacttcagttttt

SEQ ID NO: 58300 - DNA, 669 bp, Cannabis sativa
cggacccggactcgagactcgagacttggacttaaactcgaatccgaacccaagacccaaacccagacccgagactcagacccgggacccagacctaggacccaaacctggacctgaacccgtagttggtgttggggtcgagtgtattgaaaatatattataactttacacaatttataatacaagtcaataccaaacatagtattatattacataatactaatacaacacaatacaatacaataaaacacgatccaacacaatacaatacctcgtaccaaacgagcctttagagtcttgagacattcgcaagactataaataacacttccctttacctgtatccctaatcattagtccatacttgtatattcagaaagagattaagagaaagagaggggaagtggaaagagagttctacacaagtgagataagtcatccttgtaactcacttgtgttcttgagttgaattccttgtaacctctgtaatttgatctgataatgaagatgattatggttgttgatcaactgagatgtagagcatttcacatggcgtcgtaaatccttggtgttgttttcttagttttctgcattgctcttccttctcatttttggttttattgttttgttgtaataggttcttgaaagtgtttgtgtgtgtgtgtgtgtg

SEQ ID NO: 58301 - DNA, 939 bp, Cannabis sativa
atgggtcatctttgtaccattcaccactgacgttgatactagtgacattattctcagttattgttttcttcctacgtggattcactacaagaaatttaacatttagctacaaatattatacctatagataattatttgtaaatataagttgctatatataaatattctaattgtaggtactatttgtagataaatattactaaatactataaatttccaaaataataattcctacatgtacatatatattggtgggaaacacttttacttttaacgctcatttttctctttaattatttttcatattttacattttatttaaataaataatgcttacatgtcactaatacttcctatattatcctaagtatcgttccatttcatcatattataatataattatatttttttttatcattatgtattaatattatttaattaaaatgtataactacgagaacaaaactaaatcctaaacaattttgcagaatcactcttttctcttgaaaatgctcagccgcctcacctttgggatgaggtatatgaacccagaagatagacacctccttctcttgaaaaatgtgcatctcaaacataaatcattctctgagatgcccctttttctcaagcttttattggcccagatgcctctttcatctctatgggtcactgccattcgtgactaggcaccttctttgagttgaatcttctgttgacccttggtataatcttattttttctttctctctgtaaatgttaaagcaatattagttgaatttatttggtaattcttgttttagtacatataatttgtttatgtgctgtgaaacatctatacctcttttgaatttattggttaggtggctttgcatacttttagattgcttggttgctttgaacttttgaactgacttaaagatttcgtccaccaagcgggac

SEQ ID NO: 58302 - DNA, 1180 bp, Cannabis sativa
aaccataatattgtccgatattaatcggcctgggagaaaagcactttgatgatttgagatcaccacgggcaaaacatctttaaatcgattggccaacaccttagaaatgatcttataaagcacattacataaagatataggccgcaaatcagtcatagactccggatgttttttcttaggaataagcacaatattagtatgatttaactctcttggaaaagaaccaatgacaaagaaattcttaacaagagtaataatatcattacctacagtgctccaacatttttgataaaatcccgaggtcattccatcaggtcccagagatttatccggatgcatttggaaaagagcatgacgaacctcatcatccgtaaccggttccaacaaccggttgttgtgttcacttgtgactgccgagggaacacaatggagaacatcagtatcattcacggctgtagcagtgaataatgctgaaaaataatccaccatgaccgaaggaagccttccattccaatcaacccaaacgccatctgcatctttcaacttttgtatcgagttacgacgtcctttaaatgtagccgaagcatgaaaatatttagagttgctatccctttcacgcaaccaaagttgcttgcttctttgcttccaaaaaatctcacgctgcagtaacactttattcaagttggccgaagcctttttgaagttctctatggacacatcatcacggccccgcttccaacgttgcacctccaacttgcaatctttaattctcttaggaaagttccctgaataatcctttccccaacgccaaagaacctcaccacagttcttaaccttagccataattcctctcggttcatcattcctccaacaactctttacaatcttaaaaaacaaaggttctttcaaccaagagttttcaaagcgaaacacttgattcctagaaaccaccacttcattaactaacaccaagtttaagggagtatgatccgacgtagaaacttctaagttaaaaagtttggctaaaggaaagaagtctaaccaagattggttcaccaaggcacgatctatatgaacttccactcactccggcttgccacgactacgctcccaagtatacgggtagccatacaactcaagatcatgtaagtcacaatccaccaaagtttcattaaagccc

SEQ ID NO: 58303 - DNA, 1588 bp, Cannabis sativa
gacttgaaaagaatgttggaggaggctccatcgtcaacaatacatcttgctacggtcatgctcttgatttgtacagtaatgaccaagggtcattgtgtaggaaattgactgaagcaccatcttcttcggtgaaggagattgtgggctctataggcttttgttgcttagagcttcggtcttcaacacctaggatagcacttttgggctcgtgatggagtttccgagcgtaatgctccctagccttactggtctcacctgcaatatggggtccgccaataaggacccctaggtgtcctgctagaggtggtcgcatgggatctgcgttctaggctccttgcgccagggtttgatcatcttacacataacaatataggtggggcttgttacgccttatgaggtatttaatctcccttttcagtctttggcacacattggtgtcatggctgaagtcgttgtgatatttgttgaagttcgacatgtccctctttctcatctcctttctaataggatcgagctttcattatgggattgttccctaagtagccatgaagatggcctcaggcttctctgttaggagggtgaagcaggtatacttttcctccttatccttctgtggtgtgggggaagtgttaaacttccttttttttccactgttcctcccaaagatgttggtgctttgttggtttctagtgtttttgccactagaagtctaggaagagctgttggtttttgcttgtgcgtctggtgagtcatgagactgttggatgcctcattaccacttgttgctgacatcacccatctaggcttgtcatatggcttcgttaagtttgataaagttgttagctctataaaggagctcattcatgttcttggtagagattttttggatatctttccataagttactcaatgggagtatgcccccagtatggttgtatatcggccttcttttgtatggcctttgactttggtagccttgtccatgaacctctgggtgtagtacttcagaggttcctcttgtcgttgtttgactttgacaaggtcttctagctgcgatggtgcatgtctcgaggacaagaattttgtgtagaattcccataagaacttagcccaagagttgaaccttcttggggtgagtttaaaataccattgttgagctgtctgtgacaatgtagctaggaatatgccgcatcgcacatcaccagtaaccttttggaggtccaattgcatctcaaagtatttgatgtgagccagcgagtcttctcgcctggtatacatctttcataccagcattttgaacttaggcaggggtaaggcttttttctatgtcaagaaaggttatctccttgaccgatcaagttcaaggtctgagggcttcagagtggctatgcctttgatcatgtccctgagtttgtccaactctgcttgcacagtaggatatgttgctgtgaagacttgactgattggccctccttggggaggttgtagattctagagagataagggctggctggccataccttggaagagtgtatggtgatggttggccagacccatgttgaattgaagaccctagcaagtcattccc

SEQ ID NO: 58304 - DNA, 1691 bp, Cannabis sativa
  modified_base (1492)..(1498): a, c, t, g, unknown or other
agatgtaataatatctttcatcaacatgtcgtttatcatgaaagagttattcatatcacaacgatggtcatcaatagactagtctgaatcctgagtatacatgaactcctatttgtgtttattgagttctttatttcacttgttaaagtttctcaaataagatgattcttataacttctattgtaggagcttaataatttgagtagatgggaacatattatacaataatagaatccaagctttctgaaaggatcgaatattagttctcttatagtgttaataattttgggagtgctaacacttagatccaaatctataattaaattataaattaactgttcacgttgaattgatggtgcataaggaattaagagataattataacggtaaaacggtaattttgaacaattctaattataaactaataattagatggtgaactacttatattgattatatcaatggactactagtaagcattctataaatataattctatattgtcaaagagtgcaatttcatatttatagtggagtaataatgaaaataataaaccagattattatatagatgagattaataatagtcaagtgtattaaagcttcaaaatataggtctatggtccctaagtcacctttatacaacactgtataggagaattttaatttgatgagaaaatttgagtgagaattaatttctatgagaaataactctcaagggaaaaatagtaatttgtaaaaattattattttgaataattgtaaaaatcatgaattgtgtaattaaatagtatttaactatttaattttatttgataaaatcatattaattacttaaatataatattattcttaaataatattaaagagaaaaatatattattttagtgtaaataatatttattttaatcctattaaaataagagattaatgaaaattaatcatttattatttattgaaaaaataaataataaatcttatttgtgaaaaaattaagaaatcaattttagactttataatatgacccacacgtgtaggacctagcccacacgtgtaaagtgacatataaaggctcatgataattttattttattattttattattaaaataaatcataaaaaaattaactaattatattttaattgttggattaaatattttattgaatagtgtatttaattaaaagataatattaaaataaaatgatataattcatttctattaatcaattatatgatatttatatttgaacttaaattttaaatttgaattaaattaaatattatcttttatttaaaaggattaaataaagagtttgtttataacattatatatatgatatatattataataacaaaaaaagtgaagagaagtgaaaaagacatttaagagagaaaaatatacgatattttttaaagaaaaattagggttgaaaaatacaattgttttaccactctctctcctcactcatgcatctctctctctctctctcnnnnnnnctctctctctctctctcatgccacaaactataacagatcccacctatagtgatttgaataatattatctctacattacccgctaactaaggggaccgaacatgtataaaaatctttgcgttctttattttttaattctaattgtgtaacacgtggcaaatatcatattcatacgactctactgtcggttggcc

SEQ ID NO: 58305 - DNA, 1022 bp, Cannabis sativa
atttggttgtctgatgaaactggtttcagttaactttattatttaacatttatattttgttatgatttttcatagcgtcaaaagtttcacatggtcgaaactggtttcttaggttttaactgttctgtaatgaggttgctctatttttaagatgttattgtatatatattttttaatttgtataagatcagttttattattgtatgatattttaacaacaatttctattttattttaaataattagtttctgacacacatattattttattattttcataactacttttttttaagtaattagttttcttttattgttgttcttaattgagttttaagtttcaatttttttatttgattattccaggaaactagtttctcacattccacagttttttttttcttttatggtttttattgtatttttgtctctttaattttctttgtttccttttttctctttaattttagtttctaattctctttgttatatttgttgcatattgtatgcttaaatcaactctgatttttgaggaaacaaataaaaaattaaatatcaaaatagagaatgaagttagaagtttgattattaggtattgatataaaatttatatgttcaaatctggtttcaaatttataaaaatttggttatcaggcattgtgtattttttattatgttgttgatgaaactatttttttttttgtctcttttattataataattagtttcttttaatattaatgaaactaattaataaagttagtatcgtttttaaagattgtaatttttttcattatcttattgatgaaactatttttttattattttaatgaaattattagtttcttttaatgttgataaaactagtttctaaaattggtattatttttaaattacaattttttgtattatttttttaggatgatattgataaaactgattttttttactacttttaatgaaataattagtttctaacaaaaaaaaaaaaaaaaaaacaaaaaaaattttttttttttttt

SEQ ID NO: 58306 - DNA, 1055 bp, Cannabis sativa
tatgtatgataaaattagttgtaagctgtaactattaataaaattattaataacaagaattttacgtttggcaactaattaaagtttttggttttttttttaatgtattatattatttttaaccataatttttttttacaataaactgcgaagcaaaaaatatttttatatatatatttaatgttagtactacaaaggcaatgaaattattcaagattgaatttgactatactgtaattctgttgttatcataaacatatgcggtaacgtaacgtaatacatacaaatttgattttggtgttttctttcatttaataggactacgatccaatttgtatagtaaatgcacctgtagatacaaaacaaaactctttaaattcttaattttgttcgtttcttgcaggaactgcagaattttatacagccacgttatggtccgaacctccactatagctttatccttggatgattcctcatacttcttcatttctataataatatgattacttacatactgccttaagggcacatatccaaaattatctttacatggatctaatattaaatattcattttttcaatttttatttttacattcaaatccaagtagccaaaaacaatgaagactgccttagttactagactgatcttttatgagtgctaataataataccaataataataggaatattgtatggtagaacaaagaatatcttatccattaatcaaatatcttgtccaataagttgagaaatgcaatttacaaccttaacgtaagatgagctatcaaacttattacttaaacaatttttttttcccaatgaatgagctactttgttccctcacaaagcattaaatgacaaaaactaatttgacaaaaaatacataatttttttttttggaacagagagattccattaaaaggtatcgtacgtgtcaaaagatcaagatacaaaaaataggctgtaaaaaccgcttagtttaaatttggaaattagcagataattagggtttaatgatgaaaattatttatcgatatttaaataattatttat

SEQ ID NO: 58307 - DNA, 1379 bp, Cannabis sativa
agtggtacttaatccaattccctgtgggatcgacctcacctgtgtgagatttactacttgattgcgtatacttgcgtagtgtttataaaatatagcaacaaccaggcgtaggcagggggattatatattttgaatgaactgatagatattattagtatatgcaactcctaatgttgacttgtcttctttttgtttatctcttttgtcttctagtttttatttgtggcactcttgcattggtcatgttttaaagtcttgttaaaaaaatttagcttctaaaggaaccttaaaaaatttgcaacctcatgacatttctaattctagtggatgtaaacttgcaaatttttttactttacctttcaataaaagcacaactagttttgttgccccctttgatttaatacacccacccaaggatctaaataaaaaaatatcttttaaaatatacatattttttttataattattaaaaatactatttatttttataataagaactattttttttttttcttatgactcattttaactcaagatcgaccgtataaatgctatgattggtgtgattttttaaaaaaaaatccaaaacattaagctaagttttttttttttttttggaagaaaacattaagctaattagctaagctttaattagacttaagtacactcctttttttttttttaaaaaaaaaatggaagtacacactttttcgatataggacatgttagttcagcccactcttctcattaattcatctgcacctttaattattgtcgttagacattaataaagataacgttccttctctgtatattaataaatcgtattaaaaaaaatcttcgttggaacaaaactcatgaatgaatgtatcgatcaaaatatatacataaatatacataaatatttgacactgcacaaataataattatagtcacataatttaaataatattgtcttatttgcaaattaaatttaacattgaattactattattattatgctaaatacatttacgaagtgaagttatactcattatgctaaaactacaatcacaaattttgataatatacgaatttgtattacttaatacataataaatcatttgtattaatttgaattataatatttataaactcaagttatattgtgacaaagtaagagttagagttcgggtcttgagttacgagtcggtgtcaagggttgggttgggtccggaatcaatgttgggttttaaatttggctttagggtcgacatagttcgagttagtcggaatcttaataaggggtccaggactccagggtctgggtttggcccgtttgagtgtgatatctaggctcatgtccaaagttggcatgggtatggatttgagtgtcaaga

SEQ ID NO: 58308 - DNA, 744 bp, Cannabis sativa
ttgttgataaaacaataattaataatgtagtgaaccttgtaatgtactatgtatgttttaaatatttcaagagtaaggaagcattgaattatatttcgttcttctaacttagttttagttatgaagacatatgataaagcgattaatacaatttaattatataaaataatttttatttaatgcaacatggtaatttgtaaagatggggtgcaataatatgaagagaaagaaatgatctactaaaatatattgtgattattgaaaagaaaaaaaaaaaagttgctactatatggggaaaggagacataaataaaaacatggttttccttttttttttttcaaaaaaacatatataacagaataaagtgaataatatatatgatcactaaattacagaaatgaaataagtttttattgattttgttgagatgtaaatcagtgatgatacagtttaattaaggatggaatttaattagagaaagttaaataggagagtggaagtggtgaactgacccaactaattgtggggtcctttatcattgttgataaagacacataattgtatcggttccccacgtctaaccaacaatgccctcaactccctcatacacttttctctacaaaacaaattcttcacaaataatattaatataaattaaaaatatatatttaccacaaaatttataaaatgtaacacaaattaatatcctaagttggtttttaggaggaaatactctaggttatt

SEQ ID NO: 58309 - DNA, 1207 bp, Cannabis sativa
tattatatcaaaatataacacttataaatcttgaaaccattctaattcttttttatctatacattttggcattacacaagtaattctattttttatcagccattttgtttcctgcaagtgttttcggttgtgtagtctcctaggaccataacatttgattcctggcctgccaaatcttgtaaaccaaggcagcgatgcatgctgtgtaacagcttgccttgaatttgctcagttttggtcgatcaatccatgtcaaaatactcggcagggattcagctttgatcctccagtgcagccatatttttaattcttgtaagcagcttcgagtgtacctgcagtcaaagaacatatgcagagtgctttctgctgcattattacacagtatgcaggaagcatcagccacaatctgcaacttttgaagtctctcccttgttttcaatcgattctgcactgctatccagagaagaaaactatgctttggaacatttaacctgctccatacttgcttgctaacatggaaacttctttgttcttgatttaacatcttgtacatatttgctattttgaaatcagatgcagtaaactgatttggaggtgatagcagcttcacttcttcttttactttgacaattctataccagtaccagctactatgggcaggggcattgtactcccaccaattttcttgatcaatgtacacactatgcacccacttcacccatagattatctttcttactagtaattgcccaaacatgttttgctactgcagcctgattccattttgctatatcatgaaatccaattccaccagctttctttgatttgcaaagaatatcccaagcaatgctacttggaccattcatattgctcttccctgtccataagaagcttctacaaataatttttatctcctttatgactttctttgggaggatgaggatttggctccagtaagtatgaattgtcaagagtactgagtttatcaatactactcttcccgcaaatgacaaattcttggaactccacactttaattcttgaagtcatcttctcaactagcacagaacattcagctgaagatattctcttagcacagatttggactccgaggtatttaaaaggtacactgctcctttgaaaacctgaagcatcaatgattctctttatttcactttctgccatcccactacaataaatggctgtctt

SEQ ID NO: 58310 - DNA, 842 bp, Cannabis sativa
  modified_base (451)..(458): a, c, t, g, unknown or other
atctataactctattaaaagagagaatgttgtttttgggctttcttaaagtaaatgacaaaaatgtcattgattttcttattaattactattaaatctttctattttttttttttttttttgagagagagaattaaatccttctatttaatgggatgagaattatagtttctttaaatatattttgtttacacaaagaaaagactatagggcatagattaatgagctatatttttttttttatcattatctattagtaatatttttttttaataatatcattttataatatatatatatttcacatttcataaaacaaacctatatatatttatttgaagaaaaaaattctaaaaaaaataaaaagaaacataatgtaaatcctaatttatagagttactatatttttttattattattttataagatttaaataatttaattttaatagnnnnnnnntattaatttgaatttgaattttaagtaatttaattttaataaatttaaatctataaaatttactacaaacctacatttttcacatttgataatgaagagaggtaaaactaaagatacatattttcaatgctatgcaatcttttgataaattttgaataatttattataccaaaattaaaaataggcgcatctgtatctttattgtgtttatatgggtatgattagggatgcacaaaagctccatgggggtggggacccgcggggattttccctaatggggcggggaatctccagcttggcggggagcagggcgggtacggggttgattttcatttcccggattgggggcggggcggagtcgggtgtgttactccccgccccaat

SEQ ID NO: 58311 - DNA, 1911 bp, Cannabis sativa
  modified_base (1854)..(1884): a, c, t, g, unknown or other
ggattctctaaaaggttgctagaatggtgtccgttttagatgagctgactactatattcaatgaaaaatatcattatctcttgcctaagtgggacactgtatcagtttgttggaaactatagaaattatttagaatatgtttgtttttatattttcacatgctattcctacttgctaaatgcttaataatttttgaatgtgtaaaattttgtattgaaccttattagatttatatttattgatatttgtagtttccaatatgactatgaacaacccaattgtgtcactgttgaatgacaacaagctctctggagctaaccttgtcaaatgaaatgagaacattaatattgctctcataggtgaaaactccctgtttctgttaactgaagaagctcctgagcaccgaggtaagaatgaaaccaaggcagataatgaaaagttcaggtgttggcagaatgctaacaataaagctcaatactttatgttgtctagcatggttgaaaccttgaaaacaaggtttgccaacactctcacggctgcagaaatcatgaaccagttaactgactgtttgggatagcatcagatcaagctcattttgaggcgactaagaattttatcaatgtgcagatgaaatctcatcagaacgtgcatgatcaccttctccaaatggctagttatttccaggaagctgagaatcatggagctattatagatcgagaaactcaagtgtgtttgatcttaaatagattgactgaagctttttttccctttacttcaaattatgtcatgaacaagttgacctttgactttcatgagttaatcaacaaccttaagacatttgaaaatttgattcgaggaccgcagaaaggagaaaacaaagctccaagttctagtactactacaaattgtatgccaaagcctgacgctaacattgcctctacattaaaacgcgaaaagaagaagaaatggaagaatagcaagaagcctcttaaagctattaacacaactataaaaaggctactaatccaaaggcaaaggaaaaaggaaagtgcttctattgcaatgaaaagggccactggaaaccccagtgtcctaagtttttgacaacaaaataaggtatttataactttattataaactcatgtgttttagagaattattatcccctcaggttattaattttggatctacagaccatgtttactttcttcttatttcagctccagctacttaaacttggattgctatcttagctagttgagtcagatgactggatagaagggtggagattgtccaagttgaagatgaagctcgttatcttctttaatttttgaataaattgttttagctactgaacaatttagtttcaattattagtatggaaattctatttcctatttcatattattacagacaattcattatgacatttttgagagtattaataaaattttctctttaagaagttttcatcatgaattgcttttatgaaattgagcttcatttttctttaacttgtatgccaataccgtattatatttatatatttatcatgtttgtatgtgtttttttatttattaatgatgccaaatctatggtattttttaaactaaaagataataccacataatcacttagaatttaaattcaatgtttatgaataattgacatttcttaagaaattcttaagatttcatttaattaaaagatctttagatttgataggggtggaagaagttaagaagtaatattttcagttcaaagatcttttatatctattgaactctagattatattcaaaactccatagaatgtaacaccttaactaacgtagacgtattacgtgatttttannnnnnnnnnnnnnnnnnnnnnnnnnnnnnnaggtttatggaaaacgtgattaattaa

SEQ ID NO: 58312 - DNA, 652 bp, Cannabis sativa
gagacactacatttgacactaattacatcattagctaactaatcatttcttaacaccacccctcaagcgagagggtgattgtgtcactccgagcttgtcaacaagaaattggaaccttgaatgagagagtcctttggtaaggcagtcagcgatttggtctgaagaaggcacatatctgatgtcgaggtgcttttgaagcaccttgtctctaacatagtgaatgtctaactcaatatgttttgtccttccatgataaacgggatttgcagccaaggtactcgcactcatgttgtcacaccacacaactgagacagaattcagaggaaatttcatttctttgagtaggaactcaagccaagttatctcagctgtgacatgagctaaggctctgtattctgattcagtactcgaacgagatactacagactgtttctttgatgaccaagacaccagtgtttccccaaagtagacacaataacctccaattgattttctgtcatctcagagggcagcaagcccaaaatcagcatcagagaatcctgtcaagcttaagttgtcactatgctgaatatgaataccatgatgttgtgtccctttcaagtatctcagtattctcttggcaccactgtagtgaactgtggtaggactcttg

SEQ ID NO: 58313 - DNA, 650 bp, Cannabis sativa
cgcaccagagttattgttgctatgtttccagcgagatgtcccagcatgatacactttgcaacgtatttaatatacacatgcattgacctggtaaaagcggaccaatcacagctgtgtgattctcaaataataaccgcatttatgttacgtgggacataatcacatcccatgatttcaggggattattgttgtgggatatccgtctgatttgtaattaactgccctcctatgtaactaaaaataggagcagaatacactaacaaagggacgaaaaatccttgagagacaaagccctgtgcaaatccatcacgatttaggctttaatatagttaacgaaaatctgcgttaacaattacaaatataaaattagatattaaaaacatataattaaaaaaatagtatttacattgataattaaaaagtatttcgatcgaactaatatacaaacatgattgatttgtgctaaaattagtaagtaatgaaaagttctaaagttaatagtaaataaataaaaaattgaaatatattcagaaaaaaaaaattacgttctaaagtcaattataaaagggatattggcggctaaaccacctgaactttacggtttataacacttaaccacaaaaactaaatttttggcagctaaactacct

SEQ ID NO: 58314 - DNA, 1531 bp, Cannabis sativa
attatcatcttcttcttcttcttcatgttgttcttgttctgcaaatattttagaaggaaaggtgtttgataatatgtccatgagaacagaacagagaaaaaaaaacaagaaagaaattaattaattattattgtggttgtgaaattaatttgaaatttgcaatctctattgctgtttgtaaattctttctaactattgaaattgttgaatgattgttcaagtattaaaccgtgctcccaaacttgaatatgtatcaaattatacattcatgaaatatcatctacatcatgtttctgttagtaaaattagaaataaaaatcttttaattaaacaatctcaacagagaagaaaaaacagtggtcctgaattaaatttgtgtaagtttaatttatttatagatgctgatatttggtctgaaagaagagggttttgtggttgtgaatgtgatgagtagggacgacatggactgcagtggctcacattataacaggtgtgataggagctggtgtgttgtcactttcatggagtgtggctcagttgggttggattggagggcctttagctatggtgttgtttgcagccacaaccattgtttcaacacaacttatttctgatttttacagatatcctcatcctcattttggtcctgctcgctgcccttcttacatgcaagctgtccatttgtatttaggtgagcaaaactctatgtaattaaattagtaagtgttcatgaatcatgatataactctcaaatggttagtagtgacactcatagatttttttgttactaattacagatctcttataatctatatggatatgattcgatttagaatgaattatatctactttttcttacaaatcattaaataataataataaataatgataataatattttgaaggagagaaatggaagtatgtgtgtggagtgtttgtgcaacagaacttgtgtggaagtgggattgtttataccattacagcagccaccagtatcaggtctgttactaaattttctctttctttactttctattctagtcatcaaaatttatatagatatatatttttatatatatacgagaagtgtaatctcttagttaatctctgtattcgaaaatgtatgtcaaattttttttttaaatttttttttttatgattgtgctcgttatagttacaacatcattcttgtaaatttttgaaaaatttcaaagaatttacagtaccaaaaataagtttaaaatttttttaacacgcgtggtagattaaaatatcattaactttatttttaataatgtaaactatttaaaaattttcaaaaatttacagggatgatattgtaactataacgactatcactatgaaaaaaaatattttaacatgtaattttagacgtaaaaattcactaataaaaaattataatagaaggttataattagtacgcttcatatattttaagcattttaagcattttttttatgttgatgcagagccattcgacgatcgagctgttaccatgaaggaggggaaca

SEQ ID NO: 58315 - DNA, 698 bp, Cannabis sativa
gtaaactttattatgcggatgttttcttacattttattcacaatataaactatcacatgcataaagtttattaggggtttccattgattgtcctttcttccgacgttaagtagttaatttcctactttacgtgcgagcagcttatctgcccgttcctcaatctgcaagccatcatcaattccatctcgcgatcattagaaatgatcttattttaagcacattcaaatatatctttaatgagaagttaaaattttgacccacgtgttgggtttaagtattttttcaagacatttggatgtctcgttcaatactttcccttagcgcgagttgttagtattcaactttatgcgctagtcataacttttgattttcctttctcgtcagataggttataaataaaaaatttcagttgtttgatccctttctcgtcagaaatgtttaatcaaggcgttataacgattcgacccctcttctgtcgaaaaggtttggtcagggagttataacagttcgacccctcttccatcaaaaaggtttggtcgaggcccttttttattgaaatgatgggttcgcattgtactatgtatttcccgatccattccggttaatcatacatatatgcccctcaagtaattttaaagggtttacactttataattacttgtttgaaagaaatgattattttattcacaactgaaatt

SEQ ID NO: 58316 - DNA, 818 bp, Cannabis sativa
ccccattaggggcgggtccccgcactcaaaaagaggacatgctcagtgtgattgtaaaccaaagcccccatacctatttcctggtcttcataacgaatcccatcatccacaaaaatgttgaactcgccaagaaccagatcaatctcaatagaagacttttcattgcccacattgttagaagacggacccatagaagctaacccaccaatattagcatcttggtatttccaaagatagtccatggccccaagcactaaccatattgtcggagaggagtttatgatcacgtacaaaggtatttcacctgtgccaaatacgccagccaagggtaatgaactgctcaagttcctgtctactcaagatatccacacaacccaacaataattcataatagcaagaggcgtccttcaaggagtcaaggccacacaaaaaccaatctgaatggatagacttaagagaaggacagagccaaagagcatgaatagtagtcttattattctgaaaacaaattggacaaattatagatgccttcataccacggcgagttaaattggcataagacgggatgaagttcagacttgccttccacacaaaatttttaatctttggtggaagattaagctgccaaagtagcttccaccaccgagaagtccttgaggagcctgaagcttgaccccaccccaaactagacattgtgctccaataaccactcttcaccgaaaaagatatgttattagaaaagtggcaaataagcctatcttggaaatcaaacaaagagtcctgttaggttatttttagtattaattttagattaagtt

SEQ ID NO: 58317 - DNA, 1544 bp, Cannabis sativa
agggcataaaacccaacaggcctaccgacaaaaggtagcaaggcacttcaacaagcaagtcaaggataggaaattcttcataagagacctggtgctctgaagagtgttcctcaacaccaaagatccagcagcaggagtgttcagactcaactggaaaggcccctatcaaattacagacataactagtaagggagcctacaagctgggaagctacaacaataacatagagctcgttctcctaccaagatactggaatggagagcacctttacaaatactatcagtaaccagcttatagaatactacacaaagtagcagttctacctactcaacattagagtgtaaaagagctagtacccacgatatttttggtatggactctcactgttcttcaatgagggcctctgctatgcaagtcaagcaggggtagccacctgatatctagaagaaaaactttgttatgtaagcttttagattcaatttatgtaaatttcacaacaacaaagactaattaatgaataaataacaatgtttatgttcaaattattgtgtctaaaccacttgataataagattaacttctcaaagttattctttttcagttccacatgcatacaacaggtagcaccgtaagaaaattcctagacaaggtctatgaaacttggtgaattgcaagtgaccaagagaccgtaagtcagcttgttcacttggggggaacccacaccatacaatacattaaactagcatagagaacttatgcaaagaaattttaacgcttaaaataagctattaaacctgcctctaggtcaggtgcagacatacttcaacttgacataaagaaaaataaatccaaatacttacatgtcaaggccataagaagatagctaggattaaagagcgtctggtcagtcacacaatccatgataaaaagaaacaggaccaaacaatagtaatgttcaaaaagagagggcctataggcaaaaagtacaacacatgaaggccctagagctgaatataagtagtgttcaaaaagtaaaaggctacaggccataccgaacatgaaaatactatctatactatataactataatgctaaaaatttatcactggtttagaaaaattgtcccttgtgttccttgcagctgagaagctggtgccatggctaaaatgagatcaaaaattcaagggaaatctagatctgttatcaagaaagtgaagaataaaagagtgggattgactacggatgagattcgttctagtcagatcactgaaaatgatgaaatttaacctcaggagatgtcggatgaggaagatatcgatatagtagatcctactcttgttgatgttttccaacctccattatcgcctggagcatcactgaagtcgatccagagataggaagaaattagaaatgactttctgtagttcctcaaggcaaataaccaatgtaacagtgatttgcagcaaggtaagaactcaattcctcctgttttacgctctggttcagttgttcgcaatctcaaaaactctttcaagcttgatgaac

SEQ ID NO: 58318 - DNA, 523 bp, Cannabis sativa
cattggttttgagatggaaccccaagtgctatgttcttcaaaattcaataagtaaaatccaataaagtctttctttgaaatcttgtcaatcagttgcctctctaggcaatccatgtccacaggaggagtcaaagcagagtaattagaatcgtgaaaagtcctttggtactcgccaagttgcaccaccatcttgccccccaccaccttcgtctacatctccatcatcgcctccttctctttgttccccaaaaaccccatcaattattcgtccctgattagtttctgcttgccttggaaactgagaatgcataactcctaattagaatttacttacatcacactaataaaatacacacaatactgaaaagaaatattacaatttcgtttactatattagttgccggttgagggttcttccaggacagcagtgtaggagttttggtaaatctgcacacagcttttaaaagtttcagtattgaaattgtaagaaataatctggtacaaattagagagtagcttcaat

SEQ ID NO: 58319 - DNA, 2262 bp, Cannabis sativa
cccaaaaagttaaacatgttatgttactgggccactttaatatatcttattcaaataatttttaaaaagtaaccatccaatatacatatataataatgataataataataataatattaataacaataataataataatataagcataataataatttttaagtagctaattattaacattattaccttaatggtttcaagttcaaatcctcaattcttctatatatatcagtgttaagatatctccttccaaaatatgtatgtaaaaaatcttactttaatcgcacaaaaatttctaaaaataaaaaattcgtgactaattataaattattatttttatgtcgtgataaaaaaattcgtgactaaatgtattagttacaaacattacgatttgtgactaaatgtatttttagtcataatatttattgtgactaaaattaaattagtgacaatttgtatttaaatattatgtttttgtcacaagtaattttttattgtaactaaaaatcacatttaattacaaaaaatttgtattgtgattaaaaggttgtgactaaagtatttttttagtatatatacatatattaatattgatgtggcaattttttaattattcatatttatttaaattggcattaaatccactattttaaaaatgatgtcaaattactatttttaatgttttgtttggattcatattttagatatatattgtatatctaatgtttcatcgtatatataatatatccattattgactatcattttctagattgcatgttgctcttttgggtttttccttttctaattaaaaaacaaaaagtatcactagctaatattattcaataaatagtactttaatataattaatctgctaaaaaaacactatttgttagaatatggagaagtgtattgttgaggaagtaagaataagtgagtatatagtaaagtgcatgagattttatctcataattaattgacaatgaaagtagtagttcatgtgttttaggtattgtatttagtttttatacattaattatgtgagattctctaacatccacctcaagatggtacgtagctattttttactcatttatcttgcacaattcaatcacaaataattcttttggcttttctttttatattagtttttggaattaaattagatactcgttaaagtttagtttgactctaaaactatgttagaattgtaaagatacatgtagtagtatctcaacattaattgacaataaaaagagtagcccacacataccacttatttcatacattattaatataaaattcgctaacactattacacatatacttatttaaaaattgtgaaccaaagagttgtacatagatgcatacttaaataagaaacattatatttttcttaagaaaattaaatattatattatttagctatagctagtaactaattattagaatacaattaatttccatgtgcttgttgtaattaagatccatttcacactggggatcttcttaatggttatttttgtttttccacttattcccttttaaaattcatcaccccttttttggggtcatatatataaaataaaataaagtgaccaaaaaaataatgtgttgtgtagtgtagtagcaggaatttattttattggcatccttacttgtttgggtcaagggattcgaaacccactccaatcctttttaaaagtaattaaagaaaggtttaatccttgctggaggtggtgtcatatgtgtgataaaaactctaaaggtgactattgataactcaattaaagtaggttgaagtttaatataagacctttatagctaacacgtggagtggagaaaaaatctgtaccacgtgatctcttttttcacataaaataaataaataaagtgatcaaaaaatttttgttattatttgcagctgtcggcatgaaattgatccatcgttaccaattcctaatttttaatagaaaaggtccattatgctaccttccatacaaaaactaccaaaaccatttaatagtttacattattaattgtttgctaaaaagtttttggtacatattttattttccaaatagaagactttttttcaaaattgttagttcaaaaataataaaaagtccatgtcttctctcttcatgatcagttattttaaggggccacaacttcttgtgactttttttcttcttcctcttctttggcatttatctaaatgatacatatttaataccaaaccatgagagagagagagagagag

SEQ ID NO: 58320 - DNA, 798 bp, Cannabis sativa
tgtatattaatatttaatacaaaaatagttaaaaataaatatttaatgtaaattaatttttgtaataaaataattcaatttgtaattattattatttaaaattgatatgtatcagtgatgatttagtcatcatttatatataataaatgacgactaagtactaagtcgtgattaatagctagtctagcatttttttaaaaaaaaaatattagcatattattaatgatgatattgttgtcactaatatttatttttagtgacgactttgaatgttgtcctgaatacttttactcacgagttatcaccgtcgactttttactgacaacatgtcatcgttggtagtcatcactcacgaaaaagacacccgtcattgatgaaatttgtcctattgaaacctatttttttcttgtagtataataatagtataaaaaatcatttatttgcaaaaaaataaataatataaaaaattgctatctaattattgaatgtcatgtcgacatagtattagacatcttataaatatgccaaataacaatactctattaataatagtacaaaaaagttattaaacaaaaaaaaaaaccaaagatcattcaaaatttgaaaaaatagtaaggatcattcttaaaaaaaaaaaaaaacaaaacaaaaataaaaatatcacaaagacaaaataacttggcaaaatcatttatttagaagacagtaagtattttatatgtatgcacgtacatgcatgcatacgtatactatacacaaaaccccatgcagtatatataagggtggtaaaacaggttt

SEQ ID NO: 58321 - DNA, 1373 bp, Cannabis sativa
aaaaaaataaggaggttaagtgtataaaaattaaaatataagggagttttgccaccaaaaaaagataagggggttaagtgtataaaaagtaaaataaaaggaggtttcgccgcaaatttctctatataaaataaggtgtttctgcaatgcaccctcttaaaaggaatgtactaatgcactctttacctatttcggtatctagaaaaaaaaaaaattagtctaattttttatatattcgtgtacattatagttatttaagatatccaataaaattttaagaaatttagaataatttagaatatagaaagcagtgttcaaacaatctatttcacacacatataaaataaaatagtcatatgtgcaacatactgtttaaaccctatttttgacgtgttgaatttttttgaatttcttaaaattttgcagaatgtcttaaataattataacgtacatgaccataagaaaaaatttaactaaaaatgatttcggatatcaaaatagatagggttgcatcgatgcatcccttttaatgggtgcattgtagggctgaacatcaggcgggttggccaggtttcgagcctaaaaaatggaacccaaacctgctcattcaaaggattcaggttcgcgggttcaggttgacacaatcaacatttttttatcactagaaaaagaaaaacatttcaatccaaagtaaaaacgtaaatccaataatccaaaaccaaacaaattattcgtcaaacttatgttcattgttcatgaaaatcatgaatgatgaacatgaatgaacatggaaacaaaaactaaaagtgttaaaataaattgtgacttaaaattcaaagtccatactccatagtctatccatacattccgtactagttattgtttaccatcgttcatacatatatcgatatctataaaaatttctaaattaaaaaaagtatttataaattggaaatttgattaattatgcttacattagggaaaaattaattccctaaacttatacttatcactattaaaaataaataggtatacaaatatttgaatacccaaaatgccccttatacacacataatccatcccacccttctctcttcactctctttctttcaacctcattttctctcctcctctttaacaattcaaactaaaattttatttttagttgtaaataaaactctctaagctactacaaagtgttagaagttaaaggctttggtgtgagattccattttgaggcaaccaacaatttttggcaaaaatcaatgagtaagtgattttttttttttgtttttggttcttatatttagtttagaatattgctttcataattaatctgtagattttttctatttttctattgttttgtgttt

SEQ ID NO: 58322 - DNA, 1013 bp, Cannabis sativa
tttaatgatatcacatatgaaggaataagttgccacttttggtgtgggaaaaggaaatttcaaagagtaattggtattcgtatcccaatatttatactcttcatgtaaaggttacacctttacctaatctacagaggggataggctatagtgtcattccaaattaggtaaccgtcttgagcgcacttcttggccacatggcaggtaaaagatctgcggtattaagtgacccaaaagcatccgagatcaacttacaccgctcttatagacaatgcccatgtccaagactacatgtacacccagactcctccggatctggtgtgttcttatttccttcgcatgttgcttgtatgcagagaagacgccaggcctctccataggataacaacctaggcttgcaaaggctcatctttccagaataatctttaagatatcatttcacaaattatgttgactcatcttcatgacgacatgtcactgtcatatatctgtccatggtggtaacacacgtgcttcaggaaacaaggacaacatactttctgtatcttagtagtttttctacgaaatttaaaaattaagtattatttatcaatcaacatgctaatggaaaaatctatagtacactccctgaagtttcaataaactcttcatatattttggcatcaaaaatagtcttcatatttcagagacggagtaatatttatcgcttataattaatctcatcatccgccactgaaagctattagtgatgggaattcgtcaccattgtcttgtcactagtagtttaatgcaaataatgattattagtggcagaaacaagctacatccctaatagtctattattagcggcgaataatagcaacaaggttcgctgctaatatatatttattaattacttttgaattagtattgttataattctatttttaaatgataacaaatattaaaatacaatcaaaataattgtaacatttgaagagtattcatttttttcacattctaaaacacaatccc

SEQ ID NO: 58323 - DNA, 1100 bp, Cannabis sativa
attttacaagaaaggaatcttaaagtttgatattgttgatttggtatatttgtaaactaaaattttgataatattagtattcaccaaaaaaaaaagacatttttttaatctccaccgtatttgttactggtgaagaatttgactttaaaaaatatgtcatttattatcagtccataaaaacaaataaaattaaaaaagctttagtattaattatattttttataaatatatatttttgaatatttcactttgtccttaaaaaattaacatcttttatttacattcttatatatttttatatttaccttcataaaatttacattttctatttttattcttataaaatttatatttctcaattttattcttacatatttttatttttatcccactaaaatttatattcttctcaattaaaattatatttttgcattattagtactctaatctttttactacccccactaaaaaatatggctggctccacaacttattatatatataaatatatattttttagatatcatatattataatatatattaaaaaaaattatctcacattattcatgggtgatttattataaatttaaattatgtttaccaaaatatataatcctatcataaagtctgtaattattgaaatttatcaaagtagaaaaagaaaatactatgtatttttttagggaagaattaatatcatgtatatatatataatatatatacactgttatttaatcatgatatacaatgttaatgtttttttttttttgaaagcatatacaatgttaatgttaattagcgtttatttgttttttttttaaaaaaagacaccttattttattatttttatcttacaattaatatatatttctagtttagatttaattataataaaaaatattattaacagtatacgtaattttgtttcgtcattgctgttaataaataataaattaattatgtgattatatattgtttaatcggagtctttcaatataattttcttatgtcaaattgatccaaataataaacaaataaaaaatattagaaatgccgtcgtcaacatgcattattatacatacataaacataattatta

SEQ ID NO: 58324 - DNA, 739 bp, Cannabis sativa
taaatagatctattaccattgttgttgtcgttgcttagttactgaatttttaaacaaaaactactaaaacttatataaaactaaaatttacgtggctcgacacgtaagtctcatctagtttatataaatgcgtcaaaaataatttccaagtggatcatatcaccttatcttaactttctcaatcagtcttgatatccaaaaccttaattcaaattaaatcaaatactacagctaattgttttgatgttgaactctctctctctctctctctaaagcttaaaaaaatgtgacttaattattctatatatatatatattataaaattacttatttggtgatcatgatcttatataaaacatatataatataatttagctaattcaagaaattttgtttgatattaattaattatttgatcttccaactgtaacattttcaagccatttttgtaaaaaataattaagtcctatattgatcacattcttcatttattatcattattgataataattaagttttttttcttcatgatattcggctataataattcgtagatcgatatttgtataattaatgcggtcaaaagtcaaatttagtcagtctcgtgtgctaatttgtatcaaaatttctgaatataataatttacagcttcttgaagcaattttatacatacataagtaaattaatattactcaataataatcaattcatgttgtaaatattttcttttaattaaatt

SEQ ID NO: 58325 - DNA, 640 bp, Cannabis sativa
gagagtcctcctgcgagtccaactacccagaaagtggtggctgcaaattaaaaaatacaaaaaataaatcaaattcaaatttgtgtttatttattttgttattataatcaatatttactgtaatactagtctttttttagacattatttacaatattacgtgtttataaaaaataaaataaataatttaataaaattgattaaaagttagaataagtttttacaaaaaaaaaaaaaaaacatactaaatattttgttattataaaataaatatttgttatctatttcattatgacttattataaattaaaaatggtaaaatataaaagtaaaaattataaagagtaatatatataaacttcataactttatttaaataatcttttaaatttttactattattaaaaattatgttaaaaatatgttttaatgaaaaaattaaataatataaaactgaaattgtaacaccataaaatctgaaaatttttaaatatttttttattataatataaatgtttatgatctatttaatatgatttattataattttttttattttataatttatttattataaaaataatttatttttctttttcaataaataaatatgttttaaaataaaattaaataaataataa

SEQ ID NO: 58326 - DNA, 1374 bp, Cannabis sativa
atctactcacagataacaacattaatcatacaatttattcctttgacaacattgccgatggtgaaattgtgattgatagagaagtcgctagatttgcagtggtcattacgtccgtgggtccttgggttagtggtcgtggagagaagggaccaatattgtgggtggtgagttgtggatttgagtccttggagtgagttcagagagcaagagaaataagggaggaagaaagagggttaagtctttgaaatggaaaaggtaaaattgtgttaaatttggccaaatttaataagatataagactatttccaatgcatagtaaaaatttaattgtaaatttaactcaaaaattgctcaatattatatttggtttaaattttgtactgtgctccaatgcacaagatatatattaactctcaaagtcaacatagttattaattttttattgaaactatataaaatattatttgaattaataaataaaaggggaattactccatgtactattttttaatttttttttttaaaatttacaatttgggttgctctagtagtttctatgtatattgctatgtaaattttggttgcaatttaagttattttgctagttgctatgtgtgttgcaatgtaaattttcctaaaaatatacaaaaaattactttaaagtataaaaataataataaagaaaaacctctagataaaatattaaaaaaaaattaattagtaaaaagtaccaattagtggcaactgagattataaaaaaggtaacattacttgtggtgtaaatttaatcaatgctaatttttatgccaaatttaggatactattgaagcttagttttttttttaaaaaaaatgggctaaaatatagcaatacacttgttaggttatttttattaggttatttttagtattaaatttagattaattttagcatattttttatttagtttaaatcatgtttgaagcatttttacgctttttatcttttaattttgtaaatttaaaatagatgaatagttggaaaatatcaattaataaaagatagaatatcgcataaaaaatatcaaagtggaaaaaaatcaaattcaagcccagaaaaagataaatcacatggaatatggagtagtggagcacacgggccgcgacccagctttagtgtgtcgtggcccgcttacgtggaaaatcaaaataattatctcaggaaggccacacgggccgcggcacagatttagcatgtcgcggcccgcctctgtatctgcagcaaaaatatcgtgggttctggaggtttctcaaattcaaatccgaattggaatttaaacatgtgcgttttatctatcttttgaggccctcaatgcctatataaagggaagaagaga

SEQ ID NO: 58327 - DNA, 851 bp, Cannabis sativa
ccaggctaaggatatgccaatatgcaacaactgaatattccattattaaagccatgctactatctccactcattcattttttttattcattaatgatatagtgatgttaaaaggtactaatagtataagtatagttggtattattgtaggtataattgaatattaaattttatataatttaatttaataattattattaaatatgctaattatttataaaatattaattttaggtagtactaaacactattagtgactaatagtaatacttttaatattagagaaatgttaaaaggtactagtgctgctttccaatatgttaatattgttgttagtacaattaagtatcgcgttctatataatttaatgtaataatttttaaagagtatcactaactaattgtaaagtaacacgttcagaaagtgctagacactactagtagttaatatcaatgttccttagagcactcccaataacttttctactctatccttcaaaatatgttattatcaaaattttattttctatatttttttctctaaatcctttaaatataatatttttatatacttttatgctaattaaaataattaaataattaaataaaaaggaaaggaaaggactaaggagagagaaactaataaaaaaaataaatgaagagcttcagcttcttagagcactcacaacaagtgaggtataatagctaaacggtaaaataaaatagctaagaatttaaaattgagctccatctgctttaaactcttagctattatacatattttcaaactccaagaaactcttctctacatataactcaatgaatagtgaagaggtaaacatattttatattt

SEQ ID NO: 58328 - DNA, 1048 bp, Cannabis sativa
  modified_base (1016)..(1021): a, c, t, g, unknown or other
caaaaatatggcacaatgaactacttggaaacgatggaatgaagaacacacgttcacgaaaccactgcttctcgggtcgggtttccgattctcatccaagtttgcgattttgggccttggccccaatatgaaaaatattagggagaaattgaaaaatgcctttttatttaattaattaaccaaatctgccttcattttggatttaattgaaacttacctctttttatgggtatagtacccaaaatacccttgccacaatcacgattaacttcatgaacacaagtgactcagtagccattgttcgccatcaccatcgcatatttttcgtgactcttttgccactgccagcaaccgtccgccactgccagcaacagtccgccactgccagcaacagtccgccacctccatcaccaccatcaacgttgtacctcagcaattgcaatcttaagtctcatcagtgagtcaaatataatttataatctttctgaatttgattattttcattattttagtctggtttctctcttcaagtatatttccttcttatttgtactgacttaatactctaaacactgtgtaaatttgtatataaaaatgtattaatgctaatggatactattttgtaaggctttgatttatttgaattgattgtctttgagatttacgataatgattcacaatagcttaactctaacgacaggactcgataaggattcaaatagtgagtactagcagctatggtggcttgcagtgtcggactctgatagaacgagaattgctagtgggtgttaatattgggatgggaaaagtattgtgttaataagtttgaaacaggggcataattggtattatacttgaaaaagagggtataaatttaataattttaaaaatgaggtaaaaatgagatgtactgtgttaaaaaggctatagcatgtaattttattatcactccaataaacatttgaggtaagttgaaaaataccacttttagtaatcaattaatcaaatttacctcnnnnnntatatttaattgaaacatacctctttt

SEQ ID NO: 58329 - DNA, 3758 bp, Cannabis sativa
  modified_base (3677)..(3680): a, c, t, g, unknown or other
cagcaagaaaagctacaagataaaaaaaatcatagaaagtaatagcaaatttcagtacaacagattatacatgtcaataggtcatactctttcaacatacatatacgattcaacatctatatgaacaaacttattgcaaaattaagagtatttatagctatacataatcaacaacctcattgtttcataaatacttactttcaatgcttcataaagcactctagttcatacattagcatatccacacaatttcagtgcttcaaaagcactctaatcatatatgattagaaccatgtattcttacatccctaggccactgagactgcaagaaaaatgaccaatttcataagcaatataacattcattcaatcatactacagcagaaatgtactcaattacaattcatcacataatattacgcttgatccatttcacaacatcgtaaccacccaatttcggtacttcataaactacccttacatatgtcactatcgttgcccaatacagcaaacgataagtaagaaacctatctgcggtttaggagtaattattcataacagtaatgaccgcttccaatcctcaccactcgttaaccacgagctgcgtatgtcgctatcattgcccgataaagcgaacgataagtaagaaacctaactgcggttttaggagtaattactcataacggtaatgaccgtttccaatcctcaccactcgttaaccgcgagctgtgtatgtcactattgttgcccaataaagtgaacgataagtaagaaacctaaccgcggtttcaggagtaattactcataacggtaatgatcatttcttaattcattcacaacaacggtgataatcgtgttcttccattaatcataaacaattcacaaacaaaaataatcatttctcatcattacctcagttaccgtcgagtcgcaacaactacatattattaatgttgatcaagatcgagtcactacaaatacatatcgttaatcttgatcttattgaggcactaacgattataaccaattcatatttagctacttaacggtacattaaactttcttaccttagtccagaaatttagcgtacatgctgaccttaagtggaatcaaagcttgatgatcccgggtcctatgtcacaacaacaaagctcaattaacagcttattccaaactttggaataaccctaactttgtaaccggacataactaacactccactgattctgaataatttaagcatcattaaaatatcctattctaagctctgggaaacaccccaaacaaaaccagtttccaagcctaaaactaggttttcccctgctgccaaaaccagttgaccggtttcactatgcctttgaaatcggttaaccgattttccctgctgcagaaatgagaaaaccctggtttgttgctccaaaacccaaccaaatctcttctaaacctgttcaaactttccggaatagctttataacataaaaatcagataaccaaacattcaaaacttaacaacacctcagattaacaaaatcaccatgcttgagtgaactttgagttcataaactcaattcttaaagatttcaaacttaacagccctagaatcatcaaattcaaacttaaacaaccttgaatcaaacgtagaaatcattctctgaattcaatttaaacctacagccacgaaatcctaaaaccctagtctaaaaccaacctaaaaacttgaaaatcttaagcccacatagcaagaatcttacctcaaagcctctaggttgaacttagatacaaaaatctgctggaattcaaggaaaatgatgaagaattttcccttggttggctggcttctagcttggagagggagggatgaggcaattaggtgtttcttttgtttctaagttaataacttataaccttcaaaaatattcagcatttaactaacattaattaaataaaattcagaccaattaacattaaaaaataaagtgaaattaacctaagaaatgaccatattacccatcttgataaaacttaaactatactatacttaagggtatttgagtaatttctaactaatccgccaaactgacaacttagaattttaaactagtctggtttaattccaattcaactcatcctttaatgtcgtgacatttctgaccactccgtcaagttcccacggccgccgacccaaaaatatttatttttaaaaaaaaatggtttttacaatacccctataatccgataaaatcttcgtaagtaataaattacgctttatttattcatttacccaaatttcactaattaactagtaattagcttaagtaagattataatcttactctaatatccatatatttacatatttaataaaatatgtccaaataaatatcaataaaatttttgggatttaacatgtaatataaattattccattatttatcgtgattaacaatatttttgtttcataaaaaaaaaagggcaattttcatttatatacaagtagatgaataatattttaaaaaatgtgcaaaaaaatagaattacataattctatagaattttatgaatatttacaaataaacatatatgtttacaattttaacttattgattactttcaattgattttttttaaaaaaacgcataaaactaaatatgtaaatataaaagttaatatttatattttgatatattactaaaataatatgtttactaaaatataatatgaaattaaaaaagaatatacaaacacatttataaattttatttatattttataaacaatgcatatatatgtttattaaatatttgattggtattattaatgtttataatgttatcattaatctagtatgtttattatgataataaatataatttatttattaaaatatcataataatttgaaaaataaaacacttaagtttatttatttatttatttgaataaacactttgaataacacttatgtttattagttattgaaaaatatatttaaaaaaataaaagaaattgtaattaaatgtggtcttatgtataaacactatgtttatattattattgataatgtttattaattataaatctaatatatttgttatgataatgtttgttgatgatatgttttttttttgaccaagtgtgtgataatatgttgatataatgtgttttttaaaatttaaatgcaaatttataaataaaacatgtgtgtttattgtttatttttaccatatatagtttatgcataaaaattaagaatatatttctcatagttaataaaatatataataatttgtaaataattttttatgcacatataatgtaattaagtactataatgtacataaaattataaatttcccgaaaaaaaaaatcagagagagcaattaagttcaaactactcaaaaacttgttgattattattttcaaccccttctaacactttgaaccaacaaccgagttttcgatactcttataaacacaacccaatgttaattggctagcggtgagcaaatattaaatcatctaagttgtattttcaaccatgctattgaaattatgaaaatgttagttcaaagttccaacatgcctaacttgaccaaataagttgttctaaaagttttataaaattgttcatgtaatatcccgaaaaataatttggtatttaattggacatattttattnnnnatgtaattattttggtaatgaagtaagattatgatcttacttagattaattagcgtggatttattaaatgatcaaata

SEQ ID NO: 58330 - DNA, 1500 bp, Cannabis sativa
gttgataagacgactgcggggattaatggaaataaagtggcccccgagaatggccacttaccccaacaagagggacaaagggcggtactgcgcctttcacggaaaacatggtcacgcaacttacgaatgcaggcagttgaagattgagatcaatctccaccaccgtacattaagaaaaccgtgaacgtgatctcgggagggtcacacctaagcgggaattcagtacaagcttcaatggcacacgcccgtagggtccagtcggtaagggagatggcggtaatcgacagcgatgggccagacgtactcttatccttcaaccaaggggaagcctccgtattggaacacccccacgatgacgctcgtgtcatcactctggacgtagcccacattcgaatgaaatgcatgctcgtcgacactggaagctcagcaaacattttatttgccggagttctgaaagaaatggaaatcgaggatttaaaaggccaggacactcacgtcacactagtagggttctcaggggaaagcgttgtcgctcgaagtttcgtccaactacccgtctacgcgaacggagtcaacaaatcagtaaagtttccaattgtggactgcccgtcggcctacaacgtcatccttggcagaccatggatccatgcaatgaaggcggttgcgtcatcctaccatcaagtaatcaagttcccctgtaagggtgaggtaagagagattcgaggggaccaattaggggcccacgagtgttacacctcatccttgaggagtaaaaacaagttatagcaattagttaactcctcgagcccggcgaaagaacagtcacccgcggtagaggagttgcaggaagtacccatacacccgacggacccaacaaaaacaacctatatcgacatgggacttaccggagaccggaagaatcaaatcgtaggattattaaaagaatatttccaagtattttcgtaggaacactcggacatgcctgggatagatccggccataattactcacagattgaatgtaaacccgaattacatcccggttaagcagaagagaagaaaaatgggggaagatcgaaacaagacagtaaatgatgaagtcgcaaaaatgctagaaaatgaccagaggaggtacaatatccaacgctcgccaacctcgtggtagttcccaaaaagaatggaaagtggagagtgtgtatagatttcactgatttaaacaaagcttgtccaaaggacagtttcccactgccgcacatcgacatgataatcgacgccaccgcgagacacgaactaatgagtttcatggatgccttctctggatataatcaaataatgatgcaccctcctaatcgagataaaacatcattcatcactgagagggggacatactgttacgaagtgatgccttttggacttgaaaacgtcggggcaacgtatcagcgaatggtgaacaaaatgttcgcccaacagttaggtctgactgtggaagcctacattgatg

SEQ ID NO: 58331 - DNA, 723 bp, Cannabis sativa
taatatacacaaatatatataactcatgtatatcagatatgtaacgtgttaaaatttttactaaattatcatacctcattatatgaacatgctactatatcactatcaaataaattgtatatcataaaataaatccattatgattactcataaatagcttgaaactcttaccacatgtttatgtttttttttttcttatgatattgattgatgctcttccttcatgatcagcttcctttgattgtatatttctccatggcaagatgtcttttagaaagaagattatgccatcaaattgacttttagattgttaaaaattttctcgtataagaggaaatatggaggatcacaatcatatacataaaataaaaataaagtattaaatcaagattataaaataattagagaagaagaaaaagaagaagaacactcaccaacatacaataggcttgaccaaagtttatggatctttatcctaaaagtcatttcctccctcacatggacatttagggaaactctagaaatgttcataaaattttttcaagtctcatatgctcagtctagtgtctaaggatgaaatatcctcacaagattctgaccacaacaagtgatttaaactacatgtatcacaagtgaataatatggcttatatttatagagttttcactccctatgaatatgaatgaccacgataaattttttggatgttaccaatcataaatt

SEQ ID NO: 58332 - DNA, 707 bp, Cannabis sativa
actaagatctgggaggatccctggattccgcatcgtaaaggcttctgtccgaaaccaagtgggggtacctcttccaatgttaactgtgtggctgaccttatgttaagtaacgggcagtgggatcttcagaaacttcgtgacacatttgaccgagaaacggtctcggatattcttaaaggtggccatccttctgggattggcactgatagatggatttggacgctagaaagcaagggttgtttctcatctaaatcggcttatctggtacaagcaatggacagagctcctcactgtgaggttgctccgaaactttggaataagctatggaatagtaaaactctggagagacataaggttctgtggtggtgtatcctttctagtgcactcccggttagagcggagataggaaagaggtttcatatagtggataccagctgcccattgtgtgggttgggggatgaatccattgaacatctgttcttgtcctgcaatgtggccttttatttatggcgctcctctccctggggcatttaccctgtgtgtgacactggcattcgcgtgtgggattgggtcaagttcatttgggatcttaacaacagagggatccaagctgatgatgttttcctttatgcttccattgttgtggatactatctggagggtgcgcaatgaaaaggtccataataattgttctcctgatataaaaaa

SEQ ID NO: 58333 - DNA, 932 bp, Cannabis sativa
tatattattttaattataatctaacgattatagaaataaattgactatatatttttaaagacaaaatttatttagagtgtactcatttaatgaactaacataataaaaaaagtaaaaaaaaagataaattgaggaatattattttttgtattcattaattaaaaatattttcatattatattatattaaaatgtatctatttttgtgagtagattacttaatatatcatcactctctatttaaatctaacacataatttacatggtataatagggacatcatttataaaaatgaatatatcttaaaaaaatataaaaattaaaattaaaatagataaaataaagtgactatacaatataatttctctcaaagtaaaatataaagaaatcttattataaggagctccatcaaataagctaaaataacttaaaattttacattatgaaatagacttgtctagagaagcaatattgatgtttcaactaatattttaataatttcttctcctctttctattttttcattttatatttctaatgtttttgtttatataagtaaaatatatttaaataatatagagaaaataatagagaaattaatgtagtctaatgtaaaagtataaatgtaaaagtataagataaaaataataataaaataattcgatttagagatgttatgataaaattggttatattttttatatctgttcgtgttaaaaaaaaattatagttggttattttaaaaagtaaaattaagctcagaatcctatttatataattttaaaaaaataccgtgtttattttatcatttaataaaacagaaagtctaaagactaacttttacaaaacataaaattcaaaatactatctactcttttattttttgcccacattcataaattatactaatagaaatagtgtttataattctta

SEQ ID NO: 58334 - DNA, 976 bp, Cannabis sativa
aaatatttaagtaaaactcaatatttttttatcattttttttgccgagctttttttttattattttttttcagtcgatagaacaatctcaacgcatataataaaaaaatgagagatttttctaattaaatagaaaaattaaacataaaaattcaaattttttaatattattcattcatgagtaacatttattaaaaatgcattgtacatcgtagaatcgttgtataattttgaattactaaacaacaagacgtaagacttataattacaattgttaaacctatcctcaattagaaaaatttatggtcaaacccatcataatttattatagaattaatctctttttttatttattattttggtaagaaaaccatcttaggttcatttctattggcaaattcactatttcgttctttaagtttgttaatcccttaggtgttcttacacatctcaccctaattgcctaacgtaataatttaaatagctaggtggaaaatacaatctaattttaagttttgaaaatgaaatcataataaaataaaaccattaaactgaaaagaaaaaaaaaattctctgcaatttcgatgtactaaggaaactatcacttttccggtcactcactctctctttctctaactacgggactgagttaaggttagagtgttgagaggagaaaagagggtggtagggaacgtgagggttggataatttagtgttaatatttttgacttttactttattaagtgatatatataggtgactatttaatggttacattttttggtaataatagatttctaatagataaacattctttttatagaattaaattaattatcattaactatatacttaaaaaaaattaaaattaatatatttaatagacttttttaagtaattagtgtttataaatgattttatttttacatttaaattctatttataatttctttaatattttttttttttttgacaaa

SEQ ID NO: 58335 - DNA, 1432 bp, Cannabis sativa
ttttcgatattgtagattattatgaataattcaaaaataataagtaaaatgcttactataatagggtgtttgtgtaaaagtttcatttggtgggtttgaggagttaaaattaaaaaaatctcaaacttaagtacttggcgtctggttagaggactgaaaacatagaaatagaaatagaaatgaaaatgagaataagaataaaaatagaatagaatatataaaatttaaaatgcataaaaaatatttaaaaaaaaaatagaaattttttctcatgttacattattagaatagtatttctttccatttaaaaataggatagtcattctactaaaatgacagaaagagcattatattaaaatgatatttcaatattttaaaatataaccaaacaaaagaataaaataaaaattatttcatttcaatttcattctattttattacctctaaccaatccaaccaaacacctgttaagagtttaaaattacataaaaaaaaaataaacttaaaagcggatcactcttaaattataagctctccactatcaaacataagttttttttaatttttttattttttaagaatatcaaacataaaagtttagttttacattctcattcccatttctaagaacccaaacctaccaaatatcccataataaatgtatactggaataattacataatacactatttttttgtaaaatttttacattttcacgtttgaagattttttttaacatttgtacagtattttataaaaataatacgaaaataacaaaacaaactacataaaaataatattcaaacaacaacaaaaaaataacatacaaataacaaaaattgaacaataaattaacaagagtacaacataaaaatacattaaaatatcatattttatgtaaataaaatcataaaaatatttaaaataccatacaaccgtatttttataattttttattattattttcgtgtatttgtaaaataattcttataaaaatattaatttataatttctcaatataacccaaaatgtaaaattactaatgccgttacctattttttttttttttttttttctttcttctaacataccattttataggagaaaaagcaggagttttcattacatcctaaaattgggctattaagcttgaaggcccaagttactaacaatggtgcttcaataaagtgaaaactacagcaatgggtttttatataatttgtgcttaaaaaaagattttttttatttaaacatatttttatgagaaaaatccaaattaaattaaaaaaaatatggaaaacacagtataaatgaaaatgattaccctaaactgtttatcctatattttctatttaaaaaaaaaaaaaaatctgataaaataatattttttttttttcgaaaaaaagcatttgtaaactttgcaaaaaaaaaa

SEQ ID NO: 58336 - DNA, 1826 bp, Cannabis sativa
agtctcaaatacgaatggcagcttaccacaagaaggtggccaaacacttcaactcgaaggtcaaaaatagaaaattcactattggtgatctagtcttatgaagggtcttcccagctactcaagaacccggagtgggggtacttgggcctaattgggaaggaccgtacgaagttgaggatgaaatcggctctgggacctacaagctaaaaagaatggacagaaccatggtgcctagggcctagaatgctgatcacctccgaaagtattaccaatagtcgaaagaataaaagtttatgctctgtaaagtaaatttgtaccggacaagtatttgccacctctaaattaaaatttgtaaaactgagtgacctaaaaacaattttcacgtcactcagggggggttagtaaggcataccacacggacaaatgtaaaacaggccaaaagtttaacaaagttaaaaagcagaatatgtattcaaacataaatgtaaagtgtccaaaccccaaagaaacgctctataaaagataagggtttgggtacgggccttaagtgtctccccttaagaaaaaatataaattgtcttagaaaggggaaaaggattaaatatatatagaaaagaaaaaaaagagagagagaatgataatggcaatggtaataaacgactggcttaatcaattcggggtggaagacgaggccccctgtgctcctccaacagggtgtcaagtctcttcttcttctcccagaagcggacgagaacctcctcaggctttggatagaagtcgagcttaaggtttttactgttagtctgccaggccataaagacgccatcatcaaagcgtttggtgcagtgccgacaagtaacgggggccaggagctcatctcttttcgttttcttttcagcctgagccttgaagtcacgaagctccttcacctaaacggttaggttggcagtcatctacaagtcagcctagtgcagcttctccagagacttcagcttggcagtcagatctcccactacctccttggcctccctaagctcgcgcctcgccctagccatgacctcatcccgagccttcaactcctcagccttagccttcgcttcgcctgagcctccctctgctgggcctcctctcggaattccttcctctcagcctccaagtctcttataatcttcatggcctcgtccatgcccccgaattcgggcatgacgtacccatgatcaattaaagtctttgagaggcgaccagtctctgcagcaatctggcaatacaagaaaaaggagtaattacagaagattaggtgccataaagtaagacccaaaaatactaacagaggcctacagctgtcatagcagcgctgatatcctgaatctgatagatcgagttcgtgaaagtgcaagctgcatatctcttggccgggagttgggtcaggttggagagaaagtggctcgtcaactctgaggtaaatggagcgagggtaggtccgataaagcagttgaacaagtcagtcagggggtccatgttcaggtcccaagcgttcctaaaggattcctcacgcaaggaattcggcggggcctcccttaaaacctattttaaagcttccacctcggtgttccccttcgtatattcagccatagcataattgtgcttggcgatctagagttgttgcctctcctcatcagcaggaacaggggtaagaacgatgctgggaggcacattgtattcctccgcttcaagtgggatccccgagtcagagctggcagccggagtatcaaccttcttgggctttttggaagattcagcctccaccattttacccttgtgtttcc

SEQ ID NO: 58337 - DNA, 1725 bp, Cannabis sativa
  modified_base (447)..(448): a, c, t, g, unknown or other
  modified_base (485)..(486): a, c, t, g, unknown or other
  modified_base (514)..(515): a, c, t, g, unknown or other
  modified_base (717)..(726): a, c, t, g, unknown or other
  modified_base (915)..(915): a, c, t, g, unknown or other
ttttttttgcaatgcttactatatggattttacttttagtattttttttagaataattagtaattttacctcttgaattttttgactatattaattttgccacttaaaatatacagcttggtaaaactcctcatgaacttttacatttacataaatttagtcattctgttagattttgtctcgttatttcgtttaaatgctgaagtacgtatttgtaaattagcaactttgttctttaaacttcgacaactattaaatcgtacccctcaaaataaaaagagaaagattcaacaactattaaatcatacccctcaaaataaaaagagaaagattcaacattttttttggcgaatcctaaaaaattaattaagaacttagaaaaaactattttgaatgattaagaaaattaaaaaagaaattaaaattttaaaactaattaagaaattnnaattttaaaactaattaagaaattaaaaaaaaaaaanntaagaaattaaaaaaaaaaaattatttnntttttattaaaaaattcatttagacattaagaaaatatattataaattcaatttttgtaaaaactaaattttacgaaaaacaaacttgagtctattttatttttctcacaaaatgtagatttatttaagtaaacataacatttttttactttaatttttaactttttttcaaaataatttatatttttattgaatttttaannnnnnnnnnttatttgttaagatatgagtttatgaatataaataagtttgatgttttcattaaaaaaatcttagtttatttaaattatttattagaatttcaataattttggtttgagtttttaagatacatgtttataaatacagtaaagcatgaaaatattttttaggaataatttaattttttttaagtaaaatnaatattttttaattaatttaatatatttataatgttttttaatattttactattattttttatttagaattaataaaatattataatttttaaaattattttttttaataaagtgggggtaaaattttgcattagtcaaagtttaggaattgtaaaaatactaatttttaaccataaaagaaacagaacctaataaaagggacataattgtgtaactgttagtgtcaaaaatttagtggacaaaaatgctaattattttttttatcatgttgtgcattgttatacggtaaaaacaaatattttagttgaatttggtgctcattttaatagtttcacaactttacactttgtgtgatttcaattttgaattccttctaatcaatatcaagaaattgttttagttcaatagtactatatgtcaatttcatacatctacatctaacagttaattacagatatattgatatattgggagaattgtatggagtaagatatttatattttatttttgaaaaaggaaaaaattctattgataaggcacaaattcaagaggaaaccacttgaggctagctcaagtggccataggtgggtgtgtgagtgttggaagtcctgggttcgagtcccaggtaaaacaaattgtaatatataaacgcttaaatcaaaaaaagtcaataagatatattagagttcaaaatagggggtaaatccaaccaacaaacttaagatgccagtaaagaaaaaaaaaatagtagaaattacactacatatgagaaaattataagagtgtacttttttatgacataaataaat

SEQ ID NO: 58338 - DNA, 2413 bp, Cannabis sativa
tttttttgtagacagacttggctggggcacgaagagtgtcattgtaactaaggctgggaggaaagggatgatggtcgcaatgatggaggaacttctcacacttattaaaggtgtgatcaagcttgccgcagtggtaacaataattctgaataccttcgtaaagaagtttgagccacttggtgatggataacttcctgaaatgaacattcatgccacggtgaaggggttttgtagtgtcgagaaggactcaaacacgcagaaaaagagttattacatcataaagagaggccagatgcacctcaataagatctccaatagtgtcagcaacaaattgagccagaccataggaacgagagccaaacgggacataataaacctggacccatagaggtatgaagcgaagttgggtggaaaggatggtgtcaaaaccatcaggaatagcaaaaatcataagagaacgatcgaagtgccaaggttggccttccattacccttcgacgatcacccttgcaaccaaactgaaccaggaacatacctgagtggtaatcagagaaagagaaagggcattgggtaacccatgcatagctttttgaatccaatcaactttcagggttttgggggagaggatcttaacaaccaagcagaaagaatgggattggggttcggggtgaatggacacatggtcaaagtcgtgaatgagggcttcttcttcaatgagttgaatggagtggttatcagggagagtagtcatagtgatgaacaaatatggcataaaacacagggtaggtaaagagaataaagtagatatggggtaaataaaacccagacaacataaccttaaataggtgaggaaaagaaagtaatacctggattgaatagggagcggaaggtggggggtgttattgccatcctagctgacggaggtctagatcgccttctgcccagaatcagagcaatgattcgtctccacctgagaatggcgtctggaattgaatgcttgaagggatgatggagaaagggagaaccataggatttctggaagtgcaataaatgaggttctcggtaatgagaaataggaggttgcattaaaggattgtaatgattagtggaagatattaaatgagatagcattaattgagaagtgagaggaggaggagggaggaaaaagcgacggttgggtatcacaaagagtaaactggattaaccagagaagaagagagaaccctagaacgttccagagcagagctcagctcaacttcccaatattttttttcattcttctccctccatggcaccgtccaaaaacgagaaaccttcctaattgcacacctgaaatcgatcaaacccctacctccaattaattttagtggttgaactcaaaaaagaaataaaaaatgtaccattctatcatcacatagcagcaagcacccattctattaatcatagcatgaaatcaaatatgtatgtagctaagaaaagggtattctcactttcagtagtactcttcttcttcaagacgaaccgtgattgttttacttcaattataagattgcagaggtgaccaagtgtcaatggtatttcgctgaaaatgaagttccgtctgatggctagaaacctggggtttttcaattgagagattaactgcggcagcggactgatgcagagagctttccctttaccgtgttgatctgacctgtgaaactcgaagagtcggctctaggatctccgagattgagagaaataaccttgtcggcggcatggggtttgattgatggttttggggctggatttcaggtgtgcgagtgggatggatttttggtttctgagtggtgcaatgaggttgaagaatcggtgtgttgagatttaggttttattattattattatttttaattttttttatttattttaacaaataaatattaggtgaaaaaaaataaaataaaattagaataatctagaccgcctgtgtccattaaactaatagaagttagtaggtaccaacataattttagaaaagtgtgaacttttgagtattaatgccataattttctgaaattaggtacttattagtaacaaaataaataaaataggtatttataccgtaaatttttcttgaaatgattattaaataataatattaattggcgtgtcaaatttataaaaaaagataaatataagggattttgccaccaaaaaatagataagggggttaagtgtataaaaattaaagggaaatttgcagcaaaagtctccaaaaaaagtcactttgatgcaaattagtcctcaacctccaaaaatagtggcaatagtccttaagttcatgttttttatttttccgttagtcctaattttaactgagtcgtttactttttcaatattgctacgtgtcaaaatattattggtccaaattat

SEQ ID NO: 58339 - DNA, 1801 bp, Cannabis sativa
gtcgaagtaataactgatgtaaactaattattatttgcatcagttaacaatttgcgtcggttaacaactgaagaaaaaaaaggagggttgacttttgtgtcaatcaacgagtttgaccagactcgttgactgacgcaaaaacccttttttgtagtagtttggtgttgttggtgatttttgctcatcaatttggtttttcttaatatgatctagggatgataattcatgtttacgggttatattcgtgttatatcgagactaatatattacagatatatgttggacctgcaaacataacctatttaattaatagtcatatgtgtcaacaaatgaaaatccatacatatactacccgtttataaataagatgatataatatgatttgtgcaactcctttataaatgaatgatgttcgagacttagagtgggattaaacacattaattatgtgtttataattggataatgttcgagacccttttattatacggaataaacggatcaatttaaaaataattcaaattcatttaaagttaaactcaaatttgttaattttgtatggatttcaaattgtattatcgtgtcttatttttcctgtcgtatgttcctaatctctacaatggccgtccatttcaagtattaaaaataaagtttatatacatatatataaacaaaaaattaacaaaatatacctttgcatttaaaaaaaaaaaaccaaaatatacctttaaaaattcctaacacaactgcaataaaaagttttaatttcttaattcatgtctagattaatatatcaagtgagtaaaagttgatcattaatataattgtatatataagataaatgtgatactcttccctatcaattagttttgagacccaaattctaatatagtatcaaagtcacttgtgatccgttgtgagcccaaaataccaccggcccaaaaagtcatttgttcaaagtgttgacggccaaaaagatacttttgttgtctctcttttaatctctatttgggaccttgcggccaatgtgtgtcaatttttagtgttagggatttttgacttgtttcataatctacaaattttctaacgtgtacacccacaaatttttcgatatttaaccttgggcttgtaggattctttcaaatgtcacattcgaccctatagtctcttaaaggtcgttcgttatatacccatactttctagttcaaaaatgtaaggagagtgtattagagttagtcttacattatttatatagtgaaataaattattatatataaaatgaataaactactctttctattattaattaattaattttaagataaaatcacatttatctaatctcaaattctaacagataaagttgatcattaatatataattgtttcacacacatatataattatcttgctagcatgcatagcatgaatattcatgtaattgtgtgcttaattaacattggttattaaggtaactttttttgtatagagagagagatgattgatgattggaatagttatagatataaatagcatcaatagtagcatacagataagcactaagtcaggctcaatggacacacaacacaacacaagatagaatactattctcgaatttcgaaaaccaattatggatcactttatatcttgctttgctttggaatttccttggacaaaacacaacaaatttgcatcgacttcggtaacatttaatcattacataagtcaatccacaacaacaaacatacatatgtactaatgtgttagccctaaccctagctttatcttagctaataaccacta

SEQ ID NO: 58340 - DNA, 543 bp, Cannabis sativa
caatttcttctactgctacggttcagcagggtgcaaaatggcagccaccacatctaaatggttttaaattaaatgtagatgcaaatgaagaacagaaaaagttgggtattggagctattatcagagatcacaatggtgttgttattgcagctttttcaaaggttgttcaaggcaatttcaaatcggacgaaatagaggcaaaagctctttatcacgctctaaattgggcattgcaaaaacaattagctattactcatattgaaacagatgccttgcgagtctcctctgctttaaattgtgcatctaaagacttatcttgtttttctaatcttattatggatgttcgttgtcttttatcctttttccctcaggttttagttacccatgtcaaacgctctgctaatcaagcagcacatggtttagctaaatacgctctagggttggatgatgacattagttggataggagaaattccctatcctatattctctgttgttgtaaatgattcttaattcattgagttttctcaaaaaaaaaaaaaaa

SEQ ID NO: 58341 - DNA, 1087 bp, Cannabis sativa
taatggacccacacgtttggggcttatgtcctaataagtagctaggttcacctaacatgattaattagtcttctaattaatctaaattaatattattattgttatttttatattatcattacttatcattatgtattctaatatgaagacaaaatgttcccttgattggttacacatggctacatcattactacttataagcttctagttagaaaattacatttgatctattaatttattaaaaatacttaaacgtgcatacaatattgtgaaagaaaaagaaataaattaacaaagagcacacaaataagagtccaaaaactaaataatttctttttttttttttttaatttctctgatctaattattattttatttattaaagtttttactattagaaaaagtgtggtcgacaagaatgttagacctcataaaaaagtaatgattatgacaattagaatattgtgattggcaagagaaagagtgactaaattgtgggatcacgcatcgtttaagaaataaagtcaagtataataattttaaaactgtataagtatatgagacaacacaattaaggagacattaaataaattaacgggtactacatacttatggcaaagtacgccttcttttcgatagttcatcacttaataactctaattaaagttaagcagtagcctcttaatgggtaatctcctaagaagtttattcaagaaacgtgcaaatgaaaaataagctccagttattgatttttgagctttacttccagcgatagcttcggtatgaaaaattaggttttcaagctctctcaactctaatttgctttttacacaaaatgagtggagagttcgagaattgagaccctatatttataggtgacagggccgtcttaaacattttagaggccctgttccattcttaaaaatttggcccttaataaaaataatagtataattaaattctaattttaatttattttcaaaaaagttcaatttttttatttatttttttaggtagatcaagtttaaaaatttacttctagaagttttagttaaaaaaaatatttcattcatatttgataattttt

SEQ ID NO: 58342 - DNA, 590 bp, Cannabis sativa
tttttaataaaacatatcaatctttagaaatatgtataaaaaaaatacaagattataagaatataaattaggtctttaacaacttttgtaaatatctaggtacagtttgaggaaaagtagtattgctatgagaaaaaatagttgtagaactttaaaaaaaaaagctgagttaagtgtttgttaaattataaattttaaagtgttacgagttgttaagattctattataataatgataatgttataattaatcaatatatatagggacaagattttgtcctgttactgtacggtgacagattgcaatccgtgatgtaaggtaactattggatgggtagttaatttgatccaaagactggggttcatctaagggtttatgtaggggtatttagggttaaataaatagctaccggttactttttttgaaatttaaatttattaaaaataaaaaagtgaaaagtgacatccatcaatcaaatcatatcaaccgtcgtcctcctccactccactctcaggtgtcgacggtgaggtgttgaagggagtttgcatttctgtgttgaggtatttctttctttctctctctttctctct

SEQ ID NO: 58343 - DNA, 967 bp, Cannabis sativa
tgtagttaacgagacgcatggactaggcacaatgcgagtttttctatagggggatatctggattctacccctagtaaccttttacatacatagtatataggttttggtgcttgtcctcttctcgcactatagctgcagtaatcgcatcttccgagatggctaaatagagaaacaacgtttctctagttattggtttcgccaaaacttgaggcatcgctagatgccttttcataatctcgtgcccagcagttgcatccactaactggtcgatcctgggaagtggaaaataatcttttgggcacgccttattcagatcagagaaatcaatacaaattctccaattttcgttaggcttcgggacgagaacagaaatggctatccatgagggataaaacacctcgcgtatacagtcgttgactaacaacctgtaaacttcctgttttagggccccttacctctcggaatccaagggtctccttttctgtctcttcgttgggtagtttggatcaataaatgatggcagataatattagggttgatccctatcatatctccatggctccaggcgaactgatcctagtttgcctttagaaaactttttagttgctatttgagatgctcgtccaggttcttcctaatgtatacacattttgtgggatttgctgggtcgaggataacctgttccaactcctcaattagtttgaataagttcctctcatcttgaactcgggggtcaagatcttcatctttcttttcattttcttctaccaagattgccatcaactgatgaccggctttcctatgctacaactctatgcgatagcaatcgcgagccaacatctggtcgccccgtaccactccaactccttatggtgtttggaatttcaaggataggtgcttgatcaaactgaatgccactagtccaatcagtgctggacaacccaacaatatgttgtaagccgatggc

SEQ ID NO: 58344 - DNA, 789 bp, Cannabis sativa
aagtgccaaacaacaagatccatcggagttatgtatttttgaattggatactgttttagctgctacaaaccatttcaacatcacaaataaactcggacaaggagggtttggttctgtttacaaggtgtgattacattgtgttcttttttaaacaaatgaataactaaaaaatcagcacaccaagaagaaattgagatgtcatgttgatctgtttgcagggaaaattacaagatggaagggaaatagcaatcaaaagattgtctagtagctcgggacaaggcatagaagagcttaagaatgagatgattttgatctctaaacttcagcacagaaatctggtgaagctcttaggttgctgcattgaaggagaagaaaagttactaatttatgagtttatgcccaacagaagcttggatacttttctattcggtcggtttccacttgtttatcacagtctttatcatcaatactaacctactctgcttcccctgctctcttaatatgctctctagtatttactaattactatcatgcatgcaatatacgtaaatttctttgttgccctcaatcttcattttgttttattcgttttaacatttatgatcaattaattatttatggtttatattgagtagatccaagtagaagtgcacaactcaactgggctacacgcttcaacattattcatggaattgctaaaggtcttgtatatcttcatcgcgattcatgtttaagagtgatacatcgagatttgaaagtaagtaatattctcttggatgtaaagatgaa

SEQ ID NO: 58345 - DNA, 1636 bp, Cannabis sativa
gcgtacaaggacgtacatttgatacgaggtagtgggggtgtgatatcaagtgtcagtacgacctgacactcgagcattaataccagaattccactactttaagcattttcccctgccatacgcaacatagtacatggtccccctaatttcgtcagtaaaaggtgtgtattttaatgaggacaaattttatcagtaaaaggttgtatttcgtcagtaaaagtttgtatttcgtcagtaatgaatatcaatggcggcatgtcatcagtaaaaagtcgttggtgatacttcgtcggtgataggtgttattactgacgacatttaaagtcgtcggtgataaaaataattaccaacgactttgttgttgggaaaaagaagcaattttttttttattttttttaattcgtaagtctatcaatgatgacgttttcgtcattgataatatcgatgatgaaaaattcgccattgatttatttatttaaagaaaattataaataaaaataataatttttattaaatattaatttttttcactaattaatttatattaaatattttcttaattaaacaatattcaaaataattaaataaaagtgaaatataacaccaaattaaatatttttatattaaatattaaaagttaaatataataatatcattatacttactaaagtgaatattcataaaccataaataaacataaaagtaatagttcatataactaaaataaaaatactaaaagaaatttgttgttgcgtcgtcatcatcatcattagcatctctcggaatctacggttgaggaacatccgacatctgtgggtagtatggaggcatgtgcgaacttgtcatcatctgagcaatctgttgcccatgtggtgccggcatatgtgatgtctgctgcccatattgttgcccttgcggtgtcggtatcatctaaaaagtctgcgacatctgtgatatttgctgtgtcggtatcacttgtggcattcaagactgtgagacttgagacgtctgaggcgattgcgtcatcatttgcatcattacttgtgggctatttggcgacggcgactgtgacatcatctgcatgaatgtctaaaacatctgaaattgttgaaccatttgttcagggagttgctaattaaggctactgtaacgtttgctgtaacaattgttgaaatgaaagtggagcctgctgcgactgttcatacttagtgtttaagaaaataatattaaactttttttagttaagatacttagtttttaaaattaaatgcattaaattttaatatgtttataataatacttatatattaaataaattttaaaaaacttattaaaataaaaatccaattatttaatatatattttttttaaaaaaaacaaatttaaacttcttttccattaagatacttagttttaaaattaaatgcattgaattttactatgtttataataatactcatatattaaattttaaaaagttattaaattaaaaatctaattattaaataatttttttaaaaaaataaaatttaacctttttagctaaggtacttagttttaaaataaatacactaatttttaatttctttgtaataatacttagatattaaattttaaaaaatattaagatcggaag

SEQ ID NO: 58346 - DNA, 805 bp, Cannabis sativa
taaaagatcattgcggacagcccaaattttccaactaacacacgcagcttccttgacaactactgcggactggtgcaaaacaaggtcggacagccagttattgaagccgtggctgaccacaccagcagggacaatcgaaacagtccagcagctgctcgcgaacctgcactccagcaagacatggctgatagtctccactgcattattgcagaaagggcagtacagatcaacattgattttcttggtgcttaattgaacttttgttggtagacatccaactaagacacgccacaaaaaatgttgcacctttggagggacttcaagctgccatatagccttaaagagctcctgatcttccacagcaacactcgcagcaggtgcttgctgcaacatacgataagcactcttcactgtgtaaaaaccattagcttcttcgctccaacaccatttatcagccgatgcattctcactcaattgtatagatagcacaagattcttatccctctcatcaaatagatcattaatgacatcaaaatcccagctctttgaatccatggaaaataaactagcgacattttgattcactaaaccaggatgagtagagacaacaaagggatgcgtgggatcaggaagccaagggtctaaaagaatactcacattgtttccattcccaattgatttccttgcaccagctttgactattccttgtgcttcaagaatgcttttccaaataaagcttggattttgtcccaaagtagcattaaggaaactactagaaggataataccttgctttataaatttta

SEQ ID NO: 58347 - DNA, 577 bp, Cannabis sativa
gagaagacgatgaggaagaacgaaggaccccccgccgttggagaagaatgactcaaagactggcctaaagagaaagaaaggacagaggagagaggagcctggcgagagatagagaaggcggaggagagatggatcgactaagattgagtgggagggtggaggcaaaggtattcgaaggttttgaaaaatcgccagaggtcttcgaatggttcactagggttcaagaatgatttgctgagtctaacaaattttgggtaagtgaataataaaaagatttgtgtcggtttgtcacactcgctacatgtttactgctggtttgaaaatcagaaaaacgatgcttttaaaacgacggtaaaattgtgtatatttttttaaaatttttttctttttaccgtcggttttataattagtgatggacatagaactgacgcaaatcatatattatttgtgtcattttagaaacgacgaataaattgaatatggtactattcacgtcggtcaacgcaatgaacagtcgcgttgaccgacgtaaatagtgaattttgtagtagtggctccacaagaagtacggtttaag

SEQ ID NO: 58348 - DNA, 744 bp, Cannabis sativa
ctctaagtctcgagatccctagtctcgtgacctgtgtccttgtttgttgttgtcgaaacagtgaccacaacttgtggtggtgctccggttctcctctcgtggctaggagatttatgattaaaaaaatatatttttttaattttttggtaattctaaattgtttttaattaaattataatttggaacaataaaaagttaacatgttgcctttcattagtatctaacagattaattagaaaaaggactaacatatttaaaaaaaaatgtaatcttgtaaattattactgctaatatttagattgcaaacataaatatttagaaactattcctcaattttctcttaaaaagttaaaattgggtaggtctacttactacaacacactctcctcataaactttgagatttttttaatggtactatttatagtagtgatgtcattttttacgtcaattttcaaaagtttttaaataatttataatactgaaaataaaatttaaaataattaattttatatatgtataaaagaataattgtataataaattatttaaattttattttcaatataaattatttaaattttttccaaacatgtgttttatcccccaacattattgtttagaaagtaatgtcatatcattatgtatactatttaagtagctcaataatcataaataaaagttcttccgagatggattactttgtgcatatgtagtgtataatatacatgtataatatattcaca

SEQ ID NO: 58349 - DNA, 1122 bp, Cannabis sativa
ctgagttggagattcattgaccacgctatggagtgcgttggcttccctctgaagctgcgttcttggatttcgcaatgtattaccacctccactcttaacatttgcttgaatgggggccgagttggccagattttgccatcgtgtggcctccgtcagggcgaccccctatccccttacctgtttatctgtgctgcagaggttctctcgagacttctggaagaagctcttgggcagggtaacatacatggaattaaacttagtaggggaggtcctattattacccacctgttctttgcagatgaccttatcctggtgggtagagctaatttaaatgaagcaaatagtgtctggaattgtttggagaggttttgctcttggtctggccagaaagtgaataaactcaaaacgtcaattttcttcagtaaaaatactcctgatggtttgaggagagggataaaagaagggttggggattaattcaccggaaggtgctataaactacttggggttgcctcttttcaggtctcgacagaaggatgctgactttaactttattctggacaatctcacttctaaattgcagggttggaaggctaagactctgtcgaaggccggtcgtgctaccctaattaagtctgtgggtttatcgatgcctttatatgccatgcaaacaacaagactatctggtcgaatggtgtcgaggattgatgggttagtccgagatttctggtggggttttgaaagaggaaatcatggtctccatctaaaggcttgggataaactttgccttcctaagtctttgggtggtttaggttttcggaaaacgaaggagatgaatctggcgttccttgccaagtggggttggaatctattaaatagatctcaatccttatgctgcaaaattttagaagccaagtaccttaaggggaaggactttctcagatgtagctacaaggactcggattcttggttctggaaaaatgttgtgaaagcaaaatctattttagtaaaaggggcttgtaaatctgtgactaatggaaggtcgactaatatttggagggatccttggattcctcatcttaaaggttttatcccaaaaccaagaagcgggatcttaaccaat

SEQ ID NO: 58350 - DNA, 908 bp, Cannabis sativa
acttaactaattgttaggtatatcctaagcccgagagcttacaccagaatatgaacagccaactcgaacattagaagtcgcatacgttgctgtatttagtaaatagaaactgttattcgtttattaatgttttacgttttaacttaattactgtaaatcaatgtataaacggattgacaatgaatgcaatccttgtgtaattaactagacacttgctttgtatataaaggagtgatccaccatgaaatgagaccctacgaaactcttgcaagagtggactaagaacaccgtgatctgactgaaccactatacacctttgtcttcttgatatttccagtttttactaagtacttacgtttccagttcgagtactcgccgttttagtttgaatactcgcattggttcttcatataatttcttcttattattagtattattattcatttttggtgttgcaaattttgctcgacaacatttggcgccgtctatgggagcggagaagtacattcttactacatacaagaaggaaatcttcatagctggaaaacaagcaaacggaggtgttaacaacgaatccatcaacaccgaaatgatcaatattccattgtctggggttaggacaccacctgtagatgtcatcaatggcggagtaggtcgaggtaatgtcagaccacttaatctattccctgaaactgctggcccacaaatcggagaaacatccacgccagcagcaactatggggcactttcaacccatcactccggcggcagtgtccgagggtatcgtccagctaaccattgaccagtataccgcgatcaaggaccagctgcgtgccctgcaggccgaggtaaatggacagaacatggccgacaccctcctcgagcccccactactcgcacaaaaaaccc

SEQ ID NO: 58351 - DNA, 1486 bp, Cannabis sativa
cctagtaaaataattcaaacaactactttagcagtggcaccagtggttgggtgacaccaaaagcacaaccatgtcaaaagttggtaggtacgctaagaactactttgttgcttgaggcattcagaagattggacattgctagtttcagtggatgccatttttcaaatgctctatccccacattgcagatgagggatagggaaaaccacatcctatctctttcggtggagaagagaaacatactcaggttggccagtgtggcaaacttctagaagtacagtttgtgccttcctgctcctggagttatgggagcttagggcccgtcagttggtatagtgggaaccttgtctatagagagggcttgtcctagtgatggacaagtccacgacttagttgatgacgtgcctctgtctttgatagctcaaaattttgagaggagagagagggccctctgtcgatgcttggtctgtgggggctcagttggtgatgcttctcttcgaattatgcctagaggctagagctctgagggaccttctttccccttgcctacatttagaggcaagagcaagatgattgttgaggatatcgacaattatttttatgaggatgatggtatttgatagttgataacaccatttttacattcttctcttgcattgaatagttatgacttactttctgactttgctactttctttttccagatgtgtcttccaggttgagaggtctcactgggggaccttctaatgagccttcgggtcaactgagggccaaggtggcccagaccactcatggtagagatgttgctggatcatctttgcctcctcctccacagggcttgcaccagctgggcagcctatgattgatcatctttcaactaggagggaactacctttgtgttgggggtgctctaaagcctagttgaggagtaggctcaatcacagggcaaagagccatcgaggcagctcacagattcctagagagagccattccttctatggatgaggagctttacgagcttggtgatggtgagctaaacaggttgtactccactggccttcaggatctatttgtggtaagttgtacatttaaccttgctcatctttttgggacttttacaagctggtcagccagggatttgttgcatggggctggctgaccaatgttgtatcttgaaggggttgaccgaccatagcagccttagggaggggctggccggccagtgttatgctttgatactgattttgtcttgttttgctttcaggccttgatgaagttgagctcttcacgtgatagctctccgaggtcctcaaacgctctttgaggtagatgaagaccatacaggcttccctcctggcaaaggatcagaccgtatctgagatggacgctctcatcgtgcagaaccaaaacatgatctctagcttggagaccatgcttgatactaggaaaaaagagaacaccacaaaagctgccactatctctaggct

SEQ ID NO: 58352 - DNA, 950 bp, Cannabis sativa
tttaaatagctataaataatttattaattaatcataaccaactgctaatttccaaattaactaagtgggctttacaaaaaccatctcggaccactgttcttgtgtgttaccatgacaatcattgagcaaattggatttaaaccatttcgtttctacaatttttggactcaacatgatgagttcaaaaacatagttagaacgagttgggatcagccattacaagcttttggtttaaaggggagttaccttaagcttatgcatatgaaacataagcttaagaaattcaacagggagtccataggagatgtgggaagattgtaccaggaggctaggaatcacttgttgaacactaaacttcaagcccaagaaaacccaatgaatcttgagattcaagccgatgagaaattggctgctgaagctttttataaccaggataaaatttacctcagcttcctaaagcagcgtagcaaaatagattggcttcaaaaatgtgattagaatacctcattcttttcatgctatcttgaataaaaggaaggttgaaacttgtatagctacttttgtttctgcaaatggtgttgtgatagatgactttccccaatttattgatcatttcgtggaacattttcgtggctacacaggcagcaaaagccaagccaatttgaagtcgaataaggattgtatagaaaggggtaagcgcctagatctggagcagcagcttgagcttctaaatcctttcactaaaaaagaaatcaagaaagcttttttcagcatccttgaaaataaatccccaggaccaaatggctatggctctgattttttcaaggcaattaggaaagatatggatgttcaaatatgtggatctatcactaatttatttaatacaggtaatttatttaatacatgtacaatacctagggagttccatgccaccatgatcaccctaattc

SEQ ID NO: 58353 - DNA, 1309 bp, Cannabis sativa
cagacccggatctaaatcctccccgaccctggtactaaacccggcttctgacctgaacccgagtccgaccccggacctagatccggcttaaataaaataaaaaaagaaaaataaaaataaactttacagaacacacttttattttctgtttttaaaattaaaaaacaaaaatggtgacagaatgtatttttgccttttaaaaataaaaattttattttcactttgtgattaaaaaaatagaaagtaaaaatattacctaacggtaccctaattaaaaagagaaaatattttcaataaagaatgagtactcaatagttaaaacttttttactctattttttaaaatatgttgttaaatctttttttaattttatttcgcacttttcattacattatacatcaatttctctaccttttctatatatcatttaaatattatatttttaaaatattatattactatttaaaaataaaataaattataatatagtatcacatatattaagaaaagctttaaataattaatataatttttataacttaataaatattgcgctcaagtttagctcaatataatcacacatatacatttgtctcaatggaggaccggtaggtaagatcgtgccctcgtgcggtattcgccagggtgacccgttatccccctacctcttcatctgtgcagcggaagtgctctctagacttttagatgaggcgattgagaagggggttattcacgggattaagctaagtagggggggcccggtcttatcccatattttctttgttgatgatctcattttggtgggccgggctaacataaatgaagctaaatccttttgggattgtctggataagttttgttcgtggtctgggcagaaggtcaacaaacttaagacttcaatattctttagtaaaaataccccgaatggtatgaggagaggaattaaggaagctttgggcatcggcgctcctaagggggttataaagtatttgggtttgccacttttcagaactaggcagaaagatgttgattttaatttcatccttgacaacctcacatccaaacttcaggggtggaaggctaaaactttatcgaaagcaggaagggctaccctaatcaaatctatggatctggccatgcctatctacgccatgcaaaccaccaaattgtctaatcggattgtgaatagaattgacggtatggtccgtgatttctggtggggctttgagaaagggaaccatggtctttatctcaaggcttgggatcagctgtgtctcccaaaatctttagggggactgggatttcggaa

SEQ ID NO: 58354 - DNA, 898 bp, Cannabis sativa
gtatggtattgtattatattgaattgtattttatgcaatatttttatgtaaaattattattggtattaatatttatgggcacctaaatatataatgttttagtataaattaaagttaacaaactttatataaaaatatgatatataatctaattcaatataatacaatacaataagatttaatagaatgttacaaaccaaccttgtttattaatgtaatttgtaaataaagtttttccacaaaaataataaattatttactccatcaactgtatccgttctaattcaaagttttgtaacatatttaagacagaacgaatatttttagctcatatattttttttttctactgatatatatatttatttattttatttaaatcaataagtattttgttttttcttaaaagaaaacaagaaatatataaaatattgatggctgggaatgtgacacaacaagaaaatgagatttaattgaaaccatccaaggagtttgggagaaggtcggtggaggcgtcgcttatgcatgccccatgcctcatggcatggcccaagtcgcattccatataattatatggtttctacttggccatgtccatacattctatattattattattattattatttgtagtggggacataacataatgataaaaaataacatataactactaaggttttcttctaatcactgatcgctctgttagatcagcgattggaagaatattggattgaggatactagttgtccgtgttatataattgttatttaataaatatagaatgaagattaaaatatggcatattatatattaatatgagattaatatatattatgtgttgtaggttatattatatcattatagtataataatatacacaaattgtaacaaatgagg

SEQ ID NO: 58355 - DNA, 1134 bp, Cannabis sativa
tttatattttttttttgaaccaaatagtataacgattttttgaatattggaaaccaaaccagacataaatctctcaaaccaaaccaaattagactattaaaaacggtttggttttgttcgaaatacaatttaagtggaatttataattattcattttttttaagtaatcgtactatttttattaagtttttaattttatttttcaaaatatatattatacatgataagtaataaatctataacatatcaataataatataaaaatattcttaaaagtcaaatataacataaaaatttaaaattcatgcaataaaaatctcgacacacaaaaaaattcaaaattatacatatagtcatattatttattatatacggtccggtccggtttaagatttaactatttattacgatccgtaaccgaaccatttagcggtaaacggttcggattaaccagaccaccagaaacggcttccccagttacgatctacaatggttcagattgtcgcgattcgaatttaaactacggttttccagtttcgatgaacaaccctaataattaagtctgttaagtgtcagctcaaaaatatatagtgatatttctttagtttattcaatacataatttaaaaatatgtcaccacaaatatccctatttatgtaataaataaaggatatttcttcaaatagaggacaaaatattgcaacaactagaagacaaaatcaatggtcaagctatccctagctattcattttaggttaattagtaattttttttcctgaactttgacaactaaacactttaaattatcgtttcatttgtacttcaccctctaagatcaaattttagtagtaaaattttctaaattattgcactgttagcaaatttaaggtgtcattcgtttaacttctaacatgaactacttatgtgtatacttttatatacgtagcacgtttatattggtaaacttaatactattatttcaaaattataattttttataatttttaattaataatattaagcgtcccaatttaaatatgtcaagtataagagtacataaatagctcatgtcggcatgtgaaaaatagattatactttaaatttattaacagtacagtagaacctctattcaag

SEQ ID NO: 58356 - DNA, 644 bp, Cannabis sativa
acgtgttatttttttattagtatatttaaattaatttttaaataaaaagtaaaatttaatgatctagactaactagggtctgccatgtggccattaacttaacacttaatggccaggtacctaggtttgttccagaattttaacttaggtacgttacttatcactatatcacttatagttaattatcatctatcattctcaataagtttgctctatgtacatagagcatagttataataatgaaatagagatgaagagagagtatgagggaatggacataatttgatgatcctaaaaaaaacatttgacatgaaaaagagaaaaaaaaaaaagaataagatgatgcaaataaacaaaaaaaaatatatgtatggttataatggtgagatggagatgtaggagaaagagtgtgaataaatggtgaaagagtgttagaaaatacataattaattagaattattataacttaattttttttataataaattaaaggttattcttaactagattagtattcttagttaaaagttttactttttatctatgcacatttatatagatttaataacaaattaattagtatatttattatgtacgtttataaaatttaaatataagtttaattaaggattatatttcaaata

SEQ ID NO: 58357 - DNA, 987 bp, Cannabis sativa
tgagagcaaggaaaatgaagctggtaaactggcagcagacaatgcaagactcgaagctcaaatctcagaactttcaaatgaggttcagcagggtcagaacacaataaaagagctactggcagaatctaatcagttaaaggaggtgtttgttgttaaggaaagggaatactctactctctctgagacgcatgagacacatcgaaatgaaacatcaagtcgaatcacagaacttgaggctcaagtggcagacctggaacaggagctgcagtccattgtaggccaaaaaacagagctggaagtgcagattgagagcaaagcaaatgaagctagcaaactggcagaggacaaggcaagactccaagctcaaatctcagaactttcaaatgaggttcagcagggtcagaacacaataaaagagctactggcagaatctagtcagttgaaggaggtgtttggtgttaaagaaagggagtattctactctctctgagacacatgagacacatcgaaatgaaacatctagtcgaataacagaacttgaggctcaagtggctgacctggaacgggagctgcagtccactgtaggtaaaaagggagagctggaagtgcagattgagagcaaggaaaatgaagctagcaatctggctgcagaaaatgcaagacttcaagcccaaatctcagaactatcaaatgaggttcagcagggtcaggacacaataaaagagctattagcagagtctggtcagttaaaggaggtatttagtgttaaggaaagggaatactcatctctctctgaaacacatgagacacatcgaaatgaaacatcatccaagctaaaggaacttgaggctcaagtgacagccatggaactggagctgcagtccattaaaaatcaaaagagagagctggaagtgcagattgaaagcaaagaagcagaagctagcaaactggttgaggacaatgtaggactccaagcccaaatctcagg

SEQ ID NO: 58358 - DNA, 1082 bp, Cannabis sativa
aaaaaaacaaaaaaaaaataacaataatttaaataaaattgaaataacttttaaatagaaaacaaatgtatatttatttaatacaaaaaataaatcctaattcaagttcatattcataataataataaaaaaaaaaagaatgatctatctaagtagaacagttcagtattcaaatattattctacaaatctaaaacgatattttaataaatatactaaatgtatatgtgatgacctgacgtgtcatcccaagcaaatgctataggtcgggaacaccgtaattttcagagctctgtaataaaaagaaatctatggtttagaagaatcacaataaaataaatggtaagcaattatacttaacctttacatacatgtacaatcaatagaattaagtacatagattaaaagaccaatggcttttataaaatcccaaatgggtaatatgtagttgacattcttttgcaacatagtaaaacattataatcttttaagccataagcatgaaggataaaaatgaatcaaaatgctacatgaggaacttcaaggaaaaaagaagagaaatgaataaatattgggcttctaaacgaaataagtcaatagtattactttatactattgtaatatattacttttttcatcaaaaaaaaaaaaaaagaaactcaatagtattactttcaacatcttctgtctcctcatcttgaagtccagaatattttattccacatcccgcaatcttcaaagacaatgtagcaggaagaaggcctaagctaatgctgaaagacaaatttaaagcaagaggatggtccgatctttcacaaacatttcctgcataaaattaagcacaagaaaaacttaattatccacgtgacagctcaattccaaaagcagttccaaaaagatcataaccttgtgagaataagatgattgaagcatgaaccaaggagagacatccaactttccttcgtctggattgaaaaactatccaactgccatggaagctgctgatgtaggtctgcctgaaatggtctgagcactgagattttaccattcatatacaatatacgaatcatcttaatataaatt

SEQ ID NO: 58359 - DNA, 1328 bp, Cannabis sativa
aaaaaaaaaaaaaaaaaagtcactgcccccaaaattcatgacctattattagattagtcctttatcatgtattttaagttttttcttcgattttcgtctttttgttaattttccaaatatataggcataatatagaaaaactaaggtatagttagttgcggtataagtacctgcaagcaattttgagtatataaaagatataaatttattaatgaattttttttattaatcctatgagaacactcacaacaaatgagttataatagctaaaagttaaaaaaaaaaaaaaattaaaagcttaaaattgagctctaacaaatactttaaactcttagctattatacctcatcccaaactccaaagaaaatttctctacatttagctcatgaatagtgaagaggtaaaacatatattttatattttttctttctctctttcactcaattaattaattttttattattttttttactcattttcatatgtactttttgttttaattaataaaataaatgtaaagatataatatttaaatgatatagagaaaaatataaagaaactgatgtatgatgtaatataaatgtgtgaggtaaaataaagcaaatagtattttggtgaggtattttaaagaatagagtaaaaaagctgctgagagtttttttttaataaattcaaaaataatattttcatttaagacaataaaatttgtactaataaagcttgataaaaaattattaattttacctacttatgccacaaaaagaattataaactaaaaattttgagtacttatttataaaatatctcaaaaattaaaaatttcagtattacattagataacattactataaatttttttactttaaatcataataaaacttgtgactaatagttaaaaagttataattaattgtaaatcatcttgtgattaaaaaatccgtggttaaaggtattaatagttataaaaatcacattttgttgtgactaaaaccagtgacggacccaaaaattttattttgtgagggcttatttatcattaaaaaatatttatacttatattataatcactattactagatttatttaattttgtggaggtttatttattattttggtctataattatcaaattaaaaaaattacatttagttttttaaaatgcaatatttttgttaatggggctatagccccacattgatagtagtaggtccgtcatttattattattcttattattgttcactacaaaaatttgctatttttagtaacaattttttagtcacaacataaattttttgtgactaaatgtggcttttagtcacaacaaaa

SEQ ID NO: 58360 - DNA, 805 bp, Cannabis sativa
aaaaattagagatttttttaattagatagaaaaattaagcataaaaactcaaaattttctaattttacccattcagcatggataatacccattaagaatgcaccttcattctgaagtagtttgttaaagtagtttagaaataatattgtacattaatacgaggtgctcattcaatccaattcgtattatcttattaataatatattttatctgtataaagcatgaatttattattttgaatattttatgattggttactttttagttttaaattatttaatatttatatttaaaaatatctttttttcacataattaaagtaaaataaattattattttttttatatctccaatcacaaattaaaataaataaaataataaacaacaaatttaaaggaatgaaaaaataaattaactaaaaaaatatttaattttgtttcaagttgcatgtagaaaaaaattatatataaaagaaacacttctcaatgggtattacccatgaatggttattaagaaaatttcattataaatattaattttaaaaatattaaattatcaaattttgatctaatgacaaataataaaagagaaatttgaatttgtatgcttagtttaactacttcattaaaaaaatcaaaaaatatctctttttacactatatcaaaaatttgttcatgttaaaatatttaagttaaactttacatttacttatttatttttttttttttttaggctggctaatttttttttttcattttttttcatccgataaaacaatctcaacccatacaatgtaaaaataaga

SEQ ID NO: 58361 - DNA, 2266 bp, Cannabis sativa
atttcttacagctctctaaattattattattttattggttgctgaaaacctcggtcaacaagcatatatgctcgtttggtacaccccggatcatattttattatattgtattgtattatgttggattaaattgtattatattagtattatttaatataataatatgtttggtatggacttgtattaataggttgtgtaaaattataatatatttttaataagctcgaccccaacactgactatgtgccgagtcccgagtttaggtccgggtccaagttcgggttctaggaccgggtttagatccagttcctggatccgagattagggttcggagtccgaggcccaagtcctagtctggggtttggggcctagatcatgtccgggtcctgttccaggtcgggtcctgagtccaagtttgggtcccgagttcgtattctgtccaggtcccgggtttgggtctggttctggtctcgggtcccgagttcgatcccaagtccagtttcgagtccaggtctgggtcccaagctcagttcaggtctagatcccaagtttggttcgggttcgggtccttaaattcggattggagattagggttaacctcaaatcttttgtaaatattataatatatgttaatacggactagttgttattaaataatacaacttacattgtattaaaatttttggtcgtaaaaattaatataatatattgttttatctaaacataatattgtttattatttaatagaatacgactcttatacaacctattaaacgaatccaaaatgattaaggtattattttaaaattaattattttttttgaatttcaatcacaatactataaattacacaaaaatatatatattttattatctttatataaaaatataaataataaatatataaaaaattaactattatttaattattagaaactaaaaagaataatttttgtgttgtcatgtctcactaataatagtgagagatacttatataggataatttttagtttttggttggattaattttgatgaaaaataacactaaatttgagtttttagtgtttcattggagatagtctaataatttatttatttatttatttttttaataaaagatggaatcattcattatcaacataattagctattacaacgttctttaaatcagttagagcattcagctcattgaaccgttgaacgtacaacttgacataaaacaagaccctctagccacacagtgaacagtcctattagcagatcgtttaacaaaagaaattaaaacattcctgaaaattgataaaataaattaataatcctctaccaacaaaccaaattgagagggcatatgaactgaactattaattgtttgaaccacaattaaggcgtctgattcaacaaccatatcatcccaaccgttaccttttatccagatcaaagccttcttaattctttattacttcagctatttcaaagtggacaataccacatctactctctgaaatagcctccaataatctcccattcgcatcacgagctatacacccaaacccaaatctttgatgagcttcaaaaatagtgtcatcgatattcactttgaccttaaaatttactggaaggagactattaaatcgagtgaattttattaagtatactttgaccaaatgtttttgttttaattaagatactagtgactcaaacctcgaaatatatattatcgaaaaacaaaagttcccttgaactaaaaagaatttggtagactttataggataatagtttgataattaatgattattcacactaagcatgcaactgaaaaaggagagctgccattttacaatattcgttaaggtgtcacgcaccacactccagtccagtgtgtggagtgtctttaactttaaagttctattggagacttaagcaaaggaaaagagtgttatgattaaagtgtttcatgtgtagaaaagaaaagaaaaagaaaagacttgttggttgaagagaaggaatataaaggaccacttttggaataaacccgagaattatttgctttgtaaatacttaaatttagttttcacttacagataaattcttaagtttaaactttgacattaataatatttaagttatatttctaaaatttccgtaaatacttatgccttaagtcaatatccacatgtaatttttttattagtatttttaaatgtattttttttaaaaaaaaaattaattatctaaaccaatcaagaattaacatgtggtcgttaac

SEQ ID NO: 58362 - DNA, 1039 bp, Cannabis sativa
ggtttttatgaacacccctattttatttgtacttaattttttaatattaaattttaacggtaaaattttttaaattattgaactgttagcaaatttaaagagtcatctggttaattgtcactatggactgcttatgtgtacgatcttgtacacgtgacacgtttatattaataaacataacattattattttaaaatttattctgaaatcaaataaaattataaaaataaaatatttaaaaaattaaaatattataaattttaaaataattttttattatttttaaataataatattatgtgtactaatataaacgtaccacgtgtataatagtgtacacataagcagtgatgacactttaaatttgttaacaattcagtagttggaggattttactaccaaaatttgagcttggatgattttattataaaaatttgagcttagagagttaagtgcaagtagaataataattaagagggttgaaccgcaaaaaaaattttttttttttaatattagtccataaggaacttgaatttttttttaaatttatccacttttaaaattttgccctaagtcccataaaagttagagacaacccttgaagtaatattagatgtacactcttaaataacatatatttattagtttaaccctaattattacttttaattttacgtttgagattaactacacattattgtgcagggcattattgatgatgccaaatgcaaaaaaaatagaaatctttaagtcaatggaagaatggggaagagaaaacattttacctctattgaagccagtagatcaaagttggcaaccacaagattttctaccagaaccaacatcagaggggttcgaggaacaagtgaaggagttaagagagagagtgaaggaaataccagatgactactttgtggtgttggtagggaatatgatcactgaagaagccctaccatcctaccatgcacgaattaatgggatcaacaacttccacgacagaacaggtgcagatgaaacgccttgggccatatgggcaagg

SEQ ID NO: 58363 - DNA, 2456 bp, Cannabis sativa
gggagggatgggaaaaagggagagatcatgggttcgaacctaggaccttgaagctattaaattattaaaggattgtaaaataccattacgctacactcaaaaaaaaaaaagatttaatagcaatatattaggattgaacattaatttggcttcctctcaaaaaaaaaaacattaatttgccaacttgctcggacctgacctgtaaaactcaaaaaataagaaactacacatttattatgggcgagtcggattgaacccgctcattacacagggcgggttatgggttggtattttcatgtacccatgggtcaagttgaacccagacctgcttgtgtacacattgtatagtatacatatatgtatatatattatagctaaagtcatgtgtttcccttccctattatgaagtcactctcatgccaccggattagagtcgctccattgttgtcgatgctcccctgtgttgcgtttgaatgccttaaataaaactcattttaatgtaattttatttattaattaataaaatataagaaattattttatgttgcttggttcacatgttactttcatgattatatgtttagtatataaatttggttaaattcaaaacatattattatccatgattatagtgttgtctacacagtgaaaaataatcatgataatatgattcaaactatttagttccatgatttatcagtatactagattacactgatatgataatcaacgatatggtttacttacactcgggtaagtagaatgacttttccagaacattagcaaagcaaacttggattagttgtatcggctatacatcgaactggactgatattgtacagtaaaaataaaaaagatattataaacttaccattatatctatttctaagtcaatattacttattatttgatcttaggtcaaaattgatcatagttctgagatggttaaattctagttttattgtactataaaggttctttgacttgttcattactagcttacccgtaggaatatttcatacttacatcttgggaattcggtagtacaattgagtgggagcgttaatcatatatatagaatctatagcttctataattatttagaaatgaaacgatagttttcttagagcttggttaaacgggataaatgatagatcgcccatttcgtaattatattagttttctaaaacattatttacaaggagctaagtattttaagaataaaatacattagagggtaaaatggtaaatttatccttactagatgtaaaccatccatagagaatcaatgactattgagattgaaataatggataatcattgcatatctatatttggtatatagagcattctatgtaatcaggagtgtaattttaaatctatagtggagttaggaagaattaataagtgattaaatttcatatctacttattaagagcttgattacataggctcatgatcctcacattatatgggataatttttctttataaactcaattaattagtttggtaaatcaattaaaattctaaagaagactatattttatttatgaatttaactaaggaagggaaattttgagaagaaaagtaaagcgaaaggtctccttattaattaagacactaaatatattaaaatgataattttgtttgataaatatttatatattaaacagataaaattggtatttaaataaatagaatagaaaaatagcactttaggaaaaagatggaaagatttattgaatgaaataaaatggcaaaaatcaaactccttaagcatatagggaattttggccaacaagtgatttttagaggccattcagtttcctaaaatgcccattctatggttatcctaaatctctaagagaaaaactataaaaggagggttaaggctttgattcaagacacactctacagactttctagttccctaaacacaaaaaactgaatcagaaaagctctcttttctttagagatttcaaaatctctctctccctctcatacatattttgagtccaataatattaagatattgctcacacaattccaagagatactcaaatctttgtagaagactacgtagaaaaaactattcacttattaaaaaaaaaaagattaaggttcaatacttggtgatacttgttggaattttatgccctaaataaaacgcattttattataatcagatttataaataaataaaagatcagaattcattttatgtttcacggttgacatgattaatatcatgattatatgtttaatatataaaatctattaaattctgaacatatatttattcatgattatagtgttgtctacatagtaaaaataatcatgataacatgcttcaaactatttagtcccaaaatttatcagtgcactggatttacactgatgtgataatcagcgacgtgatttacttatacttgtataagtggaatatccttttca

SEQ ID NO: 58364 - DNA, 1239 bp, Cannabis sativa
ctgacctactaagtcttagcaaatgcatagatcaaccaaaaatataaccaaaacataccattatcgcgagacaatatttatttatagagttcgggagaaaacctagcaacgaaatcctagttagactggtcacttgtacttacaaagatgctaagcccattaactatagatcactaactatatgggctaaaatgacagaattccttatcaacctatattttaatgaaataattaaaacgttaatgtaaaccaaaaataaaaatcttagatttaacactttctttaacgttcgttaggctttaagtgctactactactactacaaccaaccatgaaatgtgtagggagaagaaaaaaaaaagggttgtttcttgcttttaattatggcgtggaaatgtgggatttaatttatgatgtgatttttggtcagttctgttcaatttgtatgggcctcgagctcaatgcgatgatgcagaaaggatcgaatttaagctcaaattctacaagatattgcaggtacgaggaacctctgaactgggtttagttgttgaattatgatagaagagatcaatttaggctgtatggactatgtactgtggaccgttttattgtatcaatttatggcaagagtagtttcttttccctgtttgtgaaaatatatctcattattagaaaatgtgtttgtatgagtaattatatgtgtgcatttgagttactttctattgtattcctcttatctgaagtgtttcccaatcccatttttctttcttgtgggtaagctctacttttagattattataagtatctgcaatttggatttagtatgtgatctatctttaacgtaatgtagttctagttttgtgtagttggtttaatgatatttatgaaatattttccttttttgttagaaaagatgggagtctttgctgtgtgagggaaggagaataattgttgttggtgatctaaacattgcacccacttctttagatcgctgtgaagcaggaccagattttgaaaacaatgagtaagctgctgcacaaattctatggagtggtgtctgatgtgatcatgattaagtttttaactgtgtagtggtgcacggttattttattcacaattttatggaagaggctaatgttcagatattaaaaccttgtagattcagaagatggtttcgatccatgttagtggacaatggaggcgctttctttgatgttttcagagaaaaacaccctgatag

SEQ ID NO: 58365 - DNA, 569 bp, Cannabis sativa
gtgaatcttgagataaaattcaagagaatcgtccttgtctgtgcctatggtttttgtgtttccaagctaagtgaagcttggaattcttggaatctttctcgccatttagatgggggaatgtcatcaagagtaaaagtttgaaacttagaatatttactcatttgatggtgattggattctgttttcattgtagctgcttcttcttcttcactttcatcctcacttttgacaataggctcggtttgagagtatgcttcttctgcagaatgagccataaaataagggggtacatcatcttcagaagtatccgagtcttaagactcatcactagtatctgaatcttgagactcgttactagtatctgaatcttaggaccaagtttcaaaattctcttcttggttagaggaagaagacttattgtcaaattcttcatctagttggtggatcatggcagaattaggattattcacagttcattgagccatgaatttctttggctctttttctgggaggatactcgtggaagagaaatatctaggctttcttttttcttaccctttttggttttt

SEQ ID NO: 58366 - DNA, 2244 bp, Cannabis sativa
gccagccaggctctgtaaatgaattttttgcaacattattgcatcaatccttagcatcagcctcagcaccatcaagctttgcattcgcctcgttgagctcttcttggagtttttggcgggcctcgtgttggtctttggcttctttttgggcagcttcgagttcagtcgtgtggttcctctttagttcctcgacatccttggttaagcgtgtgttctctttctaggcattattccattactttgcgatgaactcgcgttgttcaatggacttgcagagttcagtttccagttgttggactttttgaagacctcagtgttgtgccacgtgagacaaaaaggatgcctacaaaattaattttttttatatatataaatttgaaagaaagataaagaagaataaaaagaatgaagaacggaactaatcgaaagactaaagttgagactcctcttgaacaactcctcgaagctgccattgttaaccaaatcctagtcgccagattgaaagaattttaaatggcgctagctagaggtggcatactgtgagcaaaactctgagttggtacttcctgcttcattaagcaaggggcaagaaggttccaccaggaccattttaggccctttactcaaagacttagacgggtgagtagaaccctgggcttactcgtcaacatgtacgatggctggagtgtgagattaaaactgatcttgagctggctcaatgattataggctgcgaggcacgtttcttgttagcagtggtctttcgtgatcttttcatgggctctggagttgctctcgatgaagttcccaaggcagcaactctcttctttcccttcttacccgaggtgttaagaagagattttcgtaatccgtatctgcggagacaaagaagaagattaatcaacacattcaacaatataaaataaaaaggtggggaataaactcccacttaaagaaaagttaccataatcatcaaatgatgaagaggaagaactatgataattattaaacaccctagacactgtgatcatgtatatatcataatggtttattggagataaatcctaacttgaatccggatggcttgccctatccaagttggtaccatactgctcggcaattctgaagtagaaactagtgcaacaaagctggacatggaatcgagggtaccactatcaaacctatgggttatgtgatctatacaaaaattatcccaggtgtaaaagttgtactagctatccctaaaggttactagcaaggtacgtgcgatcctaagtacgatgggtgaccatccacattgattacctcaggatgcttcttctttaacttcctgagggaatacttttttgagatagtgagtgtgagccacataatccttgtcttcctcttcggctggaactgggaccctctgccacttagaatatttcggaaccttgtagtcgcaggtgaattggtctgagccaaggaggttgacggtcctcggattggcctcgttctgtaggaaatctactgagtgaagtccaaaaggaagacctaacaaaattttatgtcgttcagccatctcaggtgtagggatcatcttttagtgacctctgtcaacacaataagtgaaataagtaagcgaccccaattttataaatctaaaaaaactcaaaaccaagcttttgagaaagaaatcacttacgtatgatatgaaacgcagttgtgttgatgggagagagaccagtagtccagaagaaatcatccttgaactcagtcttgtttggtaaccttacaatgatcctacgatcacttgtgtgagtactgaggtaatagaaacctcttgaacctcgcttccttgtgggaacaactttgacagaatagaagtatactatcttgaggggagtaggagactcccagcctaaaatatggtagaggacttttaggcctgccagaattctgcaagaactcggaatcaattgaaaagtagcgattccgagataattacaaaactccttataatattctctcaaggggagtactactccagccttgatatgttcgaggctccaaatgcctattcccgacaaggcactagtgctggcttcaccacactcttctcgaatcaccctttttggtggaaagcagctaaattcccttggagcaacaaatctaatgaaacatcctcgcccttacttgatgccataagtctttaatacaccaccgacataatccccaatagccctcactttggattcaatgagct

SEQ ID NO: 58367 - DNA, 1238 bp, Cannabis sativa
aggcaaagacaagcccacagatttgataagagttgcacgccccgcctttgatagggtcttagccttccaaccctgaagttttgccgtaagattgtctaaaataaaattaaaatcagcatccttttgcctagaccggaaaaggggaagacccaaatattttaaacatccctcaggataatctattcccaaaccttccttgatatctccgctaagttcgctctacccaccaaaattaagtcatccgcaaagaaaatatgggatagaacaggaccacccctgctgagtttaacaccttttatggttccccggtcgagggcatcatggattaatcttggaagaacatcagccacccagatgaaaagataaggggagagcggatctccctgacgaagcccacaagagggattgattttgcctacagggcccccattaagacagatattgagagttgtagtagaaatacattgagatatccaatgacggaattttagagggataccataacattccaggacatggtcaatgaatttctagctcaatctgtcataagctttaacaaggtcaatttttatagcaaagaaaccctccttacccttctttctgttaaacgagtggattatttcttgaacaatgacattgttatcatggatgttcctacccgggacaaaggcagcttgcgttggacagataaaggaaggaaggataggtcttattctgttagccaagatcttagcaatgactttgtacaccacattacaaagagagataggcctgaaatggttggtacgaataggattttggatcttcgggatgagcacaatgtttgtggcattaattcctctatgcatattaccattctcaaaaaagtctcgaatcgcatcacagaagtcagatccaacagattcctaataatgtttatagaaaagaaccgacatcccatcaggacccggggctttatggttattcattgcaaacagagtcctcctaatctcatcagcactaggagtactaacaaggcattccaactcctcttgcgggaaccactcatgaatcaactgagagcaattgtaatccatactagaagcggtctccgtaaagatacccttgaagaaatcgataaactctttcccaacttcctcgcggccggaaatccatacattatctttattcattatactctcaatggcgtttctccgacccttaatagcagccaaaaggaagaagaatttagaacactt
